(19) United States
(12) Patent Application Publication
(10) Pub. No.: US 2026/0130347 A1
(43) Pub. Date: May 14, 2026

(54) TRANSGENIC ANIMALS AND RECOMBINANT HOST CELLS COMPRISING SPECIFIC GENE VARIANTS AND METHODS OF CREATING SAME

(71) Applicant: Colossal Biosciences Inc., Austin, TX (US)

(72) Inventors: Scott BARISH, Austin, TX (US); Kathleen Morrill PIROVICH, Austin, TX (US); Greg GEDMAN, Austin, TX (US); Sven BOCKLANDT, Austin, TX (US); Ben E. LAMM, Austin, TX (US); Beth SHAPIRO, Austin, TX (US)

(21) Appl. No.: 19/208,979

(22) Filed: May 15, 2025

Related U.S. Application Data
(63) Continuation of application No. PCT/US2024/061594, filed on Dec. 20, 2024.
(60) Provisional application No. 63/612,468, filed on Dec. 20, 2023.
(60) Provisional application No. 63/612,477, filed on Dec. 20, 2023.

(51) Int. Cl. A01K 67/0276; C07K 14/47; C12N 5/077

(52) U.S. Cl. CPC A01K 67/0276; C07K 14/47; C12N 5/0656; A01K 2217/054; A01K 2217/077; A01K 2227/101; C12N 2510/00

(57) ABSTRACT

Provided herein are isolated nucleic acids, vectors, recombinant cells, and transgenic animals capable of expressing at least one or more bluebuck gene variants associated with gray/blue coat color and/or melanogenesis and/or altered facial pattern. Also provided are methods of making recombinant cells and/or transgenic animals that comprise at least one bluebuck (Hippotragus leucophaeus) gene variant associated with gray/blue coat color and/or melanogenesis and/or altered facial pattern.

### CROSS REFERENCE TO RELATED APPLICATIONS

[0001] This application is a continuation application of International Patent Application No. PCT/US2024/061594, filed Dec. 20, 2024, which claims priority to U.S. Provisional Application No. 63/612,468, filed Dec. 20, 2023, and U.S. Provisional Application No. 63/612,477, filed Dec. 20, 2023. Each disclosure is herein incorporated by reference in its entirety.

### FIELD OF THE INVENTION

[0002] The present disclosure generally relates to gene edited, and/or reprogrammed mammalian cells and uses thereof.

### REFERENCE TO SEQUENCE LISTING SUBMITTING ELECTRONICALLY

[0003] This application contains a sequence listing, which is submitted electronically. The contents of the electronic sequence listing (069296.15US3 Sequence Lisitng.xml; size: 15,137,605 bytes; and creation date of May 15, 2025) is herein incorporated by reference in its entirety.

### BACKGROUND OF THE INVENTION

[0004] Bluebucks or blue antelopes (Hippotragus leucophaeus) were a species of antelope that lived in South Africa until around 1800. Bluebucks were smaller than the roan antelope and sable antelope and were sometimes considered a subspecies of the roan antelope, but genetic studies have determined that it was a distinct species. The coat of the bluebuck was a uniform bluish-gray with a pale whitish belly. The forehead was brown and darker than the face. The mane of the bluebuck was not as developed as the mane of the roan and sable antelopes, and the ears of the bluebuck were shorter and blunter and not tipped with black. The bluebuck had a darker tail tuft and smaller teeth than those of the roan and sable antelopes.

[0005] The bluebuck was a grazer animal and was believed to have calved where rainfall would peak, as there would be an abundance of available grasses to eat. The bluebuck was confined to the southwestern Cape when encountered by the Europeans, but fossil evidence and rock paintings show that the bluebuck originally had a larger distribution. Bluebucks were common across South Africa, but by the time Europeans encountered the bluebuck in the 17th century, it was already uncommon, perhaps due to its preferred grassland habitat having been reduced in size mainly along the southern coast of South Africa.

[0006] The generation of bluebuck antelopes and the restoration of a population of this extinct species can have a wide array of benefits, including, but not limited to, conservation and de-extinction efforts. In addition, generation of bluebuck antelopes preserve species diversity to combat climate change effects.

[0007] Accordingly, there is a need to restore bluebucks. This disclosure provides methods to generate bluebuck cells and transgenic bluebuck animals.

### BRIEF SUMMARY OF THE INVENTION

[0008] Provided herein are transgenic animals comprising at least one bluebuck (Hippotragus leucophaeus) gene variant associated with a gray/blue coat color, melanogenesis, and/or an altered facial pattern and methods of creating such transgenic animals.

[0009] Provided herein are transgenic animals comprising one or more bluebuck (Hippotragus leucophaeus) gene variants associated with gray/blue coat color and/or melanogenesis. The transgenic animals can, for example comprise one or more bluebuck gene variants associated with gray/blue coat color selected from an ATP Binding Cassette Subfamily B Member 6 (LAN Blood Group) (ABCB6) variant, an Angiotensin Converting Enzyme 2 (ACE2) variant, an Adaptor Related Protein Complex 3 Subunit Beta 1 (AP3B1) variant, an Adaptor Related Protein Complex 3 Subunit Delta 1 (AP3D1) variant, an Agouti Signaling Protein (ASIP) variant, an ATPase Copper Transporting Alpha (ATP7A) variant, a BCL2 Apoptosis Regulator (BCL2) variant, a Biogenesis Of Lysosomal Organelles Complex 1 Subunit 2 (BLOC1S2) variant, a Biogenesis Of Lysosomal Organelles Complex 1 Subunit 3 (BLOC1S3) variant, a Biogenesis Of Lysosomal Organelles Complex 1 Subunit 4 (BLOC1S4) variant, a Biogenesis Of Lysosomal Organelles Complex 1 Subunit 5 (BLOC1S5) variant, a B-Raf Proto-Oncogene, Serine/Threonine Kinase (BRAF) variant, a Dopachrome Tautomerase (DCT) variant, a Dynactin Subunit 1 (DCTN1) variant, a Dynactin Subunit 2 (DCTN2) variant, a Dedicator Of Cytokinesis 7 (DOCK7) variant, a Dual Serine/Threonine And Tyrosine Protein Kinase (DSTYK) variant, a Dystrobrevin Binding Protein 1 (DTNBP1) variant, an Embryonic Ectoderm Development (EED) variant, a FIG. 4 Phosphoinositide 5-Phosphatase (FIG. 4) variant, a Gamma-Glutamyltransferase 1 (GGT1) variant, a G Protein-Coupled Receptor 143 (GPR143) variant, a HPS1 Biogenesis Of Lysosomal Organelles Complex 3 Subunit 1 (HPS1) variant, a HPS3 Biogenesis Of Lysosomal Organelles Complex 2 Subunit 1 (HPS3) variant, a HPS4 Biogenesis Of Lysosomal Organelles Complex 3 Subunit 2 (HPS4) variant, a HPS5 Biogenesis Of Lysosomal Organelles Complex 2 Subunit 2 (HPS5) variant, a HPS6 Biogenesis Of Lysosomal Organelles Complex 2 Subunit 3 (HPS6) variant, a Lysosomal Trafficking Regulator (LYST) variant, a Membrane Bound Transcription Factor Peptidase, Site 1 (MBTPS1) variant, a Mucolipin TRP Cation Channel 3 (MCOLN3) variant, a Major Facilitator Superfamily Domain Containing 12 (MFSD12) variant, a Melanocyte Inducing Transcription Factor (MITF) variant, a Muskelin 1 (MKLN1) variant, a Melan-A (MLANA) variant, a Melanophilin (MPLH) variant, a Melanoregulin (MREG) variant, a Myosin VA (MYO5A) variant, a Notch Receptor 1 (NOTCH1) variant, a Notch Receptor 2 (NOTCH2) variant, an OCA2 Melanosomal Transmembrane Protein (OCA2) variant, a Phenylalanine Hydroxylase (PAH) variant, a Phosphoinositide Kinase, FYVE-Type Zinc Finger Containing (PIKFYVE) variant, a Premelanosome Protein (PMEL) variant, a RAB27A, Member RAS Oncogene Family (RAB27A) variant, a RAB38, Member RAS Oncogene Family (RAB38) variant, a Rab Geranylgeranyltransferase Subunit Alpha (RABGGTA) variant, a Raf-1 Proto-Oncogene, Serine/Threonine Kinase (RAF1) variant, a Solute Carrier Family 24 Member 5 (SLC24A5) variant, a Solute Carrier Family 45 Member 2 (SLC45A2) variant, a Solute Carrier Family 7 Member 11 (SLC7A11) variant, a Snail Family Transcriptional Repressor 2 (SNAI2) variant, a Sperm Associated Antigen 9 (SPAG9) variant, a Two Pore Segment Channel 2 (TPCN2) variant, a Tyrosinase (TYR) variant, a Tyrosinase Related Protein 1 (TYRP1) variant, a VAC14 Component Of PIKFYVE Complex (VAC14) variant, a VPS33A Core Subunit Of CORVET And HOPS Complexes (VPS33A) variant, and a YKT6 V-SNARE Homolog (YKT6) variant. The transgenic animals can, for example comprise one or more bluebuck gene variants associated with melanogenesis selected from an Adaptor Related Protein Complex 3 Subunit Delta 1 (AP3D1) variant, an Activating Signal Cointegrator 1 Complex Subunit 2 (ASCC2) variant, an ATPase H+ Transporting V0 Subunit A2 (ATP6V0A2) variant, a CCDC53 variant, a CD72 molecule (CD72) variant, a Cyclin Dependent Kinase 12 (CDK12) variant, a Chromodomain Helicase DNA Binding Protein 8 (CHD8) variant, a COMM Domain Containing 5 (COMMD5) variant, a DSCR3 variant, an ElA Binding Protein P300 (EP300) variant, a FIG. 4 Phosphoinositide 5-Phosphatase (FIG. 4) variant, a FRY Like Transcription Coactivator (FRYL) variant, a Histone Deacetylase 4 (HDAC4) variant, a Heterogeneous Nuclear Ribonucleoprotein A2/B1 Like 1 (HNRNPA2B1L1) variant, a Heterogeneous Nuclear Ribonucleoprotein A2/B1 Like 2 (HNRNPA2B1L2) variant, a Heterogeneous Nuclear Ribonucleoprotein A2/B1 Like 3 (HNRNPA2B1L3) variant, a Heterogeneous Nuclear Ribonucleoprotein A2/B1 Like 4 (HNRNPA2B1L4) variant, a HPS3 Biogenesis Of Lysosomal Organelles Complex 2 Subunit 1 (HPS3) variant, a HPS4 Biogenesis Of Lysosomal Organelles Complex 3 Subunit 2 (HPS4) variant, a HPS5 Biogenesis Of Lysosomal Organelles Complex 2 Subunit 2 (HPS5) variant, a HPS6 Biogenesis Of Lysosomal Organelles Complex 2 Subunit 3 (HPS6) variant, an Integrator Complex Subunit 8 (INTS8) variant, a Lysosomal Trafficking Regulator (LYST) variant, a Nuclear Receptor Corepressor 1 (NCOR1) variant, a RAB9A, Member RAS Oncogene Family (RAB9A) variant, a RB Transcriptional Corepressor 1 (RB1) variant, a SR-Related CTD Associated Factor 4 (SCAF4) variant, a SEC31 Homolog A, COPII Coat Complex Component (SEC31A) variant, a Siah E3 Ubiquitin Protein Ligase 1 (SIAH1) variant, a SMG7 Nonsense Mediated MRNA Decay Factor (SMG7) variant, a Sorting Nexin 13 Like 1 (SNX13L1) variant, a Sorting Nexin 13 Like 2 (SNX13L2) variant, a TBC1 Domain Family Member 5 (TBC1D5) variant, and a WD Repeat And FYVE Domain Containing 1 (WDFY1) variant.

[0010] Also provided are transgenic animals comprising one or more bluebuck (Hippotragus leucophaeus) gene variants associated with an altered facial pattern, wherein the one or more bluebuck gene variants associated with altered facial pattern are selected from an ADAM Metallopeptidase With Thrombospondin Type 1 Motif 20 (ADAMTS20) variant, a Bone Morphogenetic Protein 4 (BMP4) variant, a Dedicator Of Cytokinesis 7 (DOCK7) variant, an Endothelin 3 (EDN3) variant, an Endothelin Receptor Type B (EDNRB) variant, an ETS Proto-Oncogene 1, Transcription Factor Like 1 (ETSIL1) variant, an ETS Proto-Oncogene 1, Transcription Factor Like 2 (ETS1L2) variant, a Forkhead Box D3 (FOXD3) variant, a Histone Deacetylase 1 (HDAC1) variant, an Interferon Regulatory Factor 1 (IRF1) variant, a KIT Proto-Oncogene, Receptor Tyrosine Kinase (KIT) variant, a KIT Ligand (KITLG) variant, a Mucolipin TRP Cation Channel 3 (MCOLN3) variant, a Melanocyte Inducing Transcription Factor (MITF) variant, a Paired Box 3 (PAX3) variant, a Snail Family Transcriptional Repressor 2 (SNAI2) variant, a SRY-Box Transcription Factor 10 (SOX10) variant, a SRY-Box Transcription Factor 2 (SOX2) variant, a Transient Receptor Potential Cation Channel Subfamily M Member 1 (TRPM1) variant, a Wnt Family Member 3A (WNT3A) variant, and a Zinc Finger Homeobox 4 (ZFHX4) variant.

[0011] Also provided are transgenic animals comprising one or more bluebuck (Hippotragus leucophaeus) gene variants associated with gray/blue coat color, wherein the one or more bluebuck gene variants comprise (a) a loss-of-function agouti signaling protein (ASIP) variant; (b) a defensin beta 103 (DEFB103) missense variant; (c) a loss-of-function melanophilin (MLPH) variant; (d) a premelanosome protein (PMEL) missense variant; (e) a loss-of-function lysosomal trafficking regulator (LYST) variant; and/or (f) a loss-of-function solute carrier family 45 member 2 (SLC45A2) variant.

[0012] Also provided are methods of creating a transgenic animal comprising a bluebuck gene variant associated with gray/blue coat color and/or an altered melanin biosynthesis pathway of a bluebuck. The methods comprise: (a) obtaining a cell from the animal; (b) introducing into the cell at least one or more bluebuck (Hippotragus leucophaeus) gene variants associated with gray/blue coat color and/or melanogenesis, wherein the one or more bluebuck gene variants associated with gray/blue coat color are selected from an ABCB6 variant, an ACE2 variant, an AP3B1 variant, an AP3D1 variant, an ASIP variant, an ATP7A variant, a BCL2 variant, a BLOC1S2 variant, a BLOC1S3 variant, a BLOC1S4 variant, a BLOC1S5 variant, a BRAF variant, a DCT variant, a DCTN1 variant, a DCTN2 variant, a DOCK7 variant, a DSTYK variant, a DTNBP1 variant, an EED variant, a FIG. 4 variant, a GGT1 variant, a GPR143 variant, a HPS1 variant, a HPS3 variant, a HPS4 variant, a HPS5 variant, a HPS6 variant, a LYST variant, a MBTPS1 variant, a MCOLN3 variant, a MFSD12 variant, a MITF variant, a MKLN1 variant, a MLANA variant, a MPLH variant, a MREG variant, a MYO5A variant, a NOTCH1 variant, a NOTCH2 variant, an OCA2 variant, a PAH variant, a PIKFYVE variant, a PMEL variant, a RAB27A variant, a RAB38 variant, a RABGGTA variant, a RAF1 variant, a SLC24A5 variant, a SLC45A2 variant, a SLC7A11 variant, a SNAI2 variant, a SPAG9 variant, a TPCN2 variant, a TYR variant, a TYRP1 variant, a VAC14 variant, a VPS33A variant, and a YKT6 variant, and the one or more bluebuck gene variants associated with melanogenesis are selected from an AP3D1 variant, an ASCC2 variant, an ATP6V0A2 variant, a CCDC53 variant, a CD72 variant, a CDK12 variant, a CHD8 variant, a COMMD5 variant, a DSCR3 variant, an EP300 variant, a FIG. 4 variant, a FRYL variant, a HDAC4 variant, a HNRNPA2B1L1 variant, a HNRNPA2B1L2 variant, a HNRNPA2B1L3 variant, a HNRNPA2B1L4 variant, a HPS3 variant, a HPS4 variant, a HPS5 variant, a HPS6 variant, an INTS8 variant, a LYST variant, a NCOR1 variant, a RAB9A variant, a RB1 variant, a SCAF4 variant, a SEC31A variant, a SIAH1 variant, a SMG7 variant, a SNX13L1 variant, a SLX13L2 variant, a TBC1D5 variant, and a WDFY1 variant; and (c) utilizing the recombinant cell to produce a transgenic animal, wherein the transgenic animal has a gray/blue coat color and/or melanogenesis.

[0013] Also provided are methods of creating a transgenic animal comprising a bluebuck gene variant associated with gray/blue coat color. The methods comprise: (a) obtaining a cell from the animal; (b) introducing into the cell at least one bluebuck gene variant selected from: (1) a loss-of-function ASIP variant; (2) a DEFB103 missense variant; (3) a loss-of-function MLPH variant; (4) a PME) missense variant; (5) a loss-of-function LYST variant; and/or (6) a loss-of-function SLC45A2 variant, whereby introducing the at least one bluebuck gene variant produces a recombinant cell; and (c) utilizing the recombinant cell to produce a transgenic animal, wherein the transgenic animal has a gray/blue coat color.

[0014] Also provided are methods of creating a transgenic animal comprising a bluebuck gene variant associated with altered facial pattern. The methods comprise: (a) obtaining a cell from the animal; (b) introducing into the cell at least one of a bluebuck gene variant associated with altered facial pattern selected from an ADAMTS20 variant, a BMP4 variant, a DOCK7 variant, an EDN3 variant, an EDNRB variant, an ETSILI variant, an ETS1L2 variant, a FOXD3 variant, a HDAC1 variant, an IRFI variant, a KIT variant, a KITLG variant, a MCOLN3 variant, a MITF variant, a PAX3 variant, a SNAI2 variant, a SOX10 variant, a SOX2 variant, a TRPMI variant, a WNT3A variant, and a ZFHX4 variant; and (c) utilizing the recombinant cell to produce a transgenic animal, wherein the transgenic animal has an altered facial pattern.

[0015] In certain embodiments, the transgenic animal comprises 2, 3, 4, 5, 6, 7, 8, 9, 10, 15, 20, 25, 30, 40, 50, 60, 70, 80, 90, 95, 100, 101, 102 (or any number in between) bluebuck gene variants. In certain embodiments, the bluebuck gene variant comprises at least one change in the nucleotide sequence of the gene. The change in the nucleotide sequence can, for example, be a substitution, an insertion, a deletion, or a combination thereof. The substitution, the insertion, the deletion, or a combination thereof can, for example, be in a 5′ untranslated region of the gene, an intron of the gene, an exon of the gene, a 3′ untranslated region of the gene, or a combination thereof. The substitution, the insertion, the deletion, or a combination thereof can, for example, be in a regulatory region of the gene. In other embodiments, the bluebuck gene variant comprises one or more substitutions within the regulatory region and/or within the coding region of the gene as compared to a corresponding reference genome, wherein the corresponding reference genome is the genome of the animal prior to the one or more substitutions.

[0016] In certain embodiments, the bluebuck gene variant associated with gray/blue coat color comprises a nucleotide sequence having at least 80%, at least 85%, at least 90%, or at least 95% identity to a nucleotide sequence selected from the group consisting of SEQ ID NOs: 45-102 and combinations thereof. The bluebuck gene variant associated with gray/blue coat color can, for example, comprise a nucleotide sequence selected from the group consisting of SEQ ID NOs: 147-204, and combinations thereof.

[0017] In certain embodiments, the bluebuck gene variant associated with melanogenesis comprises a nucleotide sequence having at least 80%, at least 85%, at least 90%, or at least 95% identity to a nucleotide sequence selected from the group consisting of SEQ ID NOs: 48, 64, 68-72, 120-146, and combinations thereof. The bluebuck gene variant associated with melanogenesis can, for example, comprise a nucleotide sequence selected from the group consisting of SEQ ID NOs: 150, 166, 170-174, 222-248, and combinations thereof.

[0018] In certain embodiments, wherein the transgenic animals comprising one or more bluebuck gene variants associated with gray/blue coat color and melanogenesis selected from an ABCB6 variant, an ACE2 variant, an AP3B1 variant, an AP3D1 variant, an ASIP variant, an ATP7A variant, a BCL2 variant, a BLOC1S2 variant, a BLOC1S3 variant, a BLOC1S4 variant, a BLOC1S5 variant, a BRAF variant, a DCT variant, a DCTN1 variant, a DCTN2 variant, a DOCK7 variant, a DSTYK variant, a DTNBP1 variant, an EED variant, a FIG. 4 variant, a GGT1 variant, a GPR143 variant, a HPS1 variant, a HPS3 variant, a HPS4 variant, a HPS5 variant, a HPS6 variant, a LYST variant, a MBTPS1 variant, a MCOLN3 variant, a MFSD12 variant, a MITF variant, a MKLN1 variant, a MLANA variant, a MPLH variant, a MREG variant, a MYO5A variant, a NOTCH1 variant, a NOTCH2 variant, an OCA2 variant, a PAH variant, a PIKFYVE variant, a PMEL variant, a RAB27A variant, a RAB38 variant, a RABGGTA variant, a RAF1 variant, a SLC24A5 variant, a SLC45A2 variant, a SLC7A11 variant, a SNAI2 variant, a SPAG9 variant, a TPCN2 variant, a TYR variant, a TYRP1 variant, a VAC14 variant, a VPS33A variant, a YKT6 variant, an AP3D1 variant, an ASCC2 variant, an ATP6V0A2 variant, a CCDC53 variant, a CD72 variant, a CDK12 variant, a CHD8 variant, a COMMD5 variant, a DSCR3 variant, an EP300 variant, a FIG. 4 variant, a FRYL variant, a HDAC4 variant, a HNRNPA2B1L1 variant, a HNRNPA2B1L2 variant, a HNRNPA2B1L3 variant, a HNRNPA2B1L4 variant, a HPS3 variant, a HPS4 variant, a HPS5 variant, a HPS6 variant, an INTS8 variant, a LYST variant, a NCOR1 variant, a RAB9A variant, a RB1 variant, a SCAF4 variant, a SEC31A variant, a SIAH1 variant, a SMG7 variant, a SNX13L1 variant, a SNX13L2 variant, a TBC1D5 variant, and a WDFY1 variant, the transgenic animal can further comprise one or more bluebuck gene variants associated with altered facial pattern selected from an ADAMTS20 variant, a BMP4 variant, a DOCK7 variant, an EDN3 variant, an EDNRB variant, an ETS1L1 variant, an ETSIL2 variant, a FOXD3 variant, a HDAC1 variant, an IRF1 variant, a KIT variant, a KITLG variant, a MCOLN3 variant, a MITF variant, a PAX3 variant, a SNAI2 variant, a SOX10 variant, a SOX2 variant, a TRPMI variant, a WNT3A variant, and a ZFHX4 variant.

[0019] In certain embodiments, the bluebuck gene variant associated with altered facial pattern comprises a nucleotide sequence having at least 80%, at least 85%, at least 90%, or at least 95% identity to a nucleotide sequence selected from the group consisting of SEQ ID NOs: 60, 74, 76, 95, 103-119, and combinations thereof. The bluebuck gene variant associated with altered facial pattern can, for example, comprise a nucleotide sequence selected from the group consisting of SEQ ID NOs: 162, 176, 178, 197, 205-221, and combinations thereof.

[0020] In certain embodiments, wherein the transgenic animal comprises one or more bluebuck gene variants associated with gray/blue coat color and melanogenesis selected from an ABCB6 variant, an ACE2 variant, an AP3B1 variant, an AP3D1 variant, an ASIP variant, an ATP7A variant, a BCL2 variant, a BLOC1S2 variant, a BLOC1S3 variant, a BLOC1S4 variant, a BLOC1S5 variant, a BRAF variant, a DCT variant, a DCTN1 variant, a DCTN2 variant, a DOCK7 variant, a DSTYK variant, a DTNBP1 variant, an EED variant, a FIG. 4 variant, a GGT1 variant, a GPR143 variant, a HPS1 variant, a HPS3 variant, a HPS4 variant, a HPS5 variant, a HPS6 variant, a LYST variant, a MBTPS1 variant, a MCOLN3 variant, a MFSD12 variant, a MITF variant, a MKLN1 variant, a MLANA variant, a MPLH variant, a MREG variant, a MYO5A variant, a NOTCH1 variant, a NOTCH2 variant, an OCA2 variant, a PAH variant, a PIKFYVE variant, a PMEL variant, a RAB27A variant, a RAB38 variant, a RABGGTA variant, a RAF1 variant, a SLC24A5 variant, a SLC45A2 variant, a SLC7A11 variant, a SNAI2 variant, a SPAG9 variant, a TPCN2 variant, a TYR variant, a TYRP1 variant, a VAC14 variant, a VPS33A variant, a YKT6 variant, an AP3D1 variant, an ASCC2 variant, an ATP6V0A2 variant, a CCDC53 variant, a CD72 variant, a CDK12 variant, a CHD8 variant, a COMMD5 variant, a DSCR3 variant, an EP300 variant, a FIG. 4 variant, a FRYL variant, a HDAC4 variant, a HNRNPA2B1L1 variant, a HNRNPA2B1L2 variant, a HNRNPA2B1L3 variant, a HNRNPA2B1L4 variant, a HPS3 variant, a HPS4 variant, a HPS5 variant, a HPS6 variant, an INTS8 variant, a LYST variant, a NCOR1 variant, a RAB9A variant, a RB1 variant, a SCAF4 variant, a SEC31A variant, a SIAH1 variant, a SMG7 variant, a SNX13L1 variant, a SNX13L2 variant, a TBC1D5 variant, and a WDFY1 variant, the transgenic animal can further comprise one or more bluebuck gene variants associated with gray/blue coat color selected from (a) a loss-of-function ASIP variant; (b) a DEFB103 missense variant; (c) a loss-of-function MLPH variant; (d) a PMEL missense variant; (e) a loss-of-function LYST variant; and/or (f) a loss-of-function SLC45A2 variant. In certain embodiments, the transgenic animal can further comprise one or more bluebuck gene variants associated with altered facial pattern selected from an ADAMTS20 variant, a BMP4 variant, a DOCK7 variant, an EDN3 variant, an EDNRB variant, an ETSIL1 variant, an ETS1L2 variant, a FOXD3 variant, a HDAC1 variant, an IRF1 variant, a KIT variant, a KITLG variant, a MCOLN3 variant, a MITF variant, a PAX3 variant, a SNAI2 variant, a SOX10 variant, a SOX2 variant, a TRPM1 variant, a WNT3A variant, and a ZFHX4 variant.

[0021] In certain embodiments, the transgenic animal fails to express an endogenous homologue of at least one of ABCB6, ACE2, AP3B1, AP3D1, ASIP, ATP7A, BCL2, BLOC1S2, BLOC1S3, BLOC1S4, BLOC1S5, BRAF, DCT, DCTN1, DCTN2, DOCK7, DSTYK, DTNBP1, EED, FIG. 4, GGT1, GPR143, HPS1, HPS3, HPS4, HPS5, HPS6, LYST, MBTPS1, MCOLN3, MFSD12, MITF, MKLN1, MLANA, MPLH, MREG, MYO5A, NOTCH1, NOTCH2, OCA2, PAH, PIKFYVE, PMEL, RAB27A, RAB38, RABGGTA, RAF1, SLC24A5, SLC45A2, SLC7A11, SNAI2, SPAG9, TPCN2, TYR, TYRP1, VAC14, VPS33A, YKT6, ASCC2, ATP6V0A2, CCDC53, CD72, CDK12, CHD8, COMMD5, DSCR3, EP300, FRYL, HDAC4, HNRNPA2B1L1, HNRNPA2B1L2, HNRNPA2B1L3, HNRNPA2B1L4, INTS8, NCOR1, RAB9A, RB1, SCAF4, SEC31A, SIAH1, SMG7, SNX13L1, SNX13L2, TBC1D5, WDFY1, ADAMTS20, BMP4, EDN3, EDNRB, ETS1L1, ETS1L2, FOXD3, HDAC1, IRF1, KIT, KITLG, PAX3, SOX10, SOX2, TRPM1, WNT3A, and ZFHX4. In certain embodiments, the transgenic animal fails to express the endogenous homologue of at least 2, 3, 4, 5, 6, 7, 8, 9, 10, 15, 20, 25, 30, 35, 40, 45, 50, 55, 60, 65, 70, 75, 80, 85, 90, 95, 100, 101, 102 (or any number in between) of ABCB6, ACE2, AP3B1, AP3D1, ASIP, ATP7A, BCL2, BLOC1S2, BLOC1S3, BLOC1S4, BLOC1S5, BRAF, DCT, DCTN1, DCTN2, DOCK7, DSTYK, DTNBP1, EED, FIG. 4, GGT1, GPR143, HPS1, HPS3, HPS4, HPS5, HPS6, LYST, MBTPS1, MCOLN3, MFSD12, MITF, MKLN1, MLANA, MPLH, MREG, MYO5A, NOTCH1, NOTCH2, OCA2, PAH, PIKFYVE, PMEL, RAB27A, RAB38, RABGGTA, RAF1, SLC24A5, SLC45A2, SLC7A11, SNAI2, SPAG9, TPCN2, TYR, TYRP1, VAC14, VPS33A, YKT6, ASCC2, ATP6V0A2, CCDC53, CD72, CDK12, CHD8, COMMD5, DSCR3, EP300, FRYL, HDAC4, HNRNPA2B1L1, HNRNPA2B1L2, HNRNPA2B1L3, HNRNPA2B1L4, INTS8, NCOR1, RAB9A, RB1, SCAF4, SEC31A, SIAH1, SMG7, SNX13L1, SNX13L2, TBC1D5, WDFY1, ADAMTS20, BMP4, EDN3, EDNRB, ETS1L1, ETS1L2, FOXD3, HDAC1, IRF1, KIT, KITLG, PAX3, SOX10, SOX2, TRPM1, WNT3A, and ZFHX4.

[0022] In certain embodiments, the transgenic animal is an antelope. In certain embodiments, the transgenic animal is a roan antelope (Hippotragus equinus) or a sable antelope (Hippotragus niger).

[0023] Also provided are recombinant host cells comprising one or more bluebuck (Hippotragus leucophaeus) gene variants associated with gray/blue coat color and/or melanogenesis. In certain embodiments, the recombinant host cells comprise one or more bluebuck gene variants associated with gray/blue coat color selected from an ABCB6 variant, an ACE2 variant, an AP3B1 variant, an AP3D1 variant, an ASIP variant, an ATP7A variant, a BCL2 variant, a BLOC1S2 variant, a BLOC1S3 variant, a BLOC1S4 variant, a BLOC1S5 variant, a BRAF variant, a DCT variant, a DCTN1 variant, a DCTN2 variant, a DOCK7 variant, a DSTYK variant, a DTNBP1 variant, an EED variant, a FIG. 4 variant, a GGT1 variant, a GPR143 variant, a HPS1 variant, a HPS3 variant, a HPS4 variant, a HPS5 variant, a HPS6 variant, a LYST variant, a MBTPS1 variant, a MCOLN3 variant, a MFSD12 variant, a MITF variant, a MKLN1 variant, a MLANA variant, a MPLH variant, a MREG variant, a MYO5A variant, a NOTCH1 variant, a NOTCH2 variant, an OCA2 variant, a PAH variant, a PIKFYVE variant, a PMEL variant, a RAB27A variant, a RAB38 variant, a RABGGTA variant, a RAF1 variant, a SLC24A5 variant, a SLC45A2 variant, a SLC7A11 variant, a SNAI2 variant, a SPAG9 variant, a TPCN2 variant, a TYR variant, a TYRP1 variant, a VAC14 variant, a VPS33A variant, and a YKT6 variant. In certain embodiments, the recombinant host cells comprise one or more bluebuck gene variants associated with melanogenesis selected from an AP3D1 variant, an ASCC2 variant, an ATP6V0A2 variant, a CCDC53 variant, a CD72 variant, a CDK12 variant, a CHD8 variant, a COMMD5 variant, a DSCR3 variant, an EP300 variant, a FIG. 4 variant, a FRYL variant, a HDAC4 variant, a HNRNPA2B1L1 variant, a HNRNPA2B1L2 variant, a HNRNPA2B1L3 variant, a HNRNPA2B1L4 variant, a HPS3 variant, a HPS4 variant, a HPS5 variant, a HPS6 variant, an INTS8 variant, a LYST variant, a NCOR1 variant, a RAB9A variant, a RB1 variant, a SCAF4 variant, a SEC31A variant, a SIAH1 variant, a SMG7 variant, a SNX13L1 variant, a SLX13L2 variant, a TBC1D5 variant, and a WDFY1 variant.

[0024] Also provided are recombinant host cells comprising one or more bluebuck (Hippotragus leucophaeus) gene variants associated with altered facial pattern. In certain embodiments, the recombinant host cells comprise one or more bluebuck gene variants associated with altered facial pattern selected from an ADAMTS20 variant, a BMP4 variant, a DOCK7 variant, an EDN3 variant, an EDNRB variant, an ETS1L1 variant, an ETS1L2 variant, a FOXD3 variant, a HDAC1 variant, an IRF1 variant, a KIT variant, a KITLG variant, a MCOLN3 variant, a MITF variant, a PAX3 variant, a SNAI2 variant, a SOX10 variant, a SOX2 variant, a TRPM1 variant, a WNT3A variant, and a ZFHX4 variant.

[0025] Also provided are recombinant host cells comprising one or more bluebuck (Hippotragus leucophaeus) gene variants associated with gray/blue coat color. The recombinant host cells comprise one or more bluebuck gene variants selected from (a) a loss-of-function ASIP variant; (b) a DEFB103 missense variant; (c) a loss-of-function MLPH variant; (d) a PMEL missense variant; (e) a loss-of-function LYST variant; and/or (d) a loss-of-function SLC45A2 variant.

[0026] In certain embodiments, the recombinant host cell comprises 2, 3, 4, 5, 6, 7, 8, 9, 10, 15, 20, 25, 30, 40, 50, 60, 70, 80, 90, 95, 100, 101, 102 (or any number in between) bluebuck gene variants. In certain embodiments, the bluebuck gene variant comprises at least one change in the nucleotide sequence of the gene. The change in the nucleotide sequence can, for example, be a substitution, an insertion, a deletion, or a combination thereof. The substitution, the insertion, the deletion, or a combination thereof can, for example, be in a 5′ untranslated region of the gene, an intron of the gene, an exon of the gene, a 3′ untranslated region of the gene, or a combination thereof. The substitution, the insertion, the deletion, or a combination thereof can, for example, be in a regulatory region of the gene. In other embodiments, the bluebuck gene variant comprises one or more substitutions within the regulatory region and/or within the coding region of the gene as compared to a corresponding reference genome, wherein the corresponding reference genome is the genome of the recombinant host cell prior to the one or more substitutions.

[0027] In certain embodiments, the bluebuck gene variant associated with gray/blue coat color comprises a nucleotide sequence having at least 80%, at least 85%, at least 90%, or at least 95% identity to a nucleotide sequence selected from the group consisting of SEQ ID NOs: 45-102 and combinations thereof. The bluebuck gene variant associated with gray/blue coat color can, for example, comprise a nucleotide sequence selected from the group consisting of SEQ ID NOs: 147-204, and combinations thereof.

[0028] In certain embodiments, the bluebuck gene variant associated with melanogenesis comprises a nucleotide sequence having at least 80%, at least 85%, at least 90%, or at least 95% identity to a nucleotide sequence selected from the group consisting of SEQ ID NOs: 48, 64, 68-72, 120-146, and combinations thereof. The bluebuck gene variant associated with melanogenesis can, for example, comprise a nucleotide sequence selected from the group consisting of SEQ ID NOs: 150, 166, 170-174, 222-248, and combinations thereof.

[0029] In certain embodiments, in recombinant host cells comprising one or more bluebuck gene variants associated with gray/blue coat color and melanogenesis selected from an ABCB6 variant, an ACE2 variant, an AP3B1 variant, an AP3D1 variant, an ASIP variant, an ATP7A variant, a BCL2 variant, a BLOC1S2 variant, a BLOC1S3 variant, a BLOC1S4 variant, a BLOC1S5 variant, a BRAF variant, a DCT variant, a DCTN1 variant, a DCTN2 variant, a DOCK7 variant, a DSTYK variant, a DTNBP1 variant, an EED variant, a FIG. 4 variant, a GGT1 variant, a GPR143 variant, a HPS1 variant, a HPS3 variant, a HPS4 variant, a HPS5 variant, a HPS6 variant, a LYST variant, a MBTPS1 variant, a MCOLN3 variant, a MFSD12 variant, a MITF variant, a MKLN1 variant, a MLANA variant, a MPLH variant, a MREG variant, a MYO5A variant, a NOTCH1 variant, a NOTCH2 variant, an OCA2 variant, a PAH variant, a PIKFYVE variant, a PMEL variant, a RAB27A variant, a RAB38 variant, a RABGGTA variant, a RAF1 variant, a SLC24A5 variant, a SLC45A2 variant, a SLC7A11 variant, a SNAI2 variant, a SPAG9 variant, a TPCN2 variant, a TYR variant, a TYRP1 variant, a VAC14 variant, a VPS33A variant, a YKT6 variant, an AP3D1 variant, an ASCC2 variant, an ATP6V0A2 variant, a CCDC53 variant, a CD72 variant, a CDK12 variant, a CHD8 variant, a COMMD5 variant, a DSCR3 variant, an EP300 variant, a FIG. 4 variant, a FRYL variant, a HDAC4 variant, a HNRNPA2B1L1 variant, a HNRNPA2B1L2 variant, a HNRNPA2B1L3 variant, a HNRNPA2B1L4 variant, a HPS3 variant, a HPS4 variant, a HPS5 variant, a HPS6 variant, an INTS8 variant, a LYST variant, a NCOR1 variant, a RAB9A variant, a RB1 variant, a SCAF4 variant, a SEC31A variant, a SIAH1 variant, a SMG7 variant, a SNX13L1 variant, a SNX13L2 variant, a TBC1D5 variant, and a WDFY1 variant, the recombinant host cell can further comprise a bluebuck gene variant associated with altered facial pattern selected from an ADAMTS20 variant, a BMP4 variant, a DOCK7 variant, an EDN3 variant, an EDNRB variant, an ETS1L1 variant, an ETS1L2 variant, a FOXD3 variant, a HDAC1 variant, an IRF1 variant, a KIT variant, a KITLG variant, a MCOLN3 variant, a MITF variant, a PAX3 variant, a SNAI2 variant, a SOX10 variant, a SOX2 variant, a TRPM1 variant, a WNT3A variant, and a ZFHX4 variant.

[0030] In certain embodiments, the bluebuck gene variant associated with altered facial pattern comprises a nucleotide sequence having at least 80%, at least 85%, at least 90%, or at least 95% identity to a nucleotide sequence selected from the group consisting of SEQ ID NOs: 60, 74, 76, 95, 103-119, and combinations thereof. The bluebuck gene variant associated with altered facial pattern can, for example, comprise a nucleotide sequence selected from the group consisting of SEQ ID NOs: 162, 176, 178, 197, 205-221, and combinations thereof.

[0031] In certain embodiments, in recombinant host cells comprising one or more bluebuck gene variants associated with gray/blue coat color and melanogenesis selected from an ABCB6 variant, an ACE2 variant, an AP3B1 variant, an AP3D1 variant, an ASIP variant, an ATP7A variant, a BCL2 variant, a BLOC1S2 variant, a BLOC1S3 variant, a BLOC1S4 variant, a BLOC1S5 variant, a BRAF variant, a DCT variant, a DCTN1 variant, a DCTN2 variant, a DOCK7 variant, a DSTYK variant, a DTNBP1 variant, an EED variant, a FIG. 4 variant, a GGT1 variant, a GPR143 variant, a HPS1 variant, a HPS3 variant, a HPS4 variant, a HPS5 variant, a HPS6 variant, a LYST variant, a MBTPS1 variant, a MCOLN3 variant, a MFSD12 variant, a MITF variant, a MKLN1 variant, a MLANA variant, a MPLH variant, a MREG variant, a MYO5A variant, a NOTCH1 variant, a NOTCH2 variant, an OCA2 variant, a PAH variant, a PIKFYVE variant, a PMEL variant, a RAB27A variant, a RAB38 variant, a RABGGTA variant, a RAF1 variant, a SLC24A5 variant, a SLC45A2 variant, a SLC7A11 variant, a SNAI2 variant, a SPAG9 variant, a TPCN2 variant, a TYR variant, a TYRP1 variant, a VAC14 variant, a VPS33A variant, a YKT6 variant, an AP3D1 variant, an ASCC2 variant, an ATP6V0A2 variant, a CCDC53 variant, a CD72 variant, a CDK12 variant, a CHD8 variant, a COMMD5 variant, a DSCR3 variant, an EP300 variant, a FIG. 4 variant, a FRYL variant, a HDAC4 variant, a HNRNPA2B1L1 variant, a HNRNPA2B1L2 variant, a HNRNPA2B1L3 variant, a HNRNPA2B1L4 variant, a HPS3 variant, a HPS4 variant, a HPS5 variant, a HPS6 variant, an INTS8 variant, a LYST variant, a NCOR1 variant, a RAB9A variant, a RB1 variant, a SCAF4 variant, a SEC31A variant, a SIAH1 variant, a SMG7 variant, a SNX13L1 variant, a SNX13L2 variant, a TBC1D5 variant, and a WDFY1 variant, the recombinant host cell can further comprise one or more bluebuck gene variants associated with gray/blue coat color selected from (a) a loss-of-function ASIP variant; (b) a DEFB103 missense variant; (c) a loss-of-function MLPH variant; (d) a PMEL missense variant; (e) a loss-of-function LYST variant; and/or (f) a loss-of-function SLC45A2 variant. In certain embodiments, the recombinant host cell can further comprise a bluebuck gene variant associated with altered facial pattern selected from an ADAMTS20 variant, a BMP4 variant, a DOCK7 variant, an EDN3 variant, an EDNRB variant, an ETS1L1 variant, an ETS1L2 variant, a FOXD3 variant, a HDAC1 variant, an IRF1 variant, a KIT variant, a KITLG variant, a MCOLN3 variant, a MITF variant, a PAX3 variant, a SNAI2 variant, a SOX10 variant, a SOX2 variant, a TRPM1 variant, a WNT3A variant, and a ZFHX4 variant.

[0032] In certain embodiments, the recombinant host cell fails to express an endogenous homologue of at least one of ABCB6, ACE2, AP3B1, AP3D1, ASIP, ATP7A, BCL2, BLOC1S2, BLOC1S3, BLOC1S4, BLOC1S5, BRAF, DCT, DCTN1, DCTN2, DOCK7, DSTYK, DTNBP1, EED, FIG. 4, GGT1, GPR143, HPS1, HPS3, HPS4, HPS5, HPS6, LYST, MBTPS1, MCOLN3, MFSD12, MITF, MKLN1, MLANA, MPLH, MREG, MYO5A, NOTCH1, NOTCH2, OCA2, PAH, PIKFYVE, PMEL, RAB27A, RAB38, RABGGTA, RAF1, SLC24A5, SLC45A2, SLC7A11, SNAI2, SPAG9, TPCN2, TYR, TYRP1, VAC14, VPS33A, YKT6, ASCC2, ATP6V0A2, CCDC53, CD72, CDK12, CHD8, COMMD5, DSCR3, EP300, FRYL, HDAC4, HNRNPA2B1L1, HNRNPA2B1L2, HNRNPA2B1L3, HNRNPA2B1L4, INTS8, NCOR1, RAB9A, RB1, SCAF4, SEC31A, SIAH1, SMG7, SNX13L1, SNX13L2, TBC1D5, WDFY1, ADAMTS20, BMP4, EDN3, EDNRB, ETS1L1, ETS1L2, FOXD3, HDAC1, IRF1, KIT, KITLG, PAX3, SOX10, SOX2, TRPM1, WNT3A, and ZFHX4. In certain embodiments, the recombinant host cell fails to express the endogenous homologue of at least 2, 3, 4, 5, 6, 7, 8, 9, 10, 15, 20, 25, 30, 35, 40, 45, 50, 55, 60, 65, 70, 75, 80, 85, 90, 95, 100, 101, 102 (or any number in between) of ABCB6, ACE2, AP3B1, AP3D1, ASIP, ATP7A, BCL2, BLOC1S2, BLOC1S3, BLOC1S4, BLOC1S5, BRAF, DCT, DCTN1, DCTN2, DOCK7, DSTYK, DTNBP1, EED, FIG. 4, GGT1, GPR143, HPS1, HPS3, HPS4, HPS5, HPS6, LYST, MBTPS1, MCOLN3, MFSD12, MITF, MKLN1, MLANA, MPLH, MREG, MYO5A, NOTCH1, NOTCH2, OCA2, PAH, PIKFYVE, PMEL, RAB27A, RAB38, RABGGTA, RAF1, SLC24A5, SLC45A2, SLC7A11, SNAI2, SPAG9, TPCN2, TYR, TYRP1, VAC14, VPS33A, YKT6, ASCC2, ATP6V0A2, CCDC53, CD72, CDK12, CHD8, COMMD5, DSCR3, EP300, FRYL, HDAC4, HNRNPA2B1L1, HNRNPA2B1L2, HNRNPA2B1L3, HNRNPA2B1L4, INTS8, NCOR1, RAB9A, RB1, SCAF4, SEC31A, SIAH1, SMG7, SNX13L1, SNX13L2, TBC1D5, WDFY1, ADAMTS20, BMP4, EDN3, EDNRB, ETS1L1, ETS1L2, FOXD3, HDAC1, IRF1, KIT, KITLG, PAX3, SOX10, SOX2, TRPM1, WNT3A, and ZFHX4.

[0033] In certain embodiments, the recombinant host cell is an antelope cell. In certain embodiments, the recombinant host cell is a roan antelope (Hippotragus equinus) cell or a sable antelope (Hippotragus niger) cell.

[0034] In certain embodiments, the recombinant host cell is a stem cell. The stem cell can, for example, be selected from an induced stem cell, an embryonic stem (ES) cell, or a mesenchymal stem cell (MSC).

[0035] In certain embodiments, the recombinant host cell is a reprogrammed cell.

[0036] In certain embodiments, the recombinant host cell is a fibroblast cell or a mesenchymal cell. In certain embodiments, the recombinant host cell is an endothelial progenitor cell (EPC) or a pericyte. The recombinant host cell can, for example, be selected from the group consisting of a nerve cell, a cartilage cell, a bone cell, a muscle cell, a fat cell, and an epidermal cell.

### BRIEF DESCRIPTION OF THE DRAWINGS

[0037] The foregoing summary, as well as the following detailed description of the invention, will be better understood when read in conjunction with the appended figures. For the purpose of illustrating the invention, the figures demonstrate embodiments of the present invention. It should be understood, however, that the invention is not limited to the precise arrangements, examples, and instrumentalities shown.

[0038] FIG. 1A and FIG. 1B show the editing efficiency of ASIP in roan fibroblasts. FIG. 1A shows percent of modified reads, indicating successful editing of the ASIP gene. FIG. 1B shows reads with abundance percentage of NGS (next-generation sequencing) reads of ASIP edited cells. Reads show indel generation.

[0039] FIG. 2A and FIG. 2B show the editing efficiency of MLPH in roan fibroblasts. FIG. 2A shows percent of modified reads, indicating successful editing of the MLPH gene. FIG. 2B shows reads with abundance percentage of NGS reads of MLPH edited cells. Reads show indel generation.

[0040] FIG. 3A and FIG. 3B show the editing efficiency of LYST in roan fibroblasts. FIG. 3A shows percent of modified reads, indicating successful editing of the LYST gene. FIG. 3B shows reads with abundance percentage of NGS reads of LYST edited cells. Reads show indel generation.

[0041] FIG. 4A and FIG. 4B show the editing efficiency of SLC45A2 in roan fibroblasts. FIG. 4A shows percent of modified reads, indicating successful editing of the SCL45A2 gene. FIG. 4B reads with abundance percentage of NGS reads of SLC45A2 edited cells. Reads show indel generation.

[0042] FIG. 5 shows a comparison of the editing efficiency of MITF locus in roan fibroblasts for 7 guides. Dark gray bars represent percent of edited reads measure by NGS. Light gray bars represent unedited reads. Negative controls show no editing.

[0043] FIG. 6 shows a representative image of transfection of GFP-Cas9 RNP (Ribonucleoprotein) in roan fibroblast cells. Dots visible inside of cells indicate successfully transfected GFP-Cas9 24 hours post transfection. Images take on INCUCYTE® (Sartorius, Göttingen, Germany)

[0044] FIG. 7 shows NGS reads of monoclonal colony isolated after editing of the LYST gene in roan fibroblast cells. 96.93% of reads show modification of the target locus indicating biallelic editing. Reads also show an eleven base pair deletion, which results in a frameshift of the LYST coding sequence and a loss of function of the gene.

[0045] FIG. 8A and FIG. 8B show representative images of a monoclonal colony in a single well of a 96-well plate of roan fibroblast cells isolated by FAC sorting. Image shown in FIG. 8A was taken 5 days after monoclonal isolation; image shown in FIG. 8B was taken 7 days post isolation and shows significant outgrowth indicating successful isolation.

[0046] FIG. 9 shows an image of a chimeric gray mouse containing prototype edits to ASIP and MLPH. The mouse was generated from an albino embryo injected with 129 embryonic stem cells containing knockout edits to ASIP and MLPH as a proof of concept for antelope edits. Gray patches demonstrated that these edits can alter coat color from brown to gray.

### DETAILED DESCRIPTION OF THE INVENTION

[0047] This disclosure is based on the discovery that using only a minimal number of bluebuck (Hippotragus leucophaeus) gene variants it is possible to generate a transgenic animal with the gray/blue coat color and/or melanogenesis and/or altered facial pattern of bluebucks. Accordingly, the disclosure provides transgenic animals, recombinant host cells, and methods of generating transgenic animals by introducing at least one or more bluebuck (Hippotragus leucophaeus) gene variants associated with gray/blue coat color and/or melanogenesis, wherein the one or more bluebuck gene variants associated with gray/blue coat color are selected from an ABCB6 variant, an ACE2 variant, an AP3B1 variant, an AP3D1 variant, an ASIP variant, an ATP7A variant, a BCL2 variant, a BLOC1S2 variant, a BLOC1S3 variant, a BLOC1S4 variant, a BLOC1S5 variant, a BRAF variant, a DCT variant, a DCTN1 variant, a DCTN2 variant, a DOCK7 variant, a DSTYK variant, a DTNBP1 variant, an EED variant, a FIG. 4 variant, a GGT1 variant, a GPR143 variant, a HPS1 variant, a HPS3 variant, a HPS4 variant, a HPS5 variant, a HPS6 variant, a LYST variant, a MBTPS1 variant, a MCOLN3 variant, a MFSD12 variant, a MITF variant, a MKLN1 variant, a MLANA variant, a MPLH variant, a MREG variant, a MYO5A variant, a NOTCH1 variant, a NOTCH2 variant, an OCA2 variant, a PAH variant, a PIKFYVE variant, a PMEL variant, a RAB27A variant, a RAB38 variant, a RABGGTA variant, a RAF1 variant, a SLC24A5 variant, a SLC45A2 variant, a SLC7A11 variant, a SNAI2 variant, a SPAG9 variant, a TPCN2 variant, a TYR variant, a TYRP1 variant, a VAC14 variant, a VPS33A variant, and a YKT6 variant, and the one or more bluebuck gene variants associated with melanogenesis are selected from an AP3D1 variant, an ASCC2 variant, an ATP6V0A2 variant, a CCDC53 variant, a CD72 variant, a CDK12 variant, a CHD8 variant, a COMMD5 variant, a DSCR3 variant, an EP300 variant, a FIG. 4 variant, a FRYL variant, a HDAC4 variant, a HNRNPA2B1L1 variant, a HNRNPA2B1L2 variant, a HNRNPA2B1L3 variant, a HNRNPA2B1L4 variant, a HPS3 variant, a HPS4 variant, a HPS5 variant, a HPS6 variant, an INTS8 variant, a LYST variant, a NCOR1 variant, a RAB9A variant, a RB1 variant, a SCAF4 variant, a SEC31A variant, a SIAH1 variant, a SMG7 variant, a SNX13L1 variant, a SLX13L2 variant, a TBC1D5 variant, and a WDFY1 variant. The disclosure also provides transgenic animals, recombinant host cells, and methods of creating transgenic animals by introducing one or more bluebuck gene variants associated with altered facial pattern selected from an ADAMTS20 variant, a BMP4 variant, a DOCK7 variant, an EDN3 variant, an EDNRB variant, an ETS1L1 variant, an ETS1L2 variant, a FOXD3 variant, a HDAC1 variant, an IRF1 variant, a KIT variant, a KITLG variant, a MCOLN3 variant, a MITF variant, a PAX3 variant, a SNAI2 variant, a SOX10 variant, a SOX2 variant, a TRPM1 variant, a WNT3A variant, and a ZFHX4 variant.

[0048] Various publications, articles and patents are cited or described in the background and throughout the specification; each of these references is herein incorporated by reference in its entirety. Discussion of documents, acts, materials, devices, articles or the like which has been included in the present specification is for the purpose of providing context for the invention. Such discussion is not an admission that any or all of these matters form part of the prior art with respect to any inventions disclosed or claimed.

[0049] Unless defined otherwise, all technical and scientific terms used herein have the same meaning as commonly understood to one of ordinary skill in the art to which this invention pertains. Otherwise, certain terms used herein have the meanings as set forth in the specification.

[0050] It must be noted that as used herein and in the appended claims, the singular forms “a,” “an,” and “the” include plural reference unless the context clearly dictates otherwise.

[0051] Unless otherwise stated, any numerical values, such as a concentration or a concentration range described herein, are to be understood as being modified in all instances by the term “about.” Thus, a numerical value typically includes ±10% of the recited value. For example, a concentration of 1 mg/mL includes 0.9 mg/mL to 1.1 mg/mL. Likewise, a concentration range of 1% to 10% (w/v) includes 0.9% (w/v) to 11% (w/v). As used herein, the use of a numerical range expressly includes all possible subranges, all individual numerical values within that range, including integers within such ranges and fractions of the values unless the context clearly indicates otherwise.

[0052] Unless otherwise indicated, the term “at least” preceding a series of elements is to be understood to refer to every element in the series. Those skilled in the art will recognize or be able to ascertain using no more than routine experimentation, many equivalents to the specific embodiments of the invention described herein. Such equivalents are intended to be encompassed by the invention.

[0053] As used herein, the terms “comprises,” “comprising,” “includes,” “including,” “has,” “having,” “contains” or “containing,” or any other variation thereof, will be understood to imply the inclusion of a stated integer or group of integers but not the exclusion of any other integer or group of integers and are intended to be non-exclusive or open-ended. For example, a composition, a mixture, a process, a method, an article, or an apparatus that comprises a list of elements is not necessarily limited to only those elements but can include other elements not expressly listed or inherent to such composition, mixture, process, method, article, or apparatus. Further, unless expressly stated to the contrary, “or” refers to an inclusive or and not to an exclusive or. For example, a condition A or B is satisfied by any one of the following: A is true (or present) and B is false (or not present), A is false (or not present) and B is true (or present), and both A and B are true (or present).

[0054] As used herein, the conjunctive term “and/or” between multiple recited elements is understood as encompassing both individual and combined options. For instance, where two elements are conjoined by “and/or,” a first option refers to the applicability of the first element without the second. A second option refers to the applicability of the second element without the first. A third option refers to the applicability of the first and second elements together. Any one of these options is understood to fall within the meaning, and therefore satisfy the requirement of the term “and/or” as used herein. Concurrent applicability of more than one of the options is also understood to fall within the meaning, and therefore satisfy the requirement of the term “and/or.”

[0055] As used herein, the term “consists of,” or variations such as “consist of” or “consisting of,” as used throughout the specification and claims, indicate the inclusion of any recited integer or group of integers, but that no additional integer or group of integers can be added to the specified method, structure, or composition.

[0056] As used herein, the term “consists essentially of,” or variations such as “consist essentially of” or “consisting essentially of,” as used throughout the specification and claims, indicate the inclusion of any recited integer or group of integers, and the optional inclusion of any recited integer or group of integers that do not materially change the basic or novel properties of the specified method, structure or composition. See M.P.E.P. § 2111.03.

[0057] The words “right,” “left,” “lower,” and “upper” designate directions in the drawings to which reference is made.

[0058] It should also be understood that the terms “about,” “approximately,” “generally,” “substantially” and like terms, used herein when referring to a dimension or characteristic of a component of the preferred invention, indicate that the described dimension/characteristic is not a strict boundary or parameter and does not exclude minor variations therefrom that are functionally the same or similar, as would be understood by one having ordinary skill in the art. At a minimum, such references that include a numerical parameter would include variations that, using mathematical and industrial principles accepted in the art (e.g., rounding, measurement or other systematic errors, manufacturing tolerances, etc.), would not vary the least significant digit.

[0059] The terms “identical” or percent “identity,” in the context of two or more nucleic acids or polypeptide sequences refer to two or more sequences or subsequences that are the same or have a specified percentage of amino acid residues or nucleotides that are the same, when compared and aligned for maximum correspondence, as measured using one of the following sequence comparison algorithms or by visual inspection.

[0060] For sequence comparison, typically one sequence acts as a reference sequence, to which test sequences are compared. When using a sequence comparison algorithm, test and reference sequences are input into a computer, subsequence coordinates are designated, if necessary, and sequence algorithm program parameters are designated. The sequence comparison algorithm then calculates the percent sequence identity for the test sequence(s) relative to the reference sequence, based on the designated program parameters.

[0061] Optimal alignment of sequences for comparison can be conducted, e.g., by the local homology algorithm of Smith & Waterman, Adv. Appl. Math. 2:482 (1981), by the homology alignment algorithm of Needleman & Wunsch, J. Mol. Biol. 48:443 (1970), by the search for similarity method of Pearson & Lipman, Proc. Nat'l. Acad. Sci. USA 85:2444 (1988), by computerized implementations of these algorithms (GAP, BESTFIT, FASTA, and TFASTA in the Wisconsin Genetics Software Package, Genetics Computer Group, 575 Science Dr., Madison, WI), or by visual inspection (see generally, Current Protocols in Molecular Biology, F. M. Ausubel et al., eds., Current Protocols, a joint venture between Greene Publishing Associates, Inc. and John Wiley & Sons, Inc., (1995 Supplement) (Ausubel)).

[0062] Examples of algorithms that are suitable for determining percent sequence identity and sequence similarity are the BLAST and BLAST 2.0 algorithms, which are described in Altschul et al. (1990) J. Mol. Biol. 215:403-410 and Altschul et al. (1997) Nucleic Acids Res. 25:3389-3402, respectively. Software for performing BLAST analyses is publicly available through the National Center for Biotechnology Information. This algorithm involves first identifying high scoring sequence pairs (HSPs) by identifying short words of length W in the query sequence, which either match or satisfy some positive-valued threshold score T when aligned with a word of the same length in a database sequence. T is referred to as the neighborhood word score threshold (Altschul et al, supra). These initial neighborhood word hits act as seeds for initiating searches to find longer HSPs containing them. The word hits are then extended in both directions along each sequence for as far as the cumulative alignment score can be increased.

[0063] Cumulative scores are calculated using, for nucleotide sequences, the parameters M (reward score for a pair of matching residues; always >0) and N (penalty score for mismatching residues; always <0). For amino acid sequences, a scoring matrix is used to calculate the cumulative score. Extension of the word hits in each direction are halted when: the cumulative alignment score falls off by the quantity X from its maximum achieved value; the cumulative score goes to zero or below, due to the accumulation of one or more negative-scoring residue alignments; or the end of either sequence is reached. The BLAST algorithm parameters W, T, and X determine the sensitivity and speed of the alignment. The BLASTN program (for nucleotide sequences) uses as defaults a wordlength (W) of 11, an expectation (E) of 10, M=5, N=−4, and a comparison of both strands. For amino acid sequences, the BLASTP program uses as defaults a wordlength (W) of 3, an expectation (E) of 10, and the BLOSUM62 scoring matrix (see Henikoff & Henikoff, Proc. Natl. Acad. Sci. USA 89:10915 (1989)).

[0064] In addition to calculating percent sequence identity, the BLAST algorithm also performs a statistical analysis of the similarity between two sequences (see, e.g., Karlin & Altschul, Proc. Nat'l. Acad. Sci. USA 90:5873-5787 (1993)). One measure of similarity provided by the BLAST algorithm is the smallest sum probability (P(N)), which provides an indication of the probability by which a match between two nucleotide or amino acid sequences would occur by chance. For example, a nucleic acid is considered similar to a reference sequence if the smallest sum probability in a comparison of the test nucleic acid to the reference nucleic acid is less than about 0.1, more preferably less than about 0.01, and most preferably less than about 0.001.

[0065] A further indication that two nucleic acid sequences or polypeptides are substantially identical is that the polypeptide encoded by the first nucleic acid is immunologically cross reactive with the polypeptide encoded by the second nucleic acid, as described below. Thus, a polypeptide is typically substantially identical to a second polypeptide, for example, where the two peptides differ only by conservative substitutions. Another indication that two nucleic acid sequences are substantially identical is that the two molecules hybridize to each other under stringent conditions.

[0066] As used herein, the term “polynucleotide,” synonymously referred to as “nucleic acid molecule,” “nucleotides” or “nucleic acids,” refers to any polyribonucleotide or polydeoxyribonucleotide, which can be unmodified RNA or DNA or modified RNA or DNA. “Polynucleotides” include, without limitation single- and double-stranded DNA, DNA that is a mixture of single- and double-stranded regions, single- and double-stranded RNA, and RNA that is mixture of single- and double-stranded regions, hybrid molecules comprising DNA and RNA that can be single-stranded or, more typically, double-stranded or a mixture of single- and double-stranded regions. In addition, “polynucleotide” refers to triple-stranded regions comprising RNA or DNA or both RNA and DNA. The term polynucleotide also includes DNAs or RNAs containing one or more modified bases and DNAs or RNAs with backbones modified for stability or for other reasons. “Modified” bases include, for example, tritylated bases and unusual bases such as inosine. A variety of modifications can be made to DNA and RNA; thus, “polynucleotide” embraces chemically, enzymatically or metabolically modified forms of polynucleotides as typically found in nature, as well as the chemical forms of DNA and RNA characteristic of viruses and cells. “Polynucleotide” also embraces relatively short nucleic acid chains, often referred to as oligonucleotides.

[0067] As used herein, the term “vector” is a replicon in which another nucleic acid segment can be operably inserted so as to bring about the replication or expression of the segment.

[0068] As used herein, the term “host cell” refers to a cell comprising a nucleic acid molecule of the present disclosure, such as, for example an isolated vector comprising an isolated nucleic acid of the invention. The “host cell” can be any type of cell, e.g., a primary cell, a cell in culture, or a cell from a cell line. In one embodiment, a “host cell” is a cell transfected with a nucleic acid molecule of the invention. In another embodiment, a “host cell” is a progeny or potential progeny of such a transfected cell. A progeny of a cell may or may not be identical to the parent cell, e.g., due to mutations or environmental influences that can occur in succeeding generations or integration of the nucleic acid molecule into the host cell genome. A host cell can be, for example, any type of prokaryotic, eukaryotic, or archaeal cell. In some instances, the host cell is a bacterial cell. In some instances, the host cell is a mammalian cell.

[0069] The term “expression” as used herein, refers to the biosynthesis of a gene product. The term encompasses the transcription of a gene into RNA. The term also encompasses translation of RNA into one or more polypeptides, and further encompasses all naturally occurring post-transcriptional and post-translational modifications.

[0070] As used herein, the terms “peptide,” “polypeptide,” or “protein” can refer to a molecule comprised of amino acids and can be recognized as a protein by those of skill in the art. The conventional one-letter or three-letter code for amino acid residues is used herein. The terms “peptide,” “polypeptide,” and “protein” can be used interchangeably herein to refer to polymers of amino acids of any length. The polymer can be linear or branched, it can comprise modified amino acids, and it can be interrupted by non-amino acids. The terms also encompass an amino acid polymer that has been modified naturally or by intervention; for example, disulfide bond formation, glycosylation, lipidation, acetylation, phosphorylation, or any other manipulation or modification, such as conjugation with a labeling component. Also included within the definition are, for example, polypeptides containing one or more analogs of an amino acid (including, for example, unnatural amino acids, etc.), as well as other modifications known in the art.

[0071] The peptide sequences described herein are written according to the usual convention whereby the N-terminal region of the peptide is on the left and the C-terminal region is on the right. Although isomeric forms of the amino acids are known, it is the L-form of the amino acid that is represented unless otherwise expressly indicated.

[0072] The term “heterologous nucleic acid” or “heterologous polypeptide” refers to a nucleic acid or a polypeptide whose sequence is not identical to that of another nucleic acid or polypeptide naturally found in the same host cell or the same host. As use herein, the “heterologous nucleic acid” or “heterologous polypeptide” can be heterologous to the bacterial cell and/or the mammalian host.

[0073] As used herein, the term “transform” or “transformation” refers to the transfer of a nucleic acid fragment into a host cell, such as a host bacterial cell, resulting in genetically-stable inheritance. Host cells comprising the transformed nucleic acid fragment are referred to as “recombinant” or “transgenic” or “transformed” organisms.

[0074] As used herein, the term “isolated” means a biological component (such as a nucleic acid, peptide or protein) has been substantially separated, produced apart from, or purified away from other biological components of the organism in which the component naturally occurs, i.e., other chromosomal and extrachromosomal DNA and RNA, and proteins. Nucleic acids, peptides and proteins that have been “isolated” thus include nucleic acids and proteins purified by standard purification methods. “Isolated” nucleic acids, peptides and proteins can be part of a composition and still be isolated if the composition is not part of the native environment of the nucleic acid, peptide, or protein. The term also embraces nucleic acids, peptides and proteins prepared by recombinant expression in a host cell as well as chemically synthesized nucleic acids.

[0075] As used herein, “gene” refers to a nucleic acid comprising an open reading frame encoding a polypeptide, including both exon and (optionally) intron sequences.

[0076] As used herein, a “promoter” is an example of a transcriptional regulatory sequence and is specifically a nucleic acid sequence generally described as the proximal region of a gene located 5′ to the start codon. The transcription of an adjacent nucleic acid segment is initiated at the promoter region. A repressible promoter's rate of transcription decreases in response to a repressing agent. An inducible promoter's rate of transcription increases in response to an inducing agent. A constitutive promoter's rate of transcription is not specifically regulated, though it can vary under the influence of general metabolic conditions.

[0077] The term “gene product,” as used herein, refers to any product encoded by a nucleic acid sequence. Accordingly, a gene product may, for example, be a primary transcript, a mature transcript, a processed transcript, or a protein or peptide encoded by a transcript. Examples for gene products, accordingly, include mRNAs, rRNAs, hairpin RNAs (e.g., microRNAs, shRNAs, siRNAs, tRNAs), and peptides and proteins, for example, reporter proteins or therapeutic proteins.

[0078] As used herein, the term “stem cell” refers to a cell that can self-renew and differentiate to at least one more-differentiated or less developmentally-capable phenotype. The term “stem cell” encompasses stem cell lines, induced stem cells, non-human embryonic stem cells, pluripotent stem cells, multipotent stem cells, amniotic stem cells, placental stem cells, or adult stem cells. An “induced stem cell” is one derived from a non-pluripotent cell induced to a less-differentiated or more developmentally-capable phenotype by introduction of one or more reprogramming factors or genes. As the term is used herein, an induced stem cell need not be pluripotent, but has the capacity to differentiate, under appropriate conditions, to more than one more-highly-differentiated phenotype. It should be understood that the capacity was not present prior to the introduction of reprogramming factors. An induced stem cell will express at least one stem cell marker not expressed by the parent cell prior to introduction of reprogramming factors. In this context, a stem cell marker is exclusive of a factor introduced by reprogramming. An induced pluripotent stem cell, or iPS cell, has the induced capacity to differentiate, under appropriate conditions, to a cell phenotype derived from each of the endoderm, mesoderm, and ectoderm germ layers.

[0079] The term “marker” as used herein is used to describe a characteristic and/or phenotype of a cell. Markers can be used for selection of cells comprising characteristics of interest and can vary with specific cells. Markers are characteristics, whether morphological, structural, functional or biochemical (enzymatic) characteristics of the cell of a particular cell type, or molecules expressed by the cell type. In one aspect, such markers are proteins. Such proteins can possess an epitope for antibodies or other binding molecules available in the art. However, a marker can consist of any molecule found in or on a cell, including, but not limited to, proteins (peptides and polypeptides), lipids, polysaccharides, nucleic acids and steroids. Examples of morphological characteristics or traits include, but are not limited to, shape, size, and nuclear to cytoplasmic ratio. Examples of functional characteristics or traits include, but are not limited to, the ability to adhere to particular substrates, ability to incorporate or exclude particular dyes, ability to migrate under particular conditions, and the ability to differentiate along particular lineages. Markers can be detected by any method available to one of skill in the art. Markers can also be the absence of a morphological characteristic or absence of proteins, lipids etc. Markers can be a combination of a panel of unique characteristics of the presence and/or absence of polypeptides and other morphological or structural characteristics. In one embodiment, the marker is a cell surface marker.

[0080] The term “exogenous” refers to a substance present in a cell that was introduced by the hand of man. The term “exogenous” when used herein can refer to a nucleic acid (e.g., a nucleic acid encoding a polypeptide) or a polypeptide that has been introduced by a process involving the hand of man into a biological system such as a cell or organism in which it is not normally found. Alternatively, “exogenous” can refer to a nucleic acid or a polypeptide that has been introduced by a process involving the hand of man into a biological system such as a cell or organism in which it is found in relatively lower amounts and in which one wishes to increase the amount of the nucleic acid or polypeptide in the cell or organism, e.g., to create ectopic expression or levels.

[0081] As used herein, the term “reprogramming genes” or “reprogramming factors” refers to agents or nucleic acid molecules that can induce the reprogramming process in a somatic cell to re-express a less-differentiated, more stem-cell like phenotype. The reprogramming factor can be a nucleic acid, a polypeptide, or a small molecule that promotes a reprogrammed phenotype when introduced to a cell. Non-limiting examples of reprogramming factors include: Oct4 (Octamer binding transcription factor-4), SOX2 (Sex determining region Y)-box 2, Klf4 (Kruppel Like Factor-4), and c-Myc. These are the so-called “classical” or “standard” set of reprogramming factors used to derive, for example, induced pluripotent stem cells. Additional factors that can be considered reprogramming factors when introduced in the process of reprogramming cells to a less differentiated or stem cell phenotype include LIN28+Nanog, Esrrb, Pax5 shRNA, C/EBPa, p53 siRNA, UTF1, DNMT shRNA, Wnt3a, SV40 LT (T), hTERT, small molecule chemical agents including, but not limited to BIX-01294, BayK8644, RG108, AZA, dexamethasone, VPA, TSA, SAHA, PD0325901+CHIR99021 (2i) and A-83-01. In some embodiments, the reprogramming genes or factors are Oct4, Klf4, SOX2, and c-Myc.

[0082] As used herein, the terms “dedifferentiation” or “retrodifferentiation” or “reprogramming” refer to a process that generates a cell that re-expresses a less differentiated phenotype than the cell from which it is derived and/or expresses at least one stem cell marker not expressed prior to that process. For example, a terminally-differentiated cell can be dedifferentiated to a multipotent cell. That is, dedifferentiation shifts a cell backward along the differentiation spectrum of totipotent cells to fully differentiated cells. Typically, reversal of the differentiation phenotype of a cell requires artificial manipulation of the cell, for example, by introducing or expressing exogenous polypeptide factors. Reprogramming is not typically observed under native conditions in vivo or in vitro.

[0083] As used herein, a “reprogrammed cell” is a cell that has been contacted with one or more reprogramming factors and expresses a less differentiated phenotype than the cell from which it was derived. The reprogrammed cell can also have the capacity to self-renew and will express at least one stem cell marker that was not delivered to the cell as a reprogramming factor. Furthermore, the reprogrammed cell will have the capacity to differentiate into a more-differentiated somatic cell type following differentiation protocols provided herein or described in the art.

[0084] As used herein, the term “somatic cell” refers to any cell other than a germ cell, a cell present in or obtained from a pre-implantation embryo, or a cell resulting from proliferation of such a cell in vitro. Stated another way, a somatic cell refers to any cells forming the body of an organism, excluding germ cells. Every cell type in the mammalian body-apart from the sperm and ova and the cells from which they are made (gametocytes)—is a somatic cell: internal organs, skin, bones, blood, and connective tissue are all substantially made up of somatic cells. In some embodiments the somatic cell is a “non-embryonic somatic cell,” by which is meant a somatic cell that is not present in or obtained from an embryo and does not result from proliferation of such a cell in vitro. In some embodiments the somatic cell is an “adult somatic cell,” by which is meant a cell that is present in or obtained from an organism other than an embryo or a fetus or results from proliferation of such a cell in vitro.

### Nucleic Acids, Vectors, Recombinant Cells, and Transgenic Animals Expressing Bluebuck Specific Variants

[0085] The generation of bluebuck antelopes and the restoration of a population of this extinct species can have a wide array of benefits, including, but not limited to, conservation and de-extinction efforts, as the methods used herein can restore an extinct species and preserve species diversity to combat climate change effects. This method can also be used to preserve existing species with blue/gray coat colors and distinctive facial patterns and likely confer beneficial adaptations to habitats, as well as preserve existing environments through rewilding efforts. Additionally, there can be potential economic benefits, including the production of blue fur skins for clothing that may be highly coveted. Finally, as part of the genomic editing methods described herein, novel genomic information about living antelope species Hippotragus niger (roan antelope) and Hippotragus equinus (sable antelope), as well as the extinct bluebuck antelope has been produced. This information can aid in the research efforts around evolutionary biology, speciation, and ecology. Finally, the de-extinction of bluebuck will advance synthetic biology and will serve as a precedent for advanced multiplexed editing in organisms.

[0086] The isolated nucleic acids, vectors, recombinant cells, and transgenic animals described herein are based, in part, on the discovery that cells (e.g., Hippotragus niger (roan antelope) and Hippotragus equinus (sable antelope) cells) can be modified to comprise and express alleles or homologues from the bluebuck (e.g., Hippotragus leucophaeus). In particular, viable cells can be gene-edited, whether by transfection, transduction or modification of existing antelope homologues to mimic the bluebuck variants or alleles of the bluebuck genes. In some embodiments, the endogenous homologues of the bluebuck genes are deleted or inactivated. Similar modifications to introduce bluebuck genes can be made to viable cells of other, non-human relatives of the antelope. The bluebuck variants or alleles can modify the phenotype of the gene edited cells. The isolated nucleic acids, vectors, recombinant cells, and transgenic animals described herein provide a synthetic alternative to wildlife products and new tools for understanding genetic diversity and cellular biology in endangered and extinct species of wildlife.

[0087] In one aspect, described herein is at least one exogenous nucleic acid sequence encoding a bluebuck gene, or comprising a modification of an endogenous gene to express a bluebuck homologue or variant of the endogenous gene. Of particular interest are genes that are shared by every bluebuck genome sequenced, which are not shared by any antelope genome sequenced. By choosing genes in this manner, effects of individual variation within the group of bluebuck genomes sequenced and variations in antelope genomes (roan and sable) are minimized to focus on those variant sequences that are fully bluebuck. In view of this, as used herein, a “bluebuck gene,” “bluebuck gene variant” or “bluebuck homologue” is a gene encoding a polypeptide that has a sequence encoded by all bluebuck genomes sequenced, and which differs from the homologous polypeptide encoded in all antelope genomes sequenced. In this context, “differs from” refers to a difference of at least one amino acid relative to the homologous polypeptides encoded by the roan or sable antelopes. A non-coding or regulatory nucleic acid sequence can be considered a “bluebuck sequence” if a non-coding motif of at least 20 nucleotides is present in every bluebuck genome sequenced, and not present in any roan or sable antelope genome sequenced, or if one or more nucleotides in the regulatory region of every bluebuck genome sequence differs from one or more nucleotides in the regulatory region of the roan or sable antelope genomes. A roan or sable antelope gene or sequence modified by human intervention to encode a bluebuck gene or gene variant sequence is a bluebuck gene or gene or gene variant as the term is used herein. Where a bluebuck gene or gene variant as referred to herein is only found encoded in a bluebuck genome, and where the bluebuck is extinct, a bluebuck gene or gene variant sequence is necessarily exogenous to a viable cell; that is, the bluebuck gene or gene variant sequence is “exogenous” whether the sequence is in the cell through introduction of a foreign sequence or through gene editing an endogenous sequence to encode the bluebuck gene or gene variant sequence.

[0088] As identified herein, the bluebuck variants in the application were aligned to the roan antelope reference. The relevant gene sequences of the roan antelope reference are provided herein. An example of an additional roan antelope reference for alignment can include the GCA_016433095.1 roan antelope reference. This genome was assembled using shotgun sequencing, an older technology. The sequences provided herein were generated using current techniques, such as long-read genome sequencing. Production of a new assembly will lead to a change in the genomic coordinates of the variants listed in this application, as is standard for any species. To convert the coordinates listed here to any new assembly, a “liftover” can be conducted in accordance with standard procedures established by the genomics field.

[0089] Thus, provided herein are isolated nucleic acid sequences comprising one or more bluebuck (Hippotragus leucophaeus) gene variants associated with gray/blue coat color. The isolated nucleic acid sequences can, for example comprise one or more bluebuck gene variants associated with gray/blue coat color selected from an ABCB6 variant, an ACE2 variant, an AP3B1 variant, an AP3D1 variant, an ASIP variant, an ATP7A variant, a BCL2 variant, a BLOC1S2 variant, a BLOC1S3 variant, a BLOC1S4 variant, a BLOC1S5 variant, a BRAF variant, a DCT variant, a DCTN1 variant, a DCTN2 variant, a DOCK7 variant, a DSTYK variant, a DTNBP1 variant, an EED variant, a FIG. 4 variant, a GGT1 variant, a GPR143 variant, a HPS1 variant, a HPS3 variant, a HPS4 variant, a HPS5 variant, a HPS6 variant, a LYST variant, a MBTPS1 variant, a MCOLN3 variant, a MFSD12 variant, a MITF variant, a MKLN1 variant, a MLANA variant, a MPLH variant, a MREG variant, a MYO5A variant, a NOTCH1 variant, a NOTCH2 variant, an OCA2 variant, a PAH variant, a PIKFYVE variant, a PMEL variant, a RAB27A variant, a RAB38 variant, a RABGGTA variant, a RAF1 variant, a SLC24A5 variant, a SLC45A2 variant, a SLC7A11 variant, a SNAI2 variant, a SPAG9 variant, a TPCN2 variant, a TYR variant, a TYRP1 variant, a VAC14 variant, a VPS33A variant, and a YKT6 variant.

[0090] Also provided are isolated nucleic acid sequences comprising one or more bluebuck (Hippotragus leucophaeus) gene variants associated with melanogenesis selected from an AP3D1 variant, an ASCC2 variant, an ATP6V0A2 variant, a CCDC53 variant, a CD72 variant, a CDK12 variant, a CHD8 variant, a COMMD5 variant, a DSCR3 variant, an EP300 variant, a FIG. 4 variant, a FRYL variant, a HDAC4 variant, a HNRNPA2B1L1 variant, a HNRNPA2B1L2 variant, a HNRNPA2B1L3 variant, a HNRNPA2B1L4 variant, a HPS3 variant, a HPS4 variant, a HPS5 variant, a HPS6 variant, an INTS8 variant, a LYST variant, a NCOR1 variant, a RAB9A variant, a RB1 variant, a SCAF4 variant, a SEC31A variant, a SIAH1 variant, a SMG7 variant, a SNX13L1 variant, a SLX13L2 variant, a TBC1D5 variant, and a WDFY1 variant. As used herein, the term “melanogenesis” refers to the production of melanin, which can pigment hair/fur and skin. Variants in melanogenesis genes can alter how and where melanin is produced in the body, as well as balance between pheomelanin (brown) and eumelanin (black).

[0091] Also provided are isolated nucleic acid sequences comprising one or more bluebuck (Hippotragus leucophaeus) gene variants associated with altered facial pattern selected from an ADAMTS20 variant, a BMP4 variant, a DOCK7 variant, an EDN3 variant, an EDNRB variant, an ETS1L1 variant, an ETS1L2 variant, a FOXD3 variant, a HDAC1 variant, an IRF1 variant, a KIT variant, a KITLG variant, a MCOLN3 variant, a MITF variant, a PAX3 variant, a SNAI2 variant, a SOX10 variant, a SOX2 variant, a TRPM1 variant, a WNT3A variant, and a ZFHX4 variant.

[0092] In certain embodiments, the bluebuck gene variant comprises at least one change in the nucleotide sequence of the gene. The change in the nucleotide sequence can, for example, be a substitution, an insertion, a deletion, or a combination thereof. The substitution, the insertion, the deletion, or a combination thereof can, for example, be in a 5′ untranslated region of the gene, an intron of the gene, an exon of the gene, a 3′ untranslated region of the gene, or a combination thereof. The substitution, the insertion, the deletion, or a combination thereof can, for example, be in a regulatory region of the gene.

[0093] In certain embodiments, a bluebuck gene variant can comprise one or more substitutions within the regulatory region and/or within the coding region of the gene as compared to the corresponding reference genome. Thus, the bluebuck gene variant can comprise at least 1, at least 5, at least 10, at least 20, at least 50, at least 100, at least 150, at least 200, at least 250, at least 300, at least 350, at least 400, at least 450, at least 500 substitutions, at least 600 substitutions, or at least 700 substitutions within the regulatory region or within the coding region of the gene. The bluebuck variant can comprise about 1 to about 700, about 25 to about 675, about 50 to about 650, about 75 to about 625, about 100 to about 600, about 150 to about 550, about 200 to about 500 substitutions, and any value in between.

[0094] In certain embodiments, the bluebuck gene variant associated with gray/blue coat color comprises a nucleotide sequence having at least 80%, at least 85%, at least 90%, or at least 95% identity to a nucleotide sequence selected from the group consisting of SEQ ID NOs: 45-102 and combinations thereof. The bluebuck gene variant associated with gray/blue coat color can, for example, comprise a nucleotide sequence having 80%, 81%, 82%, 83%, 84%, 85%, 86%, 87%, 88%, 89%, 90%, 91%, 92%, 93%, 94%, 95%, 96%, 97%, 98%, or 99% identity to a nucleotide sequence selected from the group consisting of SEQ ID NOs: 45-102 and combinations thereof. The bluebuck gene variant associated with gray/blue coat color can, for example, comprise a nucleotide sequence selected from the group consisting of SEQ ID NOs: 147-204 and combinations thereof.

[0095] In certain embodiments, the bluebuck gene variant associated with melanogenesis comprises a nucleotide sequence having at least 80%, at least 85%, at least 90%, or at least 95% identity to a nucleotide sequence selected from the group consisting of 48, 64, 68-72, 120-146, and combinations thereof. The bluebuck gene variant associated with melanogenesis can, for example, comprise a nucleotide sequence having 80%, 81%, 82%, 83%, 84%, 85%, 86%, 87%, 88%, 89%, 90%, 91%, 92%, 93%, 94%, 95%, 96%, 97%, 98%, or 99% identity to a nucleotide sequence selected from the group consisting of SEQ ID NOs: 48, 64, 68-72, 120-146, and combinations thereof. The bluebuck gene variant associated with melanogenesis can, for example, comprise a nucleotide sequence selected from the group consisting of SEQ ID NOs: 150, 166, 170-174, 222-248, and combinations thereof.

[0096] In certain embodiments, the bluebuck gene variant associated with altered facial pattern comprises a nucleotide sequence having at least 80%, at least 85%, at least 90%, or at least 95% identity to a nucleotide sequence selected from the group consisting of SEQ ID NOs: 60, 74, 76, 95, 103-119, and combinations thereof. The bluebuck gene variant associated with altered facial pattern can, for example, comprise a nucleotide sequence having 80%, 81%, 82%, 83%, 84%, 85%, 86%, 87%, 88%, 89%, 90%, 91%, 92%, 93%, 94%, 95%, 96%, 97%, 98%, or 99% identity to a nucleotide sequence selected from the group consisting of SEQ ID NOs: 60, 74, 76, 95, 103-119, and combinations thereof. The bluebuck gene variant associated with altered facial pattern can, for example, comprise a nucleotide sequence selected from the group consisting of SEQ ID NOs: 162, 176, 178, 197, 205-221, and combinations thereof.

[0097] In certain embodiments, the isolated nucleic acids comprise at least 2, 3, 4, 5, 6, 7, 8, 9, 10, 15, 20, 25, 30, 40, 50, 60, 70, 80, 90, 95, 100, 101, 102 (or any number in between) blue buck gene variants.

[0098] The exact location and substitution of a bluebuck gene variant can, for example, be determined by performing an alignment with the bluebuck sequence and roan antelope sequence provided herein in Table 1. The bluebuck gene variant can comprise at least one substitution, or more than one substitution, as compared to the roan antelope sequence. Thus, by way of an example, a bluebuck gene variant for ASIP can, for example, comprise 1, 5, 10, 15, 20 (or any number in between) substitutions in the gene, including in the intron, exon, or regulatory regions of the gene when compared to the roan antelope sequence. By way of another example, a bluebuck gene variant for MLPH can, for example, comprise 1, 2, 3, 4, 5, 6, 7, 8, 9, 10, 15, 20, 25, 30, 35, 40, 45, 50, 55, 60, 65, 70, 75, 76, 77, 78 (or any number in between) substitutions in the gene, including in the intron, exon, or regulatory regions of the gene when compared to the roan antelope sequence. A person skilled in the art will understand how to identify the substitutions and total number of substitutions using the bluebuck gene variant sequences and roan antelope sequences provided in Table 1.

TABLE 1
Bluebuck Gene Variants and Associated Phenotypes

| | | | | Roan | |
|---|---|---|---|---|---|
| | | | Total | Antelope | Bluebuck |
| | | | Variants | SEQ ID | SEQ ID |
| Gene Abb. | Gene Name | Phenotype | in Gene | NO | NO |
| ABCB6 | ATP Binding Cassette Subfamily | coat color | 4 | 45 | 147 |
| | B Member 6 (LAN Blood Group) | | | | |
| ACE2 | Angiotensin Converting Enzyme | coat color | 20 | 46 | 148 |
| | 2 | | | | |
| AP3B1 | Adaptor Related Protein | coat color | 267 | 47 | 149 |
| | Complex 3 Subunit Beta 1 | | | | |
| AP3D1 | Adaptor Related Protein | coat color/ | 39 | 48 | 150 |
| | Complex 3 Subunit Delta 1 | melanogenesis | | | |
| ASIP | Agouti Signaling Protein | coat color | 20 | 49 | 151 |
| ATP7A | ATPase Copper Transporting | coat color | 34 | 50 | 152 |
| | Alpha | | | | |
| BCL2 | BCL2 Apoptosis Regulator | coat color | 287 | 51 | 153 |
| BLOC1S2 | Biogenesis Of Lysosomal | coat color | 17 | 52 | 154 |
| | Organelles Complex 1 Subunit 2 | | | | |
| BLOC1S3 | Biogenesis Of Lysosomal | coat color | 4 | 53 | 155 |
| | Organelles Complex 1 Subunit 3 | | | | |
| BLOC1S4 | Biogenesis Of Lysosomal | coat color | 2 | 54 | 156 |
| | Organelles Complex 1 Subunit 4 | | | | |
| BLOC1S5 | Biogenesis Of Lysosomal | coat color | 51 | 55 | 157 |
| | Organelles Complex 1 Subunit 5 | | | | |
| BRAF | B-Raf Proto-Oncogene, | coat color | 196 | 56 | 158 |
| | Serine/Threonine Kinase | | | | |
| DCT | Dopachrome Tautomerase | coat color | 62 | 57 | 159 |
| DCTN1 | Dynactin Subunit 1 | coat color | 72 | 58 | 160 |
| DCTN2 | Dynactin Subunit 2 | coat color | 12 | 59 | 161 |
| DOCK7 | Dedicator Of Cytokinesis 7 | coat color/face | 238 | 60 | 162 |
| | | patterning | | | |
| DSTYK | Dual Serine/Threonine And | coat color | 73 | 61 | 163 |
| | Tyrosine Protein Kinase | | | | |
| DTNBP1 | Dystrobrevin Binding Protein 1 | coat color | 133 | 62 | 164 |
| EED | Embryonic Ectoderm | coat color | 38 | 63 | 165 |
| | Development | | | | |
| FIG4 | FIG4 Phosphoinositide 5- | coat color/ | 249 | 64 | 166 |
| | Phosphatase | melanogenesis | | | |
| GGT1 | Gamma-Glutamyltransferase 1 | coat color | 14 | 65 | 167 |
| GPR143 | G Protein-Coupled Receptor 143 | coat color | 37 | 66 | 168 |
| HPS1 | HPS1 Biogenesis Of Lysosomal | coat color | 91 | 67 | 169 |
| | Organelles Complex 3 Subunit 1 | | | | |
| HPS3 | HPS3 Biogenesis Of Lysosomal | coat color/ | 94 | 68 | 170 |
| | Organelles Complex 2 Subunit 1 | melanogenesis | | | |
| HPS4 | HPS4 Biogenesis Of Lysosomal | coat color/ | 27 | 69 | 171 |
| | Organelles Complex 3 Subunit 2 | melanogenesis | | | |
| HPS5 | HPS5 Biogenesis Of Lysosomal | coat color/ | 66 | 70 | 172 |
| | Organelles Complex 2 Subunit 2 | melanogenesis | | | |
| HPS6 | HPS6 Biogenesis Of Lysosomal | coat color/ | 1 | 71 | 173 |
| | Organelles Complex 2 Subunit 3 | melanogenesis | | | |
| LYST | Lysosomal Trafficking Regulator | coat color/ | 157 | 72 | 174 |
| | | melanogenesis | | | |
| MBTPS1 | Membrane Bound Transcription | coat color | 51 | 73 | 175 |
| | Factor Peptidase, Site 1 | | | | |
| MCOLN3 | Mucolipin TRP Cation Channel 3 | coat color/face | 61 | 74 | 176 |
| | | patterning | | | |
| MFSD12 | Major Facilitator Superfamily | coat color | 10 | 75 | 177 |
| | Domain Containing 12 | | | | |
| MITF | Melanocyte Inducing | coat color/face | 319 | 76 | 178 |
| | Transcription Factor | patterning | | | |
| MKLN1 | Muskelin 1 | coat color | 161 | 77 | 179 |
| MLANA | Melan-A | coat color | 8 | 78 | 180 |
| MLPH | Melanophilin | coat color | 78 | 79 | 181 |
| MREG | Melanoregulin | coat color | 80 | 80 | 182 |
| MYO5A | Myosin VA | coat color | 278 | 81 | 183 |
| NOTCH1 | Notch Receptor 1 | coat color | 31 | 82 | 184 |
| NOTCH2 | Notch Receptor 2 | coat color | 226 | 83 | 185 |
| OCA2 | OCA2 Melanosomal | coat color | 285 | 84 | 186 |
| | Transmembrane Protein | | | | |
| PAH | Phenylalanine Hydroxylase | coat color | 125 | 85 | 187 |
| PIKFYVE | Phosphoinositide Kinase, FYVE- | coat color | 107 | 86 | 188 |
| | Type Zinc Finger Containing | | | | |
| PMEL | Premelanosome Protein | coat color | 7 | 87 | 189 |
| RAB27A | RAB27A, Member RAS | coat color | 123 | 88 | 190 |
| | Oncogene Family | | | | |
| RAB38 | RAB38, Member RAS Oncogene | coat color | 112 | 89 | 191 |
| | Family | | | | |
| RABGGTA | Rab Geranylgeranyltransferase | coat color | 7 | 90 | 192 |
| | Subunit Alpha | | | | |
| RAF1 | Raf-1 Proto-Oncogene, | coat color | 32 | 91 | 193 |
| | Serine/Threonine Kinase | | | | |
| SLC24A5 | Solute Carrier Family 24 Member | coat color | 100 | 92 | 194 |
| | 5 | | | | |
| SLC45A2 | Solute Carrier Family 45 Member | coat color | 42 | 93 | 195 |
| | 2 | | | | |
| SLC7A11 | Solute Carrier Family 7 Member | coat color | 122 | 94 | 196 |
| | 11 | | | | |
| SNAI2 | Snail Family Transcriptional | coat color/face | 2 | 95 | 197 |
| | Repressor 2 | patterning | | | |
| SPAG9 | Sperm Associated Antigen 9 | coat color | 118 | 96 | 198 |
| TPCN2 | Two Pore Segment Channel 2 | coat color | 18 | 97 | 199 |
| TYR | Tyrosinase | coat color | 145 | 98 | 200 |
| TYRP1 | Tyrosinase Related Protein 1 | coat color | 20 | 99 | 201 |
| VAC14 | VAC14 Component Of | coat color | 97 | 100 | 202 |
| | PIKFYVE Complex | | | | |
| VPS33A | VPS33A Core Subunit Of | coat color | 35 | 101 | 203 |
| | CORVET And HOPS Complexes | | | | |
| YKT6 | YKT6 V-SNARE Homolog | coat color | 14 | 102 | 204 |
| ADAMTS20 | ADAM Metallopeptidase With | face patterning | 300 | 103 | 205 |
| | Thrombospondin Type 1 Motif | | | | |
| | 20 | | | | |
| BMP4 | Bone Morphogenetic Protein 4 | face patterning | 4 | 104 | 206 |
| EDN3 | Endothelin 3 | face patterning | 35 | 105 | 207 |
| EDNRB | Endothelin Receptor Type B | face patterning | 37 | 106 | 208 |
| ETS1L1 | ETS Proto-Oncogene 1, | face patterning | 112 | 107 | 209 |
| | Transcription Factor Like 1 | | | | |
| ETS1L2 | ETS Proto-Oncogen 1, | face patterning | 47 | 108 | 210 |
| | Transcription Factor Like 2 | | | | |
| FOXD3 | Forkhead Box D3 | face patterning | 1 | 109 | 211 |
| HDAC1 | Histone Deacetylase 1 | face patterning | 32 | 110 | 212 |
| IRF1 | Interferon Regulatory Factor 1 | face patterning | 10 | 111 | 213 |
| KIT | KIT Proto-Oncogene, Receptor | face patterning | 95 | 112 | 214 |
| | Tyrosine Kinase | | | | |
| KITLG | KIT Ligand | face patterning | 111 | 113 | 215 |
| PAX3 | Paired Box 3 | face patterning | 150 | 114 | 216 |
| SOX10 | SRY-Box Transcription Factor | face patterning | 14 | 115 | 217 |
| | 10 | | | | |
| SOX2 | SRY-Box Transcription Factor 2 | face patterning | 21 | 116 | 218 |
| TRPM1 | Transient Receptor Potential | face patterning | 76 | 117 | 219 |
| | Cation Channel Subfamily M | | | | |
| | Member 1 | | | | |
| WNT3A | Wnt Family Member 3A | face patterning | 91 | 118 | 220 |
| ZFHX4 | Zinc Finger Homeobox 4 | face patterning | 182 | 119 | 221 |
| ASCC2 | Activating Signal Cointegrator 1 | melanogenesis | 62 | 120 | 222 |
| | Complex Subunit 2 | | | | |
| ATP6V0A2 | ATPase H+ Transporting V0 | melanogenesis | 60 | 121 | 223 |
| | Subunit A2 | | | | |
| CCDC53 | NA | melanogenesis | 44 | 122 | 224 |
| CD72 | CD72 Molecule | melanogenesis | 2 | 123 | 225 |
| CDK12 | Cyclin Dependent Kinase 12 | melanogenesis | 39 | 124 | 226 |
| CHD8 | Chromodomain Helicase DNA | melanogenesis | 42 | 125 | 227 |
| | Binding Protein 8 | | | | |
| COMMD5 | COMM Domain Containing 5 | melanogenesis | 2 | 126 | 228 |
| DSCR3 | NA | melanogenesis | 33 | 127 | 229 |
| EP300 | E1A Binding Protein P300 | melanogenesis | 56 | 128 | 230 |
| FRYL | FRY Like Transcription | melanogenesis | 267 | 129 | 231 |
| | Coactivator | | | | |
| HDAC4 | Histone Deacetylase 4 | melanogenesis | 270 | 130 | 232 |
| HNRNPA2B1L1 | Heterogeneous Nuclear | melanogenesis | 24 | 131 | 233 |
| | Ribonucleoprotein A2/B1 Like 1 | | | | |
| HNRNPA2B1L2 | Heterogeneous Nuclear | melanogenesis | 15 | 132 | 234 |
| | Ribonucleoprotein A2/B1 Like 2 | | | | |
| HNRNPA2B1L3 | Heterogeneous Nuclear | melanogenesis | 2 | 133 | 235 |
| | Ribonucleoprotein A2/B1 Like 3 | | | | |
| HNRNPA2B1L4 | Heterogeneous Nuclear | melanogenesis | 1 | 134 | 236 |
| | Ribonucleoprotein A2/B1 Like 4 | | | | |
| INTS8 | Integrator Complex Subunit 8 | melanogenesis | 58 | 135 | 237 |
| NCOR1 | Nuclear Receptor Corepressor 1 | melanogenesis | 100 | 136 | 238 |
| RAB9A | RAB9A, Member RAS | melanogenesis | 15 | 137 | 239 |
| | Oncogene Family | | | | |
| RB1 | RB Transcriptional Corepressor 1 | melanogenesis | 169 | 138 | 240 |
| SCAF4 | SR-Related CTD Associated | melanogenesis | 81 | 139 | 241 |
| | Factor 4 | | | | |
| SEC31A | SEC31 Homolog A, COPII Coat | melanogenesis | 84 | 140 | 242 |
| | Complex Component | | | | |
| SIAH1 | Siah E3 Ubiquitin Protein Ligase | melanogenesis | 23 | 141 | 243 |
| | 1 | | | | |
| SMG7 | SMG7 Nonsense Mediated | melanogenesis | 81 | 142 | 244 |
| | MRNA Decay Factor | | | | |
| SNX13L1 | Sorting Nexin 13 Like 1 | melanogenesis | 139 | 143 | 245 |
| SNX13L2 | Sorting Nexin 13 Like 2 | melanogenesis | 1 | 144 | 246 |
| TBC1D5 | TBC1 Domain Family Member 5 | melanogenesis | 650 | 145 | 247 |
| WDFY1 | WD Repeat And FYVE Domain | melanogenesis | 74 | 146 | 248 |
| | Containing 1 | | | | |

Total Variants in Gene can include variants in introns, exons, and regulatory regions.

[0099] Also provided are isolated vectors comprising the isolated nucleic acid sequences described herein.

[0100] Also provided are recombinant host cells comprising one or more bluebuck (Hippotragus leucophaeus) gene variants associated with gray/blue coat color and/or melanogenesis. In certain embodiments, the recombinant host cells comprise one or more bluebuck gene variants one or more bluebuck gene variants associated with gray/blue coat color selected from an ABCB6 variant, an ACE2 variant, an AP3B1 variant, an AP3D1 variant, an ASIP variant, an ATP7A variant, a BCL2 variant, a BLOC1S2 variant, a BLOC1S3 variant, a BLOC1S4 variant, a BLOC1S5 variant, a BRAF variant, a DCT variant, a DCTN1 variant, a DCTN2 variant, a DOCK7 variant, a DSTYK variant, a DTNBP1 variant, an EED variant, a FIG. 4 variant, a GGT1 variant, a GPR143 variant, a HPS1 variant, a HPS3 variant, a HPS4 variant, a HPS5 variant, a HPS6 variant, a LYST variant, a MBTPS1 variant, a MCOLN3 variant, a MFSD12 variant, a MITF variant, a MKLN1 variant, a MLANA variant, a MPLH variant, a MREG variant, a MYO5A variant, a NOTCH1 variant, a NOTCH2 variant, an OCA2 variant, a PAH variant, a PIKFYVE variant, a PMEL variant, a RAB27A variant, a RAB38 variant, a RABGGTA variant, a RAF1 variant, a SLC24A5 variant, a SLC45A2 variant, a SLC7A11 variant, a SNAI2 variant, a SPAG9 variant, a TPCN2 variant, a TYR variant, a TYRP1 variant, a VAC14 variant, a VPS33A variant, and a YKT6 variant. In certain embodiments, the recombinant host cells comprise one or more bluebuck gene variants associated with melanogenesis selected from an AP3D1 variant, an ASCC2 variant, an ATP6V0A2 variant, a CCDC53 variant, a CD72 variant, a CDK12 variant, a CHD8 variant, a COMMD5 variant, a DSCR3 variant, an EP300 variant, a FIG. 4 variant, a FRYL variant, a HDAC4 variant, a HNRNPA2B1L1 variant, a HNRNPA2B1L2 variant, a HNRNPA2B1L3 variant, a HNRNPA2B1L4 variant, a HPS3 variant, a HPS4 variant, a HPS5 variant, a HPS6 variant, an INTS8 variant, a LYST variant, a NCOR1 variant, a RAB9A variant, a RB1 variant, a SCAF4 variant, a SEC31A variant, a SIAH1 variant, a SMG7 variant, a SNX13L1 variant, a SLX13L2 variant, a TBC1D5 variant, and a WDFY1 variant.

[0101] Also provided are recombinant host cells comprising one or more bluebuck (Hippotragus leucophaeus) gene variants associated with altered facial pattern. In certain embodiments, the recombinant host cells comprise one or more bluebuck gene variants associated with altered facial pattern selected from an ADAMTS20 variant, a BMP4 variant, a DOCK7 variant, an EDN3 variant, an EDNRB variant, an ETS1L1 variant, an ETS1L2 variant, a FOXD3 variant, a HDAC1 variant, an IRF1 variant, a KIT variant, a KITLG variant, a MCOLN3 variant, a MITF variant, a PAX3 variant, a SNAI2 variant, a SOX10 variant, a SOX2 variant, a TRPM1 variant, a WNT3A variant, and a ZFHX4 variant.

[0102] Also provided are recombinant host cells comprising one or more bluebuck (Hippotragus leucophaeus) gene variants associated with gray/blue coat color. The recombinant host cells comprise one or more bluebuck gene variants are selected from (a) a loss-of-function ASIP variant; (b) a DEFB103 missense variant; (c) a loss-of-function MLPH variant; (d) a PMEL missense variant; (e) a loss-of-function LYST variant; and/or (f) a loss-of-function SLC45A2 variant.

[0103] In certain embodiments, the recombinant host cell comprises 2, 3, 4, 5, 6, 7, 8, 9, 10, 15, 20, 25, 30, 40, 50, 60, 70, 80, 90, 95, 100, 101, 102 (or any number in between) bluebuck gene variants. In some embodiments, the bluebuck gene variant comprises one or more substitutions within the regulatory region and/or within the coding region of the gene as compared to a corresponding reference genome, wherein the reference genome is the genome of the host cell prior to the one or more substitutions used to generate the recombinant cell.

[0104] In certain embodiments, in recombinant host cells comprising one or more bluebuck gene variants associated with gray/blue coat color and melanogenesis selected from an ABCB6 variant, an ACE2 variant, an AP3B1 variant, an AP3D1 variant, an ASIP variant, an ATP7A variant, a BCL2 variant, a BLOC1S2 variant, a BLOC1S3 variant, a BLOC1S4 variant, a BLOC1S5 variant, a BRAF variant, a DCT variant, a DCTN1 variant, a DCTN2 variant, a DOCK7 variant, a DSTYK variant, a DTNBP1 variant, an EED variant, a FIG. 4 variant, a GGT1 variant, a GPR143 variant, a HPS1 variant, a HPS3 variant, a HPS4 variant, a HPS5 variant, a HPS6 variant, a LYST variant, a MBTPS1 variant, a MCOLN3 variant, a MFSD12 variant, a MITF variant, a MKLN1 variant, a MLANA variant, a MPLH variant, a MREG variant, a MYO5A variant, a NOTCH1 variant, a NOTCH2 variant, an OCA2 variant, a PAH variant, a PIKFYVE variant, a PMEL variant, a RAB27A variant, a RAB38 variant, a RABGGTA variant, a RAF1 variant, a SLC24A5 variant, a SLC45A2 variant, a SLC7A11 variant, a SNAI2 variant, a SPAG9 variant, a TPCN2 variant, a TYR variant, a TYRP1 variant, a VAC14 variant, a VPS33A variant, a YKT6 variant, an AP3D1 variant, an ASCC2 variant, an ATP6V0A2 variant, a CCDC53 variant, a CD72 variant, a CDK12 variant, a CHD8 variant, a COMMD5 variant, a DSCR3 variant, an EP300 variant, a FIG. 4 variant, a FRYL variant, a HDAC4 variant, a HNRNPA2B1L1 variant, a HNRNPA2B1L2 variant, a HNRNPA2B1L3 variant, a HNRNPA2B1L4 variant, a HPS3 variant, a HPS4 variant, a HPS5 variant, a HPS6 variant, an INTS8 variant, a LYST variant, a NCOR1 variant, a RAB9A variant, a RB1 variant, a SCAF4 variant, a SEC31A variant, a SIAH1 variant, a SMG7 variant, a SNX13L1 variant, a SNX13L2 variant, a TBC1D5 variant, and a WDFY1 variant, the recombinant host cell can further comprise a bluebuck gene variant associated with altered facial pattern selected from an ADAMTS20 variant, a BMP4 variant, a DOCK7 variant, an EDN3 variant, an EDNRB variant, an ETS1L1 variant, an ETS1L2 variant, a FOXD3 variant, a HDAC1 variant, an IRF1 variant, a KIT variant, a KITLG variant, a MCOLN3 variant, a MITF variant, a PAX3 variant, a SNAI2 variant, a SOX10 variant, a SOX2 variant, a TRPM1 variant, a WNT3A variant, and a ZFHX4 variant.

[0105] In certain embodiments, in recombinant host cells comprising one or more bluebuck gene variants associated with gray/blue coat color and melanogenesis selected from an ABCB6 variant, an ACE2 variant, an AP3B1 variant, an AP3D1 variant, an ASIP variant, an ATP7A variant, a BCL2 variant, a BLOC1S2 variant, a BLOC1S3 variant, a BLOC1S4 variant, a BLOC1S5 variant, a BRAF variant, a DCT variant, a DCTN1 variant, a DCTN2 variant, a DOCK7 variant, a DSTYK variant, a DTNBP1 variant, an EED variant, a FIG. 4 variant, a GGT1 variant, a GPR143 variant, a HPS1 variant, a HPS3 variant, a HPS4 variant, a HPS5 variant, a HPS6 variant, a LYST variant, a MBTPS1 variant, a MCOLN3 variant, a MFSD12 variant, a MITF variant, a MKLN1 variant, a MLANA variant, a MPLH variant, a MREG variant, a MYO5A variant, a NOTCH1 variant, a NOTCH2 variant, an OCA2 variant, a PAH variant, a PIKFYVE variant, a PMEL variant, a RAB27A variant, a RAB38 variant, a RABGGTA variant, a RAF1 variant, a SLC24A5 variant, a SLC45A2 variant, a SLC7A11 variant, a SNAI2 variant, a SPAG9 variant, a TPCN2 variant, a TYR variant, a TYRP1 variant, a VAC14 variant, a VPS33A variant, a YKT6 variant, an AP3D1 variant, an ASCC2 variant, an ATP6V0A2 variant, a CCDC53 variant, a CD72 variant, a CDK12 variant, a CHD8 variant, a COMMD5 variant, a DSCR3 variant, an EP300 variant, a FIG. 4 variant, a FRYL variant, a HDAC4 variant, a HNRNPA2B1L1 variant, a HNRNPA2B1L2 variant, a HNRNPA2B1L3 variant, a HNRNPA2B1L4 variant, a HPS3 variant, a HPS4 variant, a HPS5 variant, a HPS6 variant, an INTS8 variant, a LYST variant, a NCOR1 variant, a RAB9A variant, a RB1 variant, a SCAF4 variant, a SEC31A variant, a SIAH1 variant, a SMG7 variant, a SNX13L1 variant, a SNX13L2 variant, a TBC1D5 variant, and a WDFY1 variant, the recombinant host cell can further comprise a bluebuck gene variant associated with gray/blue coat color selected from (a) a loss-of-function ASIP variant; (b) a DEFB103 missense variant; (c) a loss-of-function MLPH variant; (d) a PMEL missense variant; (e) a loss-of-function LYST variant; and/or (f) a loss-of-function SLC45A2 variant. In certain embodiments, (a) the loss-of-function ASIP variant comprises an insertion and deletion (indel); (b) the DEFB103 missense variant comprises a glycine deletion at an amino acid position corresponding to position 23 of SEQ ID NO:4; (c) the loss-of-function MLPH variant comprises an indel; (d) the PMEL missense variant comprises a cysteine substitution for an arginine at an amino acid position corresponding to position 603 of SEQ ID NO: 8; (e) the loss-of-function LYST variant comprises an indel; and/or (f) the loss-of-function SLC45A2 variant comprises an indel. In certain embodiments, the recombinant host cell can further comprise a bluebuck gene variant associated with altered facial pattern selected from an ADAMTS20 variant, a BMP4 variant, a DOCK7 variant, an EDN3 variant, an EDNRB variant, an ETS1L1 variant, an ETS1L2 variant, a FOXD3 variant, a HDAC1 variant, an IRF1 variant, a KIT variant, a KITLG variant, a MCOLN3 variant, a MITF variant, a PAX3 variant, a SNAI2 variant, a SOX10 variant, a SOX2 variant, a TRPM1 variant, a WNT3A variant, and a ZFHX4 variant.

[0106] As used herein, insertions and deletions (indels) can be used to create loss-of-function variants of the targeted protein. The loss-of-function variants can either be transcribed at the RNA level and degraded by a process known as nonsense mediated decay (NMD). Alternatively, the loss-of-function variant can be translated into a shortened peptide without the functional domains of the full-length protein. A person skilled in the art would understand how to create an insertion or deletion in a peptide to arrive at a variant with a loss-of-function.

[0107] As used herein, missense variants are single substitutions of one amino acid for another amino acid resulting in a missense variant. A person skilled in the art would understand how to create a missense variant.

[0108] In certain embodiments, the recombinant host cell fails to express an endogenous homologue of at least one of ABCB6, ACE2, AP3B1, AP3D1, ASIP, ATP7A, BCL2, BLOC1S2, BLOC1S3, BLOC1S4, BLOC1S5, BRAF, DCT, DCTN1, DCTN2, DOCK7, DSTYK, DTNBP1, EED, FIG. 4, GGT1, GPR143, HPS1, HPS3, HPS4, HPS5, HPS6, LYST, MBTPS1, MCOLN3, MFSD12, MITF, MKLN1, MLANA, MPLH, MREG, MYO5A, NOTCH1, NOTCH2, OCA2, PAH, PIKFYVE, PMEL, RAB27A, RAB38, RABGGTA, RAF1, SLC24A5, SLC45A2, SLC7A11, SNAI2, SPAG9, TPCN2, TYR, TYRP1, VAC14, VPS33A, YKT6, ASCC2, ATP6V0A2, CCDC53, CD72, CDK12, CHD8, COMMD5, DSCR3, EP300, FRYL, HDAC4, HNRNPA2B1L1, HNRNPA2B1L2, HNRNPA2B1L3, HNRNPA2B1L4, INTS8, NCOR1, RAB9A, RB1, SCAF4, SEC31A, SIAH1, SMG7, SNX13L1, SNX13L2, TBC1D5, WDFY1, ADAMTS20, BMP4, EDN3, EDNRB, ETS1L1, ETS1L2, FOXD3, HDAC1, IRF1, KIT, KITLG, PAX3, SOX10, SOX2, TRPM1, WNT3A, and ZFHX4. In certain embodiments, the recombinant host cell fails to express the endogenous homologue of 2, 3, 4, 5, 6, 7, 8, 9, 10, 15, 20, 25, 30, 35, 40, 45, 50, 55, 60, 65, 70, 75, 80, 85, 90, 95, 100, 101, 102 (or any number in between) of ABCB6, ACE2, AP3B1, AP3D1, ASIP, ATP7A, BCL2, BLOC1S2, BLOC1S3, BLOC1S4, BLOC1S5, BRAF, DCT, DCTN1, DCTN2, DOCK7, DSTYK, DTNBP1, EED, FIG. 4, GGT1, GPR143, HPS1, HPS3, HPS4, HPS5, HPS6, LYST, MBTPS1, MCOLN3, MFSD12, MITF, MKLN1, MLANA, MPLH, MREG, MYO5A, NOTCH1, NOTCH2, OCA2, PAH, PIKFYVE, PMEL, RAB27A, RAB38, RABGGTA, RAF1, SLC24A5, SLC45A2, SLC7A11, SNAI2, SPAG9, TPCN2, TYR, TYRP1, VAC14, VPS33A, YKT6, ASCC2, ATP6V0A2, CCDC53, CD72, CDK12, CHD8, COMMD5, DSCR3, EP300, FRYL, HDAC4, HNRNPA2B1L1, HNRNPA2B1L2, HNRNPA2B1L3, HNRNPA2B1L4, INTS8, NCOR1, RAB9A, RB1, SCAF4, SEC31A, SIAH1, SMG7, SNX13L1, SNX13L2, TBC1D5, WDFY1, ADAMTS20, BMP4, EDN3, EDNRB, ETS1L1, ETS1L2, FOXD3, HDAC1, IRF1, KIT, KITLG, PAX3, SOX10, SOX2, TRPM1, WNT3A, and ZFHX4.

[0109] Also provided are recombinant host cells comprising at least one of the isolated nucleic acid sequences described herein. In certain embodiments, the recombinant host cell comprises 1, 2, 3, 4, 5, 6, 7, 8, 9, 10, 15, 20, 25, 30, 40, 50, 60, 70, 80, 90, 95, 100, 101, 102 (or any number in between) of the isolated nucleic acids described herein.

[0110] Also provided herein are recombinant host cells comprising a deletion of at least one endogenous homologue of at least one of ABCB6, ACE2, AP3B1, AP3D1, ASIP, ATP7A, BCL2, BLOC1S2, BLOC1S3, BLOC1S4, BLOC1S5, BRAF, DCT, DCTN1, DCTN2, DOCK7, DSTYK, DTNBP1, EED, FIG. 4, GGT1, GPR143, HPS1, HPS3, HPS4, HPS5, HPS6, LYST, MBTPS1, MCOLN3, MFSD12, MITF, MKLN1, MLANA, MPLH, MREG, MYO5A, NOTCH1, NOTCH2, OCA2, PAH, PIKFYVE, PMEL, RAB27A, RAB38, RABGGTA, RAF1, SLC24A5, SLC45A2, SLC7A11, SNAI2, SPAG9, TPCN2, TYR, TYRP1, VAC14, VPS33A, YKT6, ASCC2, ATP6V0A2, CCDC53, CD72, CDK12, CHD8, COMMD5, DSCR3, EP300, FRYL, HDAC4, HNRNPA2B1L1, HNRNPA2B1L2, HNRNPA2B1L3, HNRNPA2B1L4, INTS8, NCOR1, RAB9A, RB1, SCAF4, SEC31A, SIAH1, SMG7, SNX13L1, SNX13L2, TBC1D5, WDFY1, ADAMTS20, BMP4, EDN3, EDNRB, ETS1L1, ETS1L2, FOXD3, HDAC1, IRF1, KIT, KITLG, PAX3, SOX10, SOX2, TRPM1, WNT3A, and ZFHX4. In certain embodiments, the recombinant host cell comprises a deletion of 2, 3, 4, 5, 6, 7, 8, 9, 10, 15, 20, 25, 30, 35, 40, 45, 50, 55, 60, 65, 70, 75, 80, 85, 90, 95, 100, 101, 102 (or any number in between) of ABCB6, ACE2, AP3B1, AP3D1, ASIP, ATP7A, BCL2, BLOC1S2, BLOC1S3, BLOC1S4, BLOC1S5, BRAF, DCT, DCTN1, DCTN2, DOCK7, DSTYK, DTNBP1, EED, FIG. 4, GGT1, GPR143, HPS1, HPS3, HPS4, HPS5, HPS6, LYST, MBTPS1, MCOLN3, MFSD12, MITF, MKLN1, MLANA, MPLH, MREG, MYO5A, NOTCH1, NOTCH2, OCA2, PAH, PIKFYVE, PMEL, RAB27A, RAB38, RABGGTA, RAF1, SLC24A5, SLC45A2, SLC7A11, SNAI2, SPAG9, TPCN2, TYR, TYRP1, VAC14, VPS33A, YKT6, ASCC2, ATP6V0A2, CCDC53, CD72, CDK12, CHD8, COMMD5, DSCR3, EP300, FRYL, HDAC4, HNRNPA2B1L1, HNRNPA2B1L2, HNRNPA2B1L3, HNRNPA2B1L4, INTS8, NCOR1, RAB9A, RB1, SCAF4, SEC31A, SIAH1, SMG7, SNX13L1, SNX13L2, TBC1D5, WDFY1, ADAMTS20, BMP4, EDN3, EDNRB, ETS1L1, ETS1L2, FOXD3, HDAC1, IRF1, KIT, KITLG, PAX3, SOX10, SOX2, TRPM1, WNT3A, and ZFHX4.

[0111] In certain embodiments, the recombinant host cells comprising the isolated nucleic acids described herein further comprise a deletion of at least one endogenous homologue of at least one of ABCB6, ACE2, AP3B1, AP3D1, ASIP, ATP7A, BCL2, BLOC1S2, BLOC1S3, BLOC1S4, BLOC1S5, BRAF, DCT, DCTN1, DCTN2, DOCK7, DSTYK, DTNBP1, EED, FIG. 4, GGT1, GPR143, HPS1, HPS3, HPS4, HPS5, HPS6, LYST, MBTPS1, MCOLN3, MFSD12, MITF, MKLN1, MLANA, MPLH, MREG, MYO5A, NOTCH1, NOTCH2, OCA2, PAH, PIKFYVE, PMEL, RAB27A, RAB38, RABGGTA, RAF1, SLC24A5, SLC45A2, SLC7A11, SNAI2, SPAG9, TPCN2, TYR, TYRP1, VAC14, VPS33A, YKT6, ASCC2, ATP6V0A2, CCDC53, CD72, CDK12, CHD8, COMMD5, DSCR3, EP300, FRYL, HDAC4, HNRNPA2B1L1, HNRNPA2B1L2, HNRNPA2B1L3, HNRNPA2B1L4, INTS8, NCOR1, RAB9A, RB1, SCAF4, SEC31A, SIAH1, SMG7, SNX13L1, SNX13L2, TBC1D5, WDFY1, ADAMTS20, BMP4, EDN3, EDNRB, ETS1L1, ETS1L2, FOXD3, HDAC1, IRF1, KIT, KITLG, PAX3, SOX10, SOX2, TRPM1, WNT3A, and ZFHX4.

[0112] In certain embodiments, the recombinant host cell is an antelope cell. In certain embodiments, the recombinant host cell is a roan antelope (Hippotragus equinus) cell or a sable antelope (Hippotragus niger) cell.

[0113] The bluebuck gene variants described herein can be used in any combination to be expressed in any recombinant host cell as described herein.

### Cells

[0114] The bluebuck gene variants described herein can be expressed by any viable cell that can accept exogenous genetic material. The cell can be, for example, a prokaryotic cell or a eukaryotic cell. In some embodiments, the cell is a eukaryotic cell. The cell can be a reprogrammed cell, a non-human oocyte, a cell of a non-human embryo or a cell of a non-human blastula. In some embodiments of any of the aspects, the cell is a fibroblast cell. In some embodiments, the cell is selected from the group consisting of a nerve cell, a cartilage cell, a bone cell, a muscle cell, a bone cell, a fat cell, and an epidermal cell. In some embodiments, the cell was previously differentiated into a cell selected from the group consisting of a nerve cell, cartilage cell, bone cell, muscle cell, bone cell, fat cell, and an epidermal cell.

[0115] The scientific literature provides guidance for one of ordinary skill in the art to isolate and prepare cells as necessary for use with the isolated nucleic acids and vectors described herein.

[0116] The cells described herein can be from any viable non-human source or organism. Usually, the organism is an animal or vertebrate such as a wild animal, zoo animal, endangered animal, rodent, domestic animal, or bird. Animals can include, as non-limiting examples, an antelope, hippopotamus, hyrax, manatee, bear, panda, feline species, e.g., tiger, lion, cheetah, bobcat, canine species, e.g., fox, wolf, avian species, e.g., ostrich, emu, penguin, pigeon, and fish, e.g., trout, catfish, and salmon. In some embodiments, the cell described herein is from a mammal. A non-limiting example of an organism from which cells can be derived includes antelopes (e.g., Hippotragus equinus and Hippotragus niger).

[0117] In certain embodiments, a cell useful in the methods and compositions described herein is an antelope cell. In some embodiments, the cell is an antelope fibroblast cell. In some embodiments, the cell is an antelope stem cell. In some embodiments, the cell described herein is an antelope somatic cell reprogrammed to a stem cell or stem cell-like phenotype having stem cell-like morphology and/or expressing at least one stem cell marker described herein.

[0118] The cells described herein can be from any tissue isolated from an organism by methods known in the art. For example, placental tissue can be isolated from a given organism (e.g., an antelope), after full term delivery of young, and subsequently processed for cellular isolation and/or culture by methods known in the art. Additional exemplary cell types that can be used for the compositions and methods described herein include but are not limited to fibroblasts, skin cells, blood cells (e.g., leukocytes, monocytes, dendritic cells), stem cells, hematopoietic cells, liver cells, vascular cells, muscle cells, pancreatic cells, neural cells, ocular or retinal cells, epithelial or endothelial cells, lung cells, cardiac cells, intestinal cells, diaphragmatic cells, renal (i.e., kidney) cells, bone marrow cells, or any one or more selected tissues or cells of an organism for which genetic modification or gene editing to express a bluebuck gene is contemplated.

[0119] In certain embodiments, the isolated nucleic acids and vectors described herein are used in stem cells. Stem cells are cells that retain the ability to renew themselves through mitotic cell division and can differentiate into more specialized cell types. Three broad types of mammalian stem cells include: embryonic stem (ES) cells that are found in blastocysts, induced pluripotent stem cells (iPSCs) that are reprogrammed from somatic cells, and adult stem cells that are found in adult tissues. Other sources of stem cells can include, for example, amnion-derived or placental-derived stem cells. Pluripotent stem cells can differentiate into cells derived from any of the three germ layers.

[0120] In certain embodiments, the recombinant host cell is a stem cell. The stem cell can, for example, be selected from an induced stem cell, embryonic stem (ES) cell, or a mesenchymal stem cell (MSC). In certain embodiments, the recombinant host cell is a reprogrammed cell. In certain embodiments, the recombinant host cell is a fibroblast cell or a mesenchymal cell. In certain embodiments, the recombinant host cell is selected from the group consisting of a nerve cell, a cartilage cell, a bone cell, a muscle cell, a bone cell, a fat cell, and an epidermal cell.

[0121] In certain embodiments, the recombinant host cell fails to express an endogenous homologue of at least one of ABCB6, ACE2, AP3B1, AP3D1, ASIP, ATP7A, BCL2, BLOC1S2, BLOC1S3, BLOC1S4, BLOC1S5, BRAF, DCT, DCTN1, DCTN2, DOCK7, DSTYK, DTNBP1, EED, FIG. 4, GGT1, GPR143, HPS1, HPS3, HPS4, HPS5, HPS6, LYST, MBTPS1, MCOLN3, MFSD12, MITF, MKLN1, MLANA, MPLH, MREG, MYO5A, NOTCH1, NOTCH2, OCA2, PAH, PIKFYVE, PMEL, RAB27A, RAB38, RABGGTA, RAF1, SLC24A5, SLC45A2, SLC7A11, SNAI2, SPAG9, TPCN2, TYR, TYRP1, VAC14, VPS33A, YKT6, ASCC2, ATP6V0A2, CCDC53, CD72, CDK12, CHD8, COMMD5, DSCR3, EP300, FRYL, HDAC4, HNRNPA2B1L1, HNRNPA2B1L2, HNRNPA2B1L3, HNRNPA2B1L4, INTS8, NCOR1, RAB9A, RBI, SCAF4, SEC31A, SIAH1, SMG7, SNX13L1, SNX13L2, TBC1D5, WDFY1, ADAMTS20, BMP4, EDN3, EDNRB, ETS1L1, ETS1L2, FOXD3, HDAC1, IRF1, KIT, KITLG, PAX3, SOX10, SOX2, TRPM1, WNT3A, and ZFHX4. In certain embodiments, the recombinant host cell fails to express the endogenous homologue of 2, 3, 4, 5, 6, 7, 8, 9, 10, 15, 20, 25, 30, 35, 40, 45, 50, 55, 60, 65, 70, 75, 80, 85, 90, 95, 100, 101, 102 (or any number in between) of ABCB6, ACE2, AP3B1, AP3D1, ASIP, ATP7A, BCL2, BLOC1S2, BLOC1S3, BLOC1S4, BLOC1S5, BRAF, DCT, DCTN1, DCTN2, DOCK7, DSTYK, DTNBP1, EED, FIG. 4, GGT1, GPR143, HPS1, HPS3, HPS4, HPS5, HPS6, LYST, MBTPS1, MCOLN3, MFSD12, MITF, MKLN1, MLANA, MPLH, MREG, MYO5A, NOTCH1, NOTCH2, OCA2, PAH, PIKFYVE, PMEL, RAB27A, RAB38, RABGGTA, RAF1, SLC24A5, SLC45A2, SLC7A11, SNAI2, SPAG9, TPCN2, TYR, TYRP1, VAC14, VPS33A, YKT6, ASCC2, ATP6V0A2, CCDC53, CD72, CDK12, CHD8, COMMD5, DSCR3, EP300, FRYL, HDAC4, HNRNPA2B1L1, HNRNPA2B1L2, HNRNPA2B1L3, HNRNPA2B1L4, INTS8, NCOR1, RAB9A, RB1, SCAF4, SEC31A, SIAH1, SMG7, SNX13L1, SNX13L2, TBC1D5, WDFY1, ADAMTS20, BMP4, EDN3, EDNRB, ETS1L1, ETS1L2, FOXD3, HDAC1, IRF1, KIT, KITLG, PAX3, SOX10, SOX2, TRPM1, WNT3A, and ZFHX4.

[0122] In certain embodiments, the recombinant host cell is an antelope cell. In certain embodiments, the recombinant host cell is a roan antelope (Hippotragus equinus) cell or a sable antelope (Hippotragus niger) cell.

[0123] Also provided are transgenic animals comprising a recombinant host cell as described herein. In certain embodiments, the transgenic animal is an antelope. In certain embodiments, the transgenic animal is a roan antelope (Hippotragus equinus) or a sable antelope (Hippotragus niger).

### Transgenic Animals

[0124] Provided herein are transgenic animals comprising one or more bluebuck (Hippotragus leucophaeus) gene variants associated with gray/blue coat color and/or melanogenesis. The transgenic animals can, for example comprise one or more bluebuck gene variants associated with gray/blue coat color selected from an ABCB6 variant, an ACE2 variant, an AP3B1 variant, an AP3D1 variant, an ASIP variant, an ATP7A variant, a BCL2 variant, a BLOC1S2 variant, a BLOC1S3 variant, a BLOC1S4 variant, a BLOC1S5 variant, a BRAF variant, a DCT variant, a DCTN1 variant, a DCTN2 variant, a DOCK7 variant, a DSTYK variant, a DTNBP1 variant, an EED variant, a FIG. 4 variant, a GGT1 variant, a GPR143 variant, a HPS1 variant, a HPS3 variant, a HPS4 variant, a HPS5 variant, a HPS6 variant, a LYST variant, a MBTPS1 variant, a MCOLN3 variant, a MFSD12 variant, a MITF variant, a MKLN1 variant, a MLANA variant, a MPLH variant, a MREG variant, a MYO5A variant, a NOTCH1 variant, a NOTCH2 variant, an OCA2 variant, a PAH variant, a PIKFYVE variant, a PMEL variant, a RAB27A variant, a RAB38 variant, a RABGGTA variant, a RAF1 variant, a SLC24A5 variant, a SLC45A2 variant, a SLC7A11 variant, a SNAI2 variant, a SPAG9 variant, a TPCN2 variant, a TYR variant, a TYRP1 variant, a VAC14 variant, a VPS33A variant, and a YKT6 variant. The transgenic animals can, for example comprise one or more bluebuck gene variants associated with melanogenesis selected from an AP3D1 variant, an ASCC2 variant, an ATP6V0A2 variant, a CCDC53 variant, a CD72 variant, a CDK12 variant, a CHD8 variant, a COMMD5 variant, a DSCR3 variant, an EP300 variant, a FIG. 4 variant, a FRYL variant, a HDAC4 variant, a HNRNPA2B1L1 variant, a HNRNPA2B1L2 variant, a HNRNPA2B1L3 variant, a HNRNPA2B1L4 variant, a HPS3 variant, a HPS4 variant, a HPS5 variant, a HPS6 variant, an INTS8 variant, a LYST variant, a NCOR1 variant, a RAB9A variant, a RBI variant, a SCAF4 variant, a SEC31A variant, a SIAH1 variant, a SMG7 variant, a SNX13L1 variant, a SLX13L2 variant, a TBC1D5 variant, and a WDFY1 variant.

[0125] Also provided are transgenic animals comprising one or more bluebuck (Hippotragus leucophaeus) gene variants associated with altered facial pattern. The transgenic animal can, for example, comprise one or more bluebuck gene variants associated with altered facial pattern are selected from an ADAMTS20 variant, a BMP4 variant, a DOCK7 variant, an EDN3 variant, an EDNRB variant, an ETS1L1 variant, an ETS1L2 variant, a FOXD3 variant, a HDAC1 variant, an IRF1 variant, a KIT variant, a KITLG variant, a MCOLN3 variant, a MITF variant, a PAX3 variant, a SNAI2 variant, a SOX10 variant, a SOX2 variant, a TRPM1 variant, a WNT3A variant, and a ZFHX4 variant.

[0126] Also provided are transgenic animals comprising one or more bluebuck (Hippotragus leucophaeus) gene variants associated with gray/blue coat color. The one or more bluebuck gene variants can, for example, be selected from (a) a loss-of-function ASIP variant; (b) a DEFB103 missense variant; (c) a loss-of-function MLPH variant; (d) a PMEL missense variant; (e) a loss-of-function LYST variant; and/or (f) a loss-of-function SLC45A2 variant.

[0127] In certain embodiments, the transgenic animal comprises 2, 3, 4, 5, 6, 7, 8, 9, 10, 15, 20, 25, 30, 40, 50, 60, 70, 80, 90, 95, 100, 101, 102 (or any number in between) bluebuck gene variants. In some embodiments, the bluebuck gene variant comprises one or more substitutions within the regulatory region and/or within the coding region of the gene as compared to a corresponding reference genome, wherein the corresponding reference genome is the genome of the animal prior to the one or more substitutions.

[0128] In certain embodiments, the ASIP variant, the LYST variant, the SLC45A2 variant, the BCL2 variant, the DCT variant, and/or the MYO5A variant is in a coding region. In certain embodiments, (a) the ASIP variant in the coding region is selected from an isoleucine substitution for valine at amino acid position 39; and/or a tryptophan substitution for arginine at amino acid position 10, wherein the amino acid position corresponds to SEQ ID NO:2; (b) the LYST variant in the coding region is selected from a tyrosine substitution for a cysteine at amino acid position 1352, and/or an arginine substitution for a valine at amino acid position 1079, wherein the amino acid position corresponds to SEQ ID NO:10; (c) the SLC45A2 variant in the coding region is selected from a valine substitution for a methionine at amino acid position 475, and/or a cysteine substitution for an arginine at amino acid position 59, wherein the amino acid position corresponds to SEQ ID NO:12; (d) the BCL2 variant in the coding region is selected from a threonine substitution for an asparagine at amino acid position 139, and/or an aspartic acid substitution for a glycine at amino acid position 127, wherein the amino acid position corresponds to SEQ ID NO: 14; (e) the DCT variant in the coding region is selected from a phenylalanine substitution for a leucine at amino acid position 240, and/or an arginine substitution for a tryptophan at amino acid position 22, wherein the amino acid position corresponds to SEQ ID NO: 16; and/or (f) the MYO5A variant in the coding region is selected from a serine substitution for a proline at amino acid position 1321, and/or a serine substitution for an asparagine at amino acid position 372, wherein the amino acid position corresponds to SEQ ID NO:20.

[0129] In certain embodiments, the ASIP variant, the MLPH variant, and/or the LYST variant is in a regulatory region. In certain embodiments, (a) the ASIP variant in the regulatory region is selected from an adenine substitution for a guanine at nucleotide position 919, a thymine substitution for a guanine at nucleotide position 1530, a thymine substitution for an adenine at nucleotide position 1578, a thymine substitution for a cytosine at nucleotide position 3703, an adenine substitution for a guanine at nucleotide position 3892, a cytosine substitution for a thymine at nucleotide position 4274, a thymine substitution for an adenine at nucleotide position 4370, a thymine substitution for a cytosine at nucleotide position 4807, a guanine substitution for an adenine at nucleotide position 4821, and/or an adenine substitution for a guanine at nucleotide position 4905, wherein the nucleotide position corresponds to SEQ ID NO:25; (b) the MLPH variant in the regulatory region is selected from a cytosine substitution for a guanine at nucleotide position 1238, an adenine substitution for a thymine at nucleotide position 1299; an adenine substitution for a cytosine at nucleotide position 1488, an adenine substitution for a guanine at nucleotide position 1526, a guanine substitution for a thymine at nucleotide position 1618, an adenine substitution for a guanine at nucleotide position 1653, an adenine substitution for a guanine at nucleotide position 1672; a thymine substitution for a cytosine at nucleotide position 1718, an adenine substitution for a guanine at nucleotide position 1837, a guanine substitution for an adenine at nucleotide position 1949, an adenine substitution for a cytosine at nucleotide position 2472, a guanine substitution for an adenine at nucleotide position 2675, a thymine substitution for a cytosine at nucleotide position 2691, a guanine substitution for a thymine at nucleotide position 2900, a guanine substitution for an adenine at nucleotide position 3029, a guanine substitution for an adenine at nucleotide position 3090, a guanine substitution for a thymine at nucleotide position 3272, a cytosine substitution for a thymine at nucleotide position 3380, a cytosine substitution for a thymine at nucleotide position 3449, a cytosine substitution for a thymine at nucleotide position 3463, an adenine substitution for a guanine at nucleotide position 3513, a cytosine substitution for a thymine at nucleotide position 3559, a cytosine substitution for a thymine at nucleotide position 3581, a guanine substitution for a cytosine at nucleotide position 4352, a guanine substitution for a cytosine at nucleotide position 4356, a guanine substitution for an adenine at nucleotide position 4552, a guanine substitution for an adenine at nucleotide position 4690, a guanine substitution for an adenine at nucleotide position 4856, a cytosine substitution for a thymine at nucleotide position 4888, and/or a thymine substitution for a cytosine at nucleotide position 4990, wherein the nucleotide position corresponds to SEQ ID NO:27; and/or (c) the LYST variant in the regulatory region is selected from a cytosine substitution for a guanine at nucleotide position 48, a cytosine substitution for an adenine at nucleotide position 67, a guanine substitution for a cytosine at nucleotide position 71, a thymine substitution for a cytosine at nucleotide position 247, a cytosine substitution for a thymine at nucleotide position 254, a guanine substitution for an adenine at nucleotide position 486, a thymine substitution for a cytosine at nucleotide position 883, a cytosine substitution for an adenine at nucleotide position 1002, an adenine substitution for a guanine at nucleotide position 1105, a thymine substitution for a cytosine at nucleotide position 1505, an adenine substitution for a guanine at nucleotide position 2350, a thymine substitution for a cytosine at nucleotide position 2612, a thymine substitution for a cytosine at nucleotide position 2661, a cytosine substitution for a thymine at nucleotide position 2668, a cytosine substitution for a thymine at nucleotide position 2818, a cytosine substitution for a guanine at nucleotide position 2873, a cytosine substitution for a guanine at nucleotide position 3223, an adenine substitution for a guanine at nucleotide position 3257, a thymine substitution for a cytosine at nucleotide position 4347, a cytosine substitution for a thymine at nucleotide position 4420, a thymine substitution for a cytosine at nucleotide position 4586, a cytosine substitution for a thymine at nucleotide position 4598, and/or a thymine substitution for a cytosine at nucleotide position 4619, wherein the nucleotide position corresponds to SEQ ID NO:29.

[0130] In certain embodiments, wherein the transgenic animals comprises one or more bluebuck gene variants associated with gray/blue coat color selected from an ABCB6 variant, an ACE2 variant, an AP3B1 variant, an AP3D1 variant, an ASIP variant, an ATP7A variant, a BCL2 variant, a BLOC1S2 variant, a BLOC1S3 variant, a BLOC1S4 variant, a BLOC1S5 variant, a BRAF variant, a DCT variant, a DCTN1 variant, a DCTN2 variant, a DOCK7 variant, a DSTYK variant, a DTNBP1 variant, an EED variant, a FIG. 4 variant, a GGT1 variant, a GPR143 variant, a HPS1 variant, a HPS3 variant, a HPS4 variant, a HPS5 variant, a HPS6 variant, a LYST variant, a MBTPS1 variant, a MCOLN3 variant, a MFSD12 variant, a MITF variant, a MKLN1 variant, a MLANA variant, a MPLH variant, a MREG variant, a MYO5A variant, a NOTCH1 variant, a NOTCH2 variant, an OCA2 variant, a PAH variant, a PIKFYVE variant, a PMEL variant, a RAB27A variant, a RAB38 variant, a RABGGTA variant, a RAF1 variant, a SLC24A5 variant, a SLC45A2 variant, a SLC7A11 variant, a SNAI2 variant, a SPAG9 variant, a TPCN2 variant, a TYR variant, a TYRP1 variant, a VAC14 variant, a VPS33A variant, and a YKT6 variant, the transgenic animal can further comprise one or more bluebuck gene variants associated with altered facial pattern selected from an ADAMTS20 variant, a BMP4 variant, a DOCK7 variant, an EDN3 variant, an EDNRB variant, an ETS1L1 variant, an ETS1L2 variant, a FOXD3 variant, a HDAC1 variant, an IRF1 variant, a KIT variant, a KITLG variant, a MCOLN3 variant, a MITF variant, a PAX3 variant, a SNAI2 variant, a SOX10 variant, a SOX2 variant, a TRPM1 variant, a WNT3A variant, and a ZFHX4 variant.

[0131] In certain embodiments, the MITF variant and the KIT variant is in a regulatory region. In certain embodiments, (a) the MITF variant in the regulatory region is selected from a thymine substitution for a cytosine at nucleotide position 514, an adenine substitution for a guanine at nucleotide position 6733, a thymine substitution for an adenine at nucleotide position 21322, an adenine substitution for a thymine at nucleotide position 29009, a thymine substitution for a cytosine at nucleotide position 37136, an adenine substitution for a thymine adenine at nucleotide position 48433, a thymine substitution for a guanine at nucleotide position 50738, a thymine substitution for a guanine at nucleotide position 52771, a thymine substitution for an adenine at nucleotide position 53986, a guanine substitution for an adenine at nucleotide position 85470, an adenine substitution for a guanine at nucleotide position 85945, a guanine substitution for a thymine at nucleotide position 89390, an adenine substitution for a guanine at nucleotide position 91717, a cytosine substitution for an adenine at nucleotide position 110490, an adenine substitution for a guanine at nucleotide position 114903, an adenine substitution for a guanine at nucleotide position 116734, an adenine substitution for a guanine at nucleotide position 119238, a cytosine substitution for an adenine at nucleotide position 122369, an adenine substitution for a cytosine at nucleotide position 126635, an adenine substitution for a guanine at nucleotide position 129446, a thymine substitution for a guanine at nucleotide position 133318, an adenine substitution for a guanine at nucleotide position 138944, a cytosine substitution for a thymine at nucleotide position 150167, an adenine substitution for a cytosine at nucleotide position 187625, a guanine substitution for an adenine at nucleotide position 208940, an adenine substitution for a guanine at nucleotide position 211614, a guanine substitution for an adenine at nucleotide position 216326, and/or a cytosine substitution for a thymine at nucleotide position 217379, wherein the nucleotide position corresponds to SEQ ID NO:33; and/or (b) the KIT variant in the regulatory region is selected from a thymine substitution for a cytosine at nucleotide position 268, a cytosine substitution for a guanine at nucleotide position 510, a guanine substitution for an adenine at nucleotide position 517, an adenine substitution for a guanine at nucleotide position 2108, a thymine substitution for a cytosine at nucleotide position 2401, an adenine substitution for a thymine at nucleotide position 2504, a cytosine substitution for a thymine at nucleotide position 2835, a guanine substitution for a adenine at nucleotide position 3365, a cytosine substitution for a thymine at nucleotide position 4044, an adenine substitution for a guanine at nucleotide position 4166, an adenine substitution for a cytosine at nucleotide position 4531, an adenine substitution for a guanine at nucleotide position 4569, a thymine substitution for a guanine at nucleotide position 4714, an adenine substitution for a cytosine at nucleotide position 4859, an adenine substitution for a guanine at nucleotide position 4892, and/or a guanine substitution for an adenine at nucleotide position 4907, wherein the nucleotide position corresponds to SEQ ID NO:31.

[0132] In certain embodiments, wherein the transgenic animal comprises one or more bluebuck gene variants associated with gray/blue coat color and melanogenesis selected from an ABCB6 variant, an ACE2 variant, an AP3B1 variant, an AP3D1 variant, an ASIP variant, an ATP7A variant, a BCL2 variant, a BLOC1S2 variant, a BLOC1S3 variant, a BLOC1S4 variant, a BLOC1S5 variant, a BRAF variant, a DCT variant, a DCTN1 variant, a DCTN2 variant, a DOCK7 variant, a DSTYK variant, a DTNBP1 variant, an EED variant, a FIG. 4 variant, a GGT1 variant, a GPR143 variant, a HPS1 variant, a HPS3 variant, a HPS4 variant, a HPS5 variant, a HPS6 variant, a LYST variant, a MBTPS1 variant, a MCOLN3 variant, a MFSD12 variant, a MITF variant, a MKLN1 variant, a MLANA variant, a MPLH variant, a MREG variant, a MYO5A variant, a NOTCH1 variant, a NOTCH2 variant, an OCA2 variant, a PAH variant, a PIKFYVE variant, a PMEL variant, a RAB27A variant, a RAB38 variant, a RABGGTA variant, a RAF1 variant, a SLC24A5 variant, a SLC45A2 variant, a SLC7A11 variant, a SNAI2 variant, a SPAG9 variant, a TPCN2 variant, a TYR variant, a TYRP1 variant, a VAC14 variant, a VPS33A variant, a YKT6 variant, an AP3D1 variant, an ASCC2 variant, an ATP6V0A2 variant, a CCDC53 variant, a CD72 variant, a CDK12 variant, a CHD8 variant, a COMMD5 variant, a DSCR3 variant, an EP300 variant, a FIG. 4 variant, a FRYL variant, a HDAC4 variant, a HNRNPA2B1L1 variant, a HNRNPA2B1L2 variant, a HNRNPA2B1L3 variant, a HNRNPA2B1L4 variant, a HPS3 variant, a HPS4 variant, a HPS5 variant, a HPS6 variant, an INTS8 variant, a LYST variant, a NCOR1 variant, a RAB9A variant, a RB1 variant, a SCAF4 variant, a SEC31A variant, a SIAH1 variant, a SMG7 variant, a SNX13L1 variant, a SNX13L2 variant, a TBC1D5 variant, and a WDFY1 variant, the transgenic animal can further comprise one or more bluebuck gene variants associated with gray/blue coat color selected from (a) a loss-of-function ASIP variant; (b) a DEFB103 missense variant; (c) a loss-of-function MLPH variant; (d) a PMEL missense variant; (e) a loss-of-function LYST variant; and/or (f) a loss-of-function SLC45A2 variant. In certain embodiments, (a) the loss-of-function ASIP variant comprises an insertion and deletion (indel); (b) the DEFB103 missense variant comprises a glycine deletion at an amino acid position corresponding to position 23 of SEQ ID NO:4; (c) the loss-of-function MLPH variant comprises an indel; (d) the PMEL missense variant comprises a cysteine substitution for an arginine at an amino acid position corresponding to position 603 of SEQ ID NO: 8; (e) the loss-of-function LYST variant comprises an indel; and (f) the loss-of-function SLC45A2 variant comprises an indel. In certain embodiments, the transgenic animal can further comprise one or more bluebuck gene variants associated with altered facial pattern selected from an ADAMTS20 variant, a BMP4 variant, a DOCK7 variant, an EDN3 variant, an EDNRB variant, an ETS1L1 variant, an ETS1L2 variant, a FOXD3 variant, a HDAC1 variant, an IRF1 variant, a KIT variant, a KITLG variant, a MCOLN3 variant, a MITF variant, a PAX3 variant, a SNAI2 variant, a SOX10 variant, a SOX2 variant, a TRPM1 variant, a WNT3A variant, and a ZFHX4 variant.

[0133] In certain embodiments, the transgenic animal fails to express an endogenous homologue of at least one of ABCB6, ACE2, AP3B1, AP3D1, ASIP, ATP7A, BCL2, BLOC1S2, BLOC1S3, BLOC1S4, BLOC1S5, BRAF, DCT, DCTN1, DCTN2, DOCK7, DSTYK, DTNBP1, EED, FIG. 4, GGT1, GPR143, HPS1, HPS3, HPS4, HPS5, HPS6, LYST, MBTPS1, MCOLN3, MFSD12, MITF, MKLN1, MLANA, MPLH, MREG, MYO5A, NOTCH1, NOTCH2, OCA2, PAH, PIKFYVE, PMEL, RAB27A, RAB38, RABGGTA, RAF1, SLC24A5, SLC45A2, SLC7A11, SNAI2, SPAG9, TPCN2, TYR, TYRP1, VAC14, VPS33A, YKT6, ASCC2, ATP6V0A2, CCDC53, CD72, CDK12, CHD8, COMMD5, DSCR3, EP300, FRYL, HDAC4, HNRNPA2B1L1, HNRNPA2B1L2, HNRNPA2B1L3, HNRNPA2B1L4, INTS8, NCOR1, RAB9A, RB1, SCAF4, SEC31A, SIAH1, SMG7, SNX13L1, SNX13L2, TBC1D5, WDFY1, ADAMTS20, BMP4, EDN3, EDNRB, ETS1L1, ETS1L2, FOXD3, HDAC1, IRF1, KIT, KITLG, PAX3, SOX10, SOX2, TRPM1, WNT3A, and ZFHX4. In certain embodiments, the transgenic animal fails to express the endogenous homologue of 2, 3, 4, 5, 6, 7, 8, 9, 10, 15, 20, 25, 30, 35, 40, 45, 50, 55, 60, 65, 70, 75, 80, 85, 90, 95, 100, 101, 102 (or any number in between) of ABCB6, ACE2, AP3B1, AP3D1, ASIP, ATP7A, BCL2, BLOC1S2, BLOC1S3, BLOC1S4, BLOC1S5, BRAF, DCT, DCTN1, DCTN2, DOCK7, DSTYK, DTNBP1, EED, FIG. 4, GGT1, GPR143, HPS1, HPS3, HPS4, HPS5, HPS6, LYST, MBTPS1, MCOLN3, MFSD12, MITF, MKLN1, MLANA, MPLH, MREG, MYO5A, NOTCH1, NOTCH2, OCA2, PAH, PIKFYVE, PMEL, RAB27A, RAB38, RABGGTA, RAF1, SLC24A5, SLC45A2, SLC7A11, SNAI2, SPAG9, TPCN2, TYR, TYRP1, VAC14, VPS33A, YKT6, ASCC2, ATP6V0A2, CCDC53, CD72, CDK12, CHD8, COMMD5, DSCR3, EP300, FRYL, HDAC4, HNRNPA2B1L1, HNRNPA2B1L2, HNRNPA2B1L3, HNRNPA2B1L4, INTS8, NCOR1, RAB9A, RB1, SCAF4, SEC31A, SIAH1, SMG7, SNX13L1, SNX13L2, TBC1D5, WDFY1, ADAMTS20, BMP4, EDN3, EDNRB, ETS1L1, ETS1L2, FOXD3, HDAC1, IRF1, KIT, KITLG, PAX3, SOX10, SOX2, TRPM1, WNT3A, and ZFHX4.

[0134] In certain embodiments, the transgenic animal is an antelope. In certain embodiments, the transgenic animal is a roan antelope (Hippotragus equinus) or a sable antelope (Hippotragus niger).

Methods for Introducing Bluebuck Gene Variants or Deletions of Regulatory Elements into a Cell

[0135] In certain embodiments of any of the aspects, the cell compositions described herein express a polypeptide encoded by the at least one isolated nucleic acid sequence having a bluebuck gene variant nucleotide sequence.

[0136] The cells described herein can be transfected, contacted with, or administered an exogenous bluebuck gene encoded by the isolated nucleic acids described herein by methods known in the art.

[0137] In some embodiments, the at least one nucleic acid sequence encoding a bluebuck gene is delivered via a vector.

[0138] A vector is a nucleic acid construct designed for delivery to a host cell or for transfer of genetic material between different host cells. As used herein, a vector can be viral or non-viral. The term “vector” encompasses any genetic element that is capable of replication when associated with the proper control elements and that can transfer genetic material to cells. A vector can include, but is not limited to, a cloning vector, an expression vector, a plasmid, phage, transposon, cosmid, artificial chromosome, virus, virion, etc.

[0139] In some embodiments of any of the aspects, the vector is selected from the group consisting of a plasmid, a cosmid, and a viral vector.

[0140] An expression vector is a vector that directs expression of an RNA or polypeptide (e.g., a bluebuck polypeptide) from nucleic acid sequences contained therein linked to transcriptional regulatory sequences on the vector. The sequences expressed will often, but not necessarily, be heterologous to the cell; a bluebuck gene introduced to a viable cell is heterologous to the cell. An expression vector may comprise additional elements, for example, the expression vector may have two replication systems, thus allowing it to be maintained in two organisms, for example in animal cells for expression and in a prokaryotic host for cloning and amplification. “Expression” refers to the cellular processes involved in producing RNA and proteins and as appropriate, secreting proteins, including where applicable, but not limited to, for example, transcription, transcript processing, translation and protein folding, modification and processing. “Expression products” include RNA transcribed from a gene, and polypeptides obtained by translation of mRNA transcribed from a gene.

[0141] In some embodiments, a vector is capable of driving expression of one or more sequences in a mammalian cell; i.e., the vector is a mammalian expression vector. Examples of mammalian expression vectors include pCDM8 (Seed, 1987. Nature 329:840) and pMT2PC (Kaufman, et al., 1987. EMBO J. 6:187-195). When used in mammalian cells, the expression vector's control functions are typically provided by one or more regulatory elements. For example, commonly used promoters are derived from polyoma, adenovirus 2, cytomegalovirus, simian virus 40, and others disclosed herein and known in the art. For other suitable expression systems for both prokaryotic and eukaryotic cells see, e.g., Chapters 16 and 17 of Sambrook, et al., MOLECULAR CLONING: A LABORATORY MANUAL. 2nd ed., Cold Spring Harbor Laboratory, Cold Spring Harbor Laboratory Press, Cold Spring Harbor, N.Y., 1989.

### Methods of Inhibiting or Editing the Expression of an Endogenous Gene

[0142] In some embodiments of any of the disclosed aspects, the cell described herein does not express an endogenous homologue of the at least one bluebuck gene variant described herein. In another embodiment of any of the aspects, the cell is edited to inhibit expression of an endogenous homologue of the at least one bluebuck gene variant. In another embodiment of any of the aspects, the cell is edited to alter the regulatory and/or coding region to incorporate substitutions so that the endogenous homologue resembles the at least one bluebuck gene variant.

[0143] In another embodiment of any of the aspects, the non-bluebuck homologue of the exogenous nucleic acid sequence has been deleted or inactivated.

[0144] It is contemplated herein that when one or more bluebuck gene variants are delivered to the host cell(s) it can be advantageous to modify the endogenous non-bluebuck homologue of the one or more genes to render the endogenous gene or genes non-functional. It is further contemplated herein that if two or more bluebuck genes are delivered to the host cell, one or both of the endogenous host cell genes would be altered. Thus, in this context, the host cell can comprise at least one non-functional endogenous homologue to the corresponding bluebuck gene.

[0145] In the context of antelope cells, the antelope homologue(s) of the one or more bluebuck genes to be expressed would be altered, deleted, or inhibited such that only the one or more bluebuck genes is/are expressed by the cell. This can be achieved, for example, by standard gene editing of target sequences. It is also contemplated that rather than simply inactivating the endogenous gene, wholesale replacement of the endogenous gene, e.g., via homologous recombination, or via selective editing of the non-bluebuck homologue gene(s) to encode and express the bluebuck variant gene sequence(s) could also be performed.

[0146] The target sequence can be determined by methods known in the art. For example, sequence alignment tools can be used to compare the bluebuck nucleic acid sequences to those in the host organism, e.g., using NCBI Basic Local Alignment Sequence Tool (BLAST), OrthoMaM, Ensembl and/or Megalign (DNASTAR) software. Those skilled in the art can determine appropriate parameters for aligning sequences, including any algorithms needed to achieve maximal alignment over the full length of the sequences being compared.

[0147] Methods of inhibiting gene function in a host cell are known in the art. Non-limiting examples of gene knockdown, inhibition, and alteration include, e.g., gene editing enzymes, Transcription Activator-Like Effectors Nucleases (TALENS), and inhibitory nucleic acids. Exemplary embodiments of types of inhibitory nucleic acids can include, e.g., siRNA, shRNA, miRNA, and/or a miRNA, which are known in the art. One of ordinary skill in the art can design and test an inhibitory agent that targets the endogenous homologue of a bluebuck gene variant described herein.

[0148] Methods of preparing and delivering gene editing systems are described, e.g., in WO2015/013583 A2; U.S. Pat. No. 10,640,789 B2; US Publication No. US2019/0367948 A1; US Publication No. 2017/0266320 A1; US Publication No. 2018/0171361 A1; US Publication No. 2016/017546 2 A1; and US Publication No. 2018/0195089 A1, the contents of each of which are incorporated herein by reference in their entirety.

### Methods of Generating Transgenic Animals

[0149] The disclosure also provides for methods of generating a transgenic animal with the gray/blue coat color associated with the bluebuck antelope (Hippotragus leucophaeus). In certain embodiments, the methods can be used to generate the transgenic animals described above.

[0150] One embodiment of the disclosure is directed to methods of creating a transgenic animal with gray/blue coat color and/or a transgenic animal with an altered melanin biosynthesis pathway of a bluebuck by introducing in a cell from a source animal (such as a roan antelope (Hippotragus equinus) or a sable antelope (Hippotragus niger)) at least one or more bluebuck (Hippotragus leucophaeus) gene variants associated with gray/blue coat color and/or melanogenesis and then utilizing the recombinant cell to produce a transgenic animal that has a gray/blue coat color and/or a transgenic animal with the melanogenesis of a bluebuck. The one or more bluebuck gene variants associated with gray/blue coat color and/or melanogenesis are selected from an ABCB6 variant, an ACE2 variant, an AP3B1 variant, an AP3D1 variant, an ASIP variant, an ATP7A variant, a BCL2 variant, a BLOC1S2 variant, a BLOC1S3 variant, a BLOC1S4 variant, a BLOC1S5 variant, a BRAF variant, a DCT variant, a DCTN1 variant, a DCTN2 variant, a DOCK7 variant, a DSTYK variant, a DTNBP1 variant, an EED variant, a FIG. 4 variant, a GGT1 variant, a GPR143 variant, a HPS1 variant, a HPS3 variant, a HPS4 variant, a HPS5 variant, a HPS6 variant, a LYST variant, a MBTPS1 variant, a MCOLN3 variant, a MFSD12 variant, a MITF variant, a MKLN1 variant, a MLANA variant, a MPLH variant, a MREG variant, a MYO5A variant, a NOTCH1 variant, a NOTCH2 variant, an OCA2 variant, a PAH variant, a PIKFYVE variant, a PMEL variant, a RAB27A variant, a RAB38 variant, a RABGGTA variant, a RAF1 variant, a SLC24A5 variant, a SLC45A2 variant, a SLC7A11 variant, a SNAI2 variant, a SPAG9 variant, a TPCN2 variant, a TYR variant, a TYRP1 variant, a VAC14 variant, a VPS33A variant, a YKT6 variant, an AP3D1 variant, an ASCC2 variant, an ATP6V0A2 variant, a CCDC53 variant, a CD72 variant, a CDK12 variant, a CHD8 variant, a COMMD5 variant, a DSCR3 variant, an EP300 variant, a FIG. 4 variant, a FRYL variant, a HDAC4 variant, a HNRNPA2B1L1 variant, a HNRNPA2B1L2 variant, a HNRNPA2B1L3 variant, a HNRNPA2B1L4 variant, a HPS3 variant, a HPS4 variant, a HPS5 variant, a HPS6 variant, an INTS8 variant, a LYST variant, a NCOR1 variant, a RAB9A variant, a RB1 variant, a SCAF4 variant, a SEC31A variant, a SIAH1 variant, a SMG7 variant, a SNX13L1 variant, a SNX13L2 variant, a TBC1D5 variant, and a WDFY1 variant.

[0151] In one embodiment, the method of creating a transgenic animal with gray/blue coat color and/or an altered melanin biosynthesis pathway of a bluebuck includes: introducing into the cell at least one or more bluebuck (Hippotragus leucophaeus) gene variants associated with gray/blue coat color and/or melanogenesis, wherein the one or more bluebuck gene variants are selected from an ABCB6 variant, an ACE2 variant, an AP3B1 variant, an AP3D1 variant, an ASIP variant, an ATP7A variant, a BCL2 variant, a BLOC1S2 variant, a BLOC1S3 variant, a BLOC1S4 variant, a BLOC1S5 variant, a BRAF variant, a DCT variant, a DCTN1 variant, a DCTN2 variant, a DOCK7 variant, a DSTYK variant, a DTNBP1 variant, an EED variant, a FIG. 4 variant, a GGT1 variant, a GPR143 variant, a HPS1 variant, a HPS3 variant, a HPS4 variant, a HPS5 variant, a HPS6 variant, a LYST variant, a MBTPS1 variant, a MCOLN3 variant, a MFSD12 variant, a MITF variant, a MKLN1 variant, a MLANA variant, a MPLH variant, a MREG variant, a MYO5A variant, a NOTCH1 variant, a NOTCH2 variant, an OCA2 variant, a PAH variant, a PIKFYVE variant, a PMEL variant, a RAB27A variant, a RAB38 variant, a RABGGTA variant, a RAF1 variant, a SLC24A5 variant, a SLC45A2 variant, a SLC7A11 variant, a SNAI2 variant, a SPAG9 variant, a TPCN2 variant, a TYR variant, a TYRP1 variant, a VAC14 variant, a VPS33A variant, a YKT6 variant, an AP3D1 variant, an ASCC2 variant, an ATP6V0A2 variant, a CCDC53 variant, a CD72 variant, a CDK12 variant, a CHD8 variant, a COMMD5 variant, a DSCR3 variant, an EP300 variant, a FIG. 4 variant, a FRYL variant, a HDAC4 variant, a HNRNPA2B1L1 variant, a HNRNPA2B1L2 variant, a HNRNPA2B1L3 variant, a HNRNPA2B1L4 variant, a HPS3 variant, a HPS4 variant, a HPS5 variant, a HPS6 variant, an INTS8 variant, a LYST variant, a NCOR1 variant, a RAB9A variant, a RB1 variant, a SCAF4 variant, a SEC31A variant, a SIAH1 variant, a SMG7 variant, a SNX13L1 variant, a SNX13L2 variant, a TBC1D5 variant, and a WDFY1 variant; and utilizing the recombinant cell to produce a transgenic animal that has a gray/blue coat color and/or an altered melanin biosynthesis pathway of a bluebuck.

[0152] In another embodiment, the method of creating a transgenic animal with gray/blue coat color and/or an altered melanin biosynthesis pathway of a bluebuck includes: obtaining a cell from the animal; introducing into the cell at least one bluebuck gene variant associated with gray/blue coat color and/or melanogenesis, wherein the one or more bluebuck gene variants are selected from an ABCB6 variant, an ACE2 variant, an AP3B1 variant, an AP3D1 variant, an ASIP variant, an ATP7A variant, a BCL2 variant, a BLOC1S2 variant, a BLOC1S3 variant, a BLOC1S4 variant, a BLOC1S5 variant, a BRAF variant, a DCT variant, a DCTN1 variant, a DCTN2 variant, a DOCK7 variant, a DSTYK variant, a DTNBP1 variant, an EED variant, a FIG. 4 variant, a GGT1 variant, a GPR143 variant, a HPS1 variant, a HPS3 variant, a HPS4 variant, a HPS5 variant, a HPS6 variant, a LYST variant, a MBTPS1 variant, a MCOLN3 variant, a MFSD12 variant, a MITF variant, a MKLN1 variant, a MLANA variant, a MPLH variant, a MREG variant, a MYO5A variant, a NOTCH1 variant, a NOTCH2 variant, an OCA2 variant, a PAH variant, a PIKFYVE variant, a PMEL variant, a RAB27A variant, a RAB38 variant, a RABGGTA variant, a RAF1 variant, a SLC24A5 variant, a SLC45A2 variant, a SLC7A11 variant, a SNAI2 variant, a SPAG9 variant, a TPCN2 variant, a TYR variant, a TYRP1 variant, a VAC14 variant, a VPS33A variant, a YKT6 variant, an AP3D1 variant, an ASCC2 variant, an ATP6V0A2 variant, a CCDC53 variant, a CD72 variant, a CDK12 variant, a CHD8 variant, a COMMD5 variant, a DSCR3 variant, an EP300 variant, a FIG. 4 variant, a FRYL variant, a HDAC4 variant, a HNRNPA2B1L1 variant, a HNRNPA2B1L2 variant, a HNRNPA2B1L3 variant, a HNRNPA2B1L4 variant, a HPS3 variant, a HPS4 variant, a HPS5 variant, a HPS6 variant, an INTS8 variant, a LYST variant, a NCOR1 variant, a RAB9A variant, a RB1 variant, a SCAF4 variant, a SEC31A variant, a SIAH1 variant, a SMG7 variant, a SNX13L1 variant, a SNX13L2 variant, a TBC1D5 variant, and a WDFY1 variant; and utilizing the recombinant cell to produce a transgenic animal, whereby the transgenic animal has a gray/blue coat color and/or an altered melanin biosynthesis pathway of a bluebuck.

[0153] The number of bluebuck gene variants introduced into the cell may vary. In certain embodiments, 2, 3, 4, 5, 6, 7, 8, 9, 10, 15, 20, 25, 30, 35, 40, 45, 50, 55, 60, 65, 70, 75, 80, 85, 90, 95, 100, 101, 102 (or any number in between) bluebuck gene variants are introduced into the cell. In some embodiments, the bluebuck gene variant comprises one or more substitutions within the regulatory region and/or within the coding region of the gene as compared to a corresponding reference genome, wherein the corresponding reference genome is the genome of the cell prior to the one or more substitutions.

[0154] In some embodiments, the transgenic animal further also includes: a loss-of-function ASIP variant; a DEFB103 missense variant; a loss-of-function MLPH variant; a PMEL missense variant; a loss-of-function LYST variant; and/or a loss-of-function SLC45A2 variant. In other embodiments, the transgenic animal further includes a bluebuck gene variant associated with altered facial pattern selected from an ADAMTS20 variant, a BMP4 variant, a DOCK7 variant, an EDN3 variant, an EDNRB variant, an ETS1L1 variant, an ETS1L2 variant, a FOXD3 variant, a HDAC1 variant, an IRF1 variant, a KIT variant, a KITLG variant, a MCOLN3 variant, a MITF variant, a PAX3 variant, a SNAI2 variant, a SOX10 variant, a SOX2 variant, a TRPM1 variant, a WNT3A variant, and a ZFHX4 variant.

[0155] Another embodiment of the disclosure is directed to methods of creating a transgenic animal with gray/blue coat color by introducing into a cell from a source animal (such as a roan antelope (Hippotragus equinus) or a sable antelope (Hippotragus niger)) at least one variant selected from: a loss-of-function ASIP variant; a DEFB103 missense variant; a loss-of-function MLPH variant; a PMEL missense variant; a loss-of-function LYST variant; and/or a loss-of-function SLC45A2 variant, and thereby produce a recombinant cell. The recombinant cell is then used to produce a transgenic animal having a gray/blue coat color.

[0156] In certain embodiments, the methods of creating a transgenic animal with gray/blue coat color include: introducing into an animal cell at least one bluebuck gene variant associated with gray/blue coat color selected from: a loss-of-function ASIP variant; a DEFB103 missense variant; a loss-of-function MLPH variant; a PMEL missense variant; a loss-of-function LYST variant; and/or a loss-of-function SLC45A2 variant, whereby introducing the at least one bluebuck gene variant produces a recombinant cell; and then utilizing the recombinant cell to produce a transgenic animal having a gray/blue coat color.

[0157] In other embodiments, the methods of creating a transgenic animal with gray/blue coat color include (a) obtaining a cell from the animal; (b) introducing into the cell at least one variant selected from: a loss-of-function ASIP variant; a DEFB103 missense variant; a loss-of-function MLPH variant; a PMEL missense variant; a loss-of-function LYST variant; and/or a loss-of-function SLC45A2 variant, whereby introducing the at least one variant produces a recombinant cell; and (c) utilizing the recombinant cell to produce a transgenic animal having a gray/blue coat color.

[0158] In certain embodiments, the transgenic animal further includes a bluebuck gene variant associated with altered facial pattern selected from an ADAMTS20 variant, a BMP4 variant, a DOCK7 variant, an EDN3 variant, an EDNRB variant, an ETS1L1 variant, an ETS1L2 variant, a FOXD3 variant, a HDAC1 variant, an IRF1 variant, a KIT variant, a KITLG variant, a MCOLN3 variant, a MITF variant, a PAX3 variant, a SNAI2 variant, a SOX10 variant, a SOX2 variant, a TRPM1 variant, a WNT3A variant, and a ZFHX4 variant.

[0159] Yet another embodiment of the disclosure is directed to methods of creating a transgenic animal with an altered facial pattern by introducing into cell from a source animal (such as a roan antelope (Hippotragus equinus) or a sable antelope (Hippotragus niger)) a bluebuck gene variant associated with altered facial pattern selected from an ADAMTS20 variant, a BMP4 variant, a DOCK7 variant, an EDN3 variant, an EDNRB variant, an ETS1L1 variant, an ETS1L2 variant, a FOXD3 variant, a HDAC1 variant, an IRF1 variant, a KIT variant, a KITLG variant, a MCOLN3 variant, a MITF variant, a PAX3 variant, a SNAI2 variant, a SOX10 variant, a SOX2 variant, a TRPM1 variant, a WNT3A variant, and a ZFHX4 variant. The recombinant cell having these features is then used to produce a transgenic animal having an altered facial pattern.

[0160] In some embodiments, the methods for creating a transgenic animal with an altered facial pattern include: introducing into an animal cell a bluebuck gene variant associated with altered facial pattern selected from an ADAMTS20 variant, a BMP4 variant, a DOCK7 variant, an EDN3 variant, an EDNRB variant, an ETS1L1 variant, an ETS1L2 variant, a FOXD3 variant, a HDAC1 variant, an IRF1 variant, a KIT variant, a KITLG variant, a MCOLN3 variant, a MITF variant, a PAX3 variant, a SNAI2 variant, a SOX10 variant, a SOX2 variant, a TRPM1 variant, a WNT3A variant, and a ZFHX4 variant; and utilizing the recombinant cell to produce a transgenic animal having an altered facial pattern.

[0161] In other embodiments, the methods for creating a transgenic animal with an altered facial pattern include: obtaining a cell from the animal; introducing into the cell a bluebuck gene variant associated with altered facial pattern selected from an ADAMTS20 variant, a BMP4 variant, a DOCK7 variant, an EDN3 variant, an EDNRB variant, an ETS1L1 variant, an ETS1L2 variant, a FOXD3 variant, a HDAC1 variant, an IRF1 variant, a KIT variant, a KITLG variant, a MCOLN3 variant, a MITF variant, a PAX3 variant, a SNAI2 variant, a SOX10 variant, a SOX2 variant, a TRPM1 variant, a WNT3A variant, and a ZFHX4 variant; and utilizing the recombinant cell to produce a transgenic animal, whereby the transgenic animal has an altered facial pattern.

[0162] In certain embodiments of any of the methods of creating a transgenic animal, the transgenic animal fails to express an endogenous homologue of at least one of ABCB6, ACE2, AP3B1, AP3D1, ASIP, ATP7A, BCL2, BLOC1S2, BLOC1S3, BLOC1S4, BLOC1S5, BRAF, DCT, DCTN1, DCTN2, DOCK7, DSTYK, DTNBP1, EED, FIG. 4, GGT1, GPR143, HPS1, HPS3, HPS4, HPS5, HPS6, LYST, MBTPS1, MCOLN3, MFSD12, MITF, MKLN1, MLANA, MPLH, MREG, MYO5A, NOTCH1, NOTCH2, OCA2, PAH, PIKFYVE, PMEL, RAB27A, RAB38, RABGGTA, RAF1, SLC24A5, SLC45A2, SLC7A11, SNAI2, SPAG9, TPCN2, TYR, TYRP1, VAC14, VPS33A, YKT6, ASCC2, ATP6V0A2, CCDC53, CD72, CDK12, CHD8, COMMD5, DSCR3, EP300, FRYL, HDAC4, HNRNPA2B1L1, HNRNPA2B1L2, HNRNPA2B1L3, HNRNPA2B1L4, INTS8, NCOR1, RAB9A, RBI, SCAF4, SEC31A, SIAH1, SMG7, SNX13L1, SNX13L2, TBC1D5, WDFY1, ADAMTS20, BMP4, EDN3, EDNRB, ETS1L1, ETS1L2, FOXD3, HDAC1, IRF1, KIT, KITLG, PAX3, SOX10, SOX2, TRPM1, WNT3A, and ZFHX4. In some embodiments, the transgenic animal fails to express the endogenous homologue of 2, 3, 4, 5, 6, 7, 8, 9, 10, 15, 20, 25, 30, 35, 40, 45, 50, 55, 60, 65, 70, 75, 80, 85, 90, 95, 100, 101, 102 (or any number in between) of ABCB6, ACE2, AP3B1, AP3D1, ASIP, ATP7A, BCL2, BLOC1S2, BLOC1S3, BLOC1S4, BLOC1S5, BRAF, DCT, DCTN1, DCTN2, DOCK7, DSTYK, DTNBP1, EED, FIG. 4, GGT1, GPR143, HPS1, HPS3, HPS4, HPS5, HPS6, LYST, MBTPS1, MCOLN3, MFSD12, MITF, MKLN1, MLANA, MPLH, MREG, MYO5A, NOTCH1, NOTCH2, OCA2, PAH, PIKFYVE, PMEL, RAB27A, RAB38, RABGGTA, RAF1, SLC24A5, SLC45A2, SLC7A11, SNAI2, SPAG9, TPCN2, TYR, TYRP1, VAC14, VPS33A, YKT6, ASCC2, ATP6V0A2, CCDC53, CD72, CDK12, CHD8, COMMD5, DSCR3, EP300, FRYL, HDAC4, HNRNPA2B1L1, HNRNPA2B1L2, HNRNPA2B1L3, HNRNPA2B1L4, INTS8, NCOR1, RAB9A, RBI, SCAF4, SEC31A, SIAH1, SMG7, SNX13L1, SNX13L2, TBC1D5, WDFY1, ADAMTS20, BMP4, EDN3, EDNRB, ETS1L1, ETS1L2, FOXD3, HDAC1, IRF1, KIT, KITLG, PAX3, SOX10, SOX2, TRPM1, WNT3A, and ZFHX4.

[0163] A variety of cells may be used in the methods of creating a transgenic animal. In one embodiment, the cell is a stem cell. In another embodiment, the cell is a stem cell selected from an induced stem cell, an embryonic stem (ES) cell, a mesenchymal stem cell (MSC), or combinations thereof. In an alternate embodiment, the cell is a reprogrammed cell. In yet another embodiment, the cell is a fibroblast cell or a mesenchymal cell. In a further embodiment, the cell is an endothelial progenitor cell (EPC) or a pericyte. In a further embodiment, the cell is selected from the group consisting of a nerve cell, a cartilage cell, a bone cell, a muscle cell, a fat cell, and an epidermal cell.

[0164] In certain embodiments of any of the methods of creating a transgenic animal, the animal is an antelope. In other embodiments, the antelope is selected from a roan antelope (Hippotragus equinus) or a sable antelope (Hippotragus niger).

[0165] The disclosure also includes a transgenic animal made by these methods.

### EMBODIMENTS

[0166] The invention provides also the following non-limiting embodiments.
[0167] Embodiment 1 is a transgenic animal comprising at least one bluebuck (Hippotragus leucophaeus) gene variant associated with gray/blue coat color and/or melanogenesis and/or at least one bluebuck variant associated with altered facial pattern.
[0168] Embodiment 2 is the transgenic animal of embodiment 1, wherein the at least one bluebuck gene variant associated with gray/blue coat color is selected from the group consisting of an ABCB6 variant, an ACE2 variant, an AP3B1 variant, an AP3D1 variant, an ASIP variant, an ATP7A variant, a BCL2 variant, a BLOC1S2 variant, a BLOC1S3 variant, a BLOC1S4 variant, a BLOC1S5 variant, a BRAF variant, a DCT variant, a DCTN1 variant, a DCTN2 variant, a DOCK7 variant, a DSTYK variant, a DTNBP1 variant, an EED variant, a FIG. 4 variant, a GGT1 variant, a GPR143 variant, a HPS1 variant, a HPS3 variant, a HPS4 variant, a HPS5 variant, a HPS6 variant, a LYST variant, a MBTPS1 variant, a MCOLN3 variant, a MFSD12 variant, a MITF variant, a MKLN1 variant, a MLANA variant, a MPLH variant, a MREG variant, a MYO5A variant, a NOTCH1 variant, a NOTCH2 variant, an OCA2 variant, a PAH variant, a PIKFYVE variant, a PMEL variant, a RAB27A variant, a RAB38 variant, a RABGGTA variant, a RAF1 variant, a SLC24A5 variant, a SLC45A2 variant, a SLC7A11 variant, a SNAI2 variant, a SPAG9 variant, a TPCN2 variant, a TYR variant, a TYRP1 variant, a VAC14 variant, a VPS33A variant, and a YKT6 variant.
[0169] Embodiment 2a is the transgenic animal of embodiment 1 or 2, wherein the at least one bluebuck gene variant associated with melanogenesis is selected from the group consisting of an AP3D1 variant, an ASCC2 variant, an ATP6V0A2 variant, a CCDC53 variant, a CD72 variant, a CDK12 variant, a CHD8 variant, a COMMD5 variant, a DSCR3 variant, an EP300 variant, a FIG. 4 variant, a FRYL variant, a HDAC4 variant, a HNRNPA2B1L1 variant, a HNRNPA2B1L2 variant, a HNRNPA2B1L3 variant, a HNRNPA2B1L4 variant, a HPS3 variant, a HPS4 variant, a HPS5 variant, a HPS6 variant, an INTS8 variant, a LYST variant, a NCOR1 variant, a RAB9A variant, a RB1 variant, a SCAF4 variant, a SEC31A variant, a SIAH1 variant, a SMG7 variant, a SNX13L1 variant, a SLX13L2 variant, a TBC1D5 variant, and a WDFY1 variant.
[0170] Embodiment 3 is the transgenic animal of any one of embodiments 1-2a, wherein the at least one bluebuck gene variant associated with altered facial pattern is selected from the group consisting of an ADAMTS20 variant, a BMP4 variant, a DOCK7 variant, an EDN3 variant, an EDNRB variant, an ETS1L1 variant, an ETS1L2 variant, a FOXD3 variant, a HDAC1 variant, an IRF1 variant, a KIT variant, a KITLG variant, a MCOLN3 variant, a MITF variant, a PAX3 variant, a SNAI2 variant, a SOX10 variant, a SOX2 variant, a TRPM1 variant, a WNT3A variant, and a ZFHX4 variant.
[0171] Embodiment 4 is the transgenic animal of embodiment 1, wherein the bluebuck gene variant comprises at least one change in the nucleotide sequence of the gene.
[0172] Embodiment 5 is the transgenic animal of embodiment 4, wherein the change in the nucleotide sequence is a substitution, an insertion, a deletion, or a combination thereof.
[0173] Embodiment 6 is the transgenic animal of embodiment 5, wherein the substitution, the insertion, the deletion, or a combination thereof is in a 5′ untranslated region of the gene, an intron of the gene, an exon of the gene, a 3′ untranslated region of the gene, or a combination thereof.
[0174] Embodiment 7 is the transgenic animal of embodiment 5, wherein the substitution, the insertion, the deletion, or a combination thereof is in a regulatory region of the gene.
[0175] Embodiment 8 is the transgenic animal of embodiment 2, wherein the bluebuck gene variant associated with gray/blue coat color comprises a nucleotide sequence having at least 80%, at least 85%, at least 90%, or at least 95% identity to a nucleotide sequence selected from the group consisting of SEQ ID NOs: 45-102 and combinations thereof.
[0176] Embodiment 9 is the transgenic animal of embodiment 2, wherein the bluebuck gene variant associated with gray/blue coat color comprises a nucleotide sequence selected from the group consisting of SEQ ID NOs: 147-204 and combinations thereof.
[0177] Embodiment 9a is the transgenic animal of embodiment 2a, wherein the bluebuck gene variant associated with melanogenesis comprises a nucleotide sequence having at least 80%, at least 85%, at least 90%, or at least 95% identity to a nucleotide sequence selected from the group consisting of SEQ ID NOs: 48, 64, 68-72, 120-146, and combinations thereof.
[0178] Embodiment 9b is the transgenic animal of embodiment 2a, wherein the bluebuck gene variant associated with melanogenesis comprises a nucleotide sequence selected from the group consisting of SEQ ID NOs: 150, 166, 170-174, 222-248, and combinations thereof.
[0179] Embodiment 10 is the transgenic animal of embodiment 3, wherein the bluebuck gene variant associated with altered facial pattern comprises a nucleotide sequence having at least 80%, at least 85%, at least 90%, or at least 95% identity to a nucleotide sequence selected from the group consisting of SEQ ID NOs: 60, 74, 76, 95, 103-119, and combinations thereof.
[0180] Embodiment 11 is the transgenic animal of embodiment 3, wherein the bluebuck gene variant associated with altered facial pattern comprises a nucleotide sequence selected from the group consisting of SEQ ID NOs: 162, 176, 178, 197, 205-221, and combinations thereof.
[0181] Embodiment 12 is the transgenic animal of embodiment 2, wherein the ASIP variant, the LYST variant, the SLC45A2 variant, the BCL2 variant, the DCT variant, and/or the MYO5A variant is in a coding region.
[0182] Embodiment 13 is the transgenic animal of embodiment 12, wherein:
[0183] (a) the ASIP variant in the coding region is selected from an isoleucine substitution for valine at amino acid position 39; and/or a tryptophan substitution for arginine at amino acid position 10, wherein the amino acid position corresponds to SEQ ID NO:2;
[0184] (b) the LYST variant in the coding region is selected from a tyrosine substitution for a cysteine at amino acid position 1352, and/or an arginine substitution for a valine at amino acid position 1079, wherein the amino acid position corresponds to SEQ ID NO:10;
[0185] (c) the SLC45A2 variant in the coding region is selected from a valine substitution for a methionine at amino acid position 475, and/or a cysteine substitution for an arginine at amino acid position 59, wherein the amino acid position corresponds to SEQ ID NO: 12;
[0186] (d) the BCL2 variant in the coding region is selected from a threonine substitution for an asparagine at amino acid position 139, and/or an aspartic acid substitution for a glycine at amino acid position 127, wherein the amino acid position corresponds to SEQ ID NO:14;
[0187] (e) the DCT variant in the coding region is selected from a phenylalanine substitution for a leucine at amino acid position 240, and/or an arginine substitution for a tryptophan at amino acid position 22, wherein the amino acid position corresponds to SEQ ID NO:16; and/or
[0188] (f) the MYO5A variant in the coding region is selected from a serine substitution for a proline at amino acid position 1321, and/or a serine substitution for an asparagine at amino acid position 372, wherein the amino acid position corresponds to SEQ ID NO:20.
[0189] Embodiment 14 is the transgenic animal of embodiment 2, wherein the ASIP variant, the MLPH variant, and/or the LYST variant is in a regulatory region.
[0190] Embodiment 15 is the transgenic animal of embodiment 14, wherein:
[0191] (a) the ASIP variant in the regulatory region is selected from an adenine substitution for a guanine at nucleotide position 919, a thymine substitution for a guanine at nucleotide position 1530, a thymine substitution for an adenine at nucleotide position 1578, a thymine substitution for a cytosine at nucleotide position 3703, an adenine substitution for a guanine at nucleotide position 3892, a cytosine substitution for a thymine at nucleotide position 4274, a thymine substitution for an adenine at nucleotide position 4370, a thymine substitution for a cytosine at nucleotide position 4807, a guanine substitution for an adenine at nucleotide position 4821, and/or an adenine substitution for a guanine at nucleotide position 4905, wherein the nucleotide position corresponds to SEQ ID NO:25;
[0192] (b) the MLPH variant in the regulatory region is selected from a cytosine substitution for a guanine at nucleotide position 1238, an adenine substitution for a thymine at nucleotide position 1299; an adenine substitution for a cytosine at nucleotide position 1488, an adenine substitution for a guanine at nucleotide position 1526, a guanine substitution for a thymine at nucleotide position 1618, an adenine substitution for a guanine at nucleotide position 1653, an adenine substitution for a guanine at nucleotide position 1672; a thymine substitution for a cytosine at nucleotide position 1718, an adenine substitution for a guanine at nucleotide position 1837, a guanine substitution for an adenine at nucleotide position 1949, an adenine substitution for a cytosine at nucleotide position 2472, a guanine substitution for an adenine at nucleotide position 2675, a thymine substitution for a cytosine at nucleotide position 2691, a guanine substitution for a thymine at nucleotide position 2900, a guanine substitution for an adenine at nucleotide position 3029, a guanine substitution for an adenine at nucleotide position 3090, a guanine substitution for a thymine at nucleotide position 3272, a cytosine substitution for a thymine at nucleotide position 3380, a cytosine substitution for a thymine at nucleotide position 3449, a cytosine substitution for a thymine at nucleotide position 3463, an adenine substitution for a guanine at nucleotide position 3513, a cytosine substitution for a thymine at nucleotide position 3559, a cytosine substitution for a thymine at nucleotide position 3581, a guanine substitution for a cytosine at nucleotide position 4352, a guanine substitution for a cytosine at nucleotide position 4356, a guanine substitution for an adenine at nucleotide position 4552, a guanine substitution for an adenine at nucleotide position 4690, a guanine substitution for an adenine at nucleotide position 4856, a cytosine substitution for a thymine at nucleotide position 4888, and/or a thymine substitution for a cytosine at nucleotide position 4990, wherein the nucleotide position corresponds to SEQ ID NO:27; and/or
[0193] (c) the LYST variant in the regulatory region is selected from a cytosine substitution for a guanine at nucleotide position 48, a cytosine substitution for an adenine at nucleotide position 67, a guanine substitution for a cytosine at nucleotide position 71, a thymine substitution for a cytosine at nucleotide position 247, a cytosine substitution for a thymine at nucleotide position 254, a guanine substitution for an adenine at nucleotide position 486, a thymine substitution for a cytosine at nucleotide position 883, a cytosine substitution for an adenine at nucleotide position 1002, an adenine substitution for a guanine at nucleotide position 1105, a thymine substitution for a cytosine at nucleotide position 1505, an adenine substitution for a guanine at nucleotide position 2350, a thymine substitution for a cytosine at nucleotide position 2612, a thymine substitution for a cytosine at nucleotide position 2661, a cytosine substitution for a thymine at nucleotide position 2668, a cytosine substitution for a thymine at nucleotide position 2818, a cytosine substitution for a guanine at nucleotide position 2873, a cytosine substitution for a guanine at nucleotide position 3223, an adenine substitution for a guanine at nucleotide position 3257, a thymine substitution for a cytosine at nucleotide position 4347, a cytosine substitution for a thymine at nucleotide position 4420, a thymine substitution for a cytosine at nucleotide position 4586, a cytosine substitution for a thymine at nucleotide position 4598, and/or a thymine substitution for a cytosine at nucleotide position 4619, wherein the nucleotide position corresponds to SEQ ID NO:29.
[0194] Embodiment 16 is the transgenic animal of embodiment 3, wherein the MITF variant and the KIT variant is in a regulatory region.
[0195] Embodiment 17 is the transgenic animal of any one of embodiments 16, wherein
[0196] (a) the MITF variant in the regulatory region is selected from a thymine substitution for a cytosine at nucleotide position 514, an adenine substitution for a guanine at nucleotide position 6733, a thymine substitution for an adenine at nucleotide position 21322, an adenine substitution for a thymine at nucleotide position 29009, a thymine substitution for a cytosine at nucleotide position 37136, an adenine substitution for a thymine adenine at nucleotide position 48433, a thymine substitution for a guanine at nucleotide position 50738, a thymine substitution for a guanine at nucleotide position 52771, a thymine substitution for an adenine at nucleotide position 53986, a guanine substitution for an adenine at nucleotide position 85470, an adenine substitution for a guanine at nucleotide position 85945, a guanine substitution for a thymine at nucleotide position 89390, an adenine substitution for a guanine at nucleotide position 91717, a cytosine substitution for an adenine at nucleotide position 110490, an adenine substitution for a guanine at nucleotide position 114903, an adenine substitution for a guanine at nucleotide position 116734, an adenine substitution for a guanine at nucleotide position 119238, a cytosine substitution for an adenine at nucleotide position 122369, an adenine substitution for a cytosine at nucleotide position 126635, an adenine substitution for a guanine at nucleotide position 129446, a thymine substitution for a guanine at nucleotide position 133318, an adenine substitution for a guanine at nucleotide position 138944, a cytosine substitution for a thymine at nucleotide position 150167, an adenine substitution for a cytosine at nucleotide position 187625, a guanine substitution for an adenine at nucleotide position 208940, an adenine substitution for a guanine at nucleotide position 211614, a guanine substitution for an adenine at nucleotide position 216326, and/or a cytosine substitution for a thymine at nucleotide position 217379, wherein the nucleotide position corresponds to SEQ ID NO:33; and/or
[0197] (b) the KIT variant in the regulatory region is selected from a thymine substitution for a cytosine at nucleotide position 268, a cytosine substitution for a guanine at nucleotide position 510, a guanine substitution for an adenine at nucleotide position 517, an adenine substitution for a guanine at nucleotide position 2108, a thymine substitution for a cytosine at nucleotide position 2401, an adenine substitution for a thymine at nucleotide position 2504, a cytosine substitution for a thymine at nucleotide position 2835, a guanine substitution for a adenine at nucleotide position 3365, a cytosine substitution for a thymine at nucleotide position 4044, an adenine substitution for a guanine at nucleotide position 4166, an adenine substitution for a cytosine at nucleotide position 4531, an adenine substitution for a guanine at nucleotide position 4569, a thymine substitution for a guanine at nucleotide position 4714, an adenine substitution for a cytosine at nucleotide position 4859, an adenine substitution for a guanine at nucleotide position 4892, and/or a guanine substitution for an adenine at nucleotide position 4907, wherein the nucleotide position corresponds to SEQ ID NO:31.
[0198] Embodiment 18 is the transgenic animal of any one of embodiments 1-17, wherein the transgenic animal further comprises at least one bluebuck gene variant associated with gray/blue coat color selected from:
[0199] (a) a loss-of-function agouti signaling protein (ASIP) variant;
[0200] (b) a defensin beta 103 (DEFB103) missense variant;
[0201] (c) a loss-of-function melanophilin (MLPH) variant;
[0202] (d) a premelanosome protein (PMEL) missense variant;
[0203] (e) a loss-of-function lysosomal trafficking regulator (LYST) variant; and/or
[0204] (f) a loss-of-function solute carrier family 45 member 2 (SLC45A2) variant.
[0205] Embodiment 19 is a transgenic animal comprising at least one bluebuck (Hippotragus leucophaeus) gene variant associated with gray/blue coat color selected from:
[0206] (a) a loss-of-function agouti signaling protein (ASIP) variant;
[0207] (b) a defensin beta 103 (DEFB103) missense variant;
[0208] (c) a loss-of-function melanophilin (MLPH) variant;
[0209] (d) a premelanosome protein (PMEL) missense variant;
[0210] (e) a loss-of-function lysosomal trafficking regulator (LYST) variant; and/or
[0211] (f) a loss-of-function solute carrier family 45 member 2 (SLC45A2) variant.
[0212] Embodiment 20 is the transgenic animal of embodiment 18 or 19, wherein:
[0213] (a) the loss-of-function ASIP variant comprises an insertion and deletion (indel);
[0214] (b) the DEFB103 missense variant comprises a glycine deletion at an amino acid position corresponding to position 23 of SEQ ID NO:4;
[0215] (c) the loss-of-function MLPH variant comprises an indel;
[0216] (d) the PMEL missense variant comprises a cysteine substitution for an arginine at an amino acid position corresponding to position 603 of SEQ ID NO:8;
[0217] (e) the loss-of-function LYST variant comprises an indel; and
[0218] (f) the loss-of-function SLC45A2 variant comprises an indel.
[0219] Embodiment 21 is the transgenic animal of any one of embodiments 1-19, wherein the animal comprises 2, 3, 4, 5, 6, 7, 8, 9, 10, 15, 20, 25, 30, 40, 50, 60, 70, 80, 90, 95, 100, 101, 102 (or any number in between) bluebuck gene variants.
[0220] Embodiment 22 is the transgenic animal of embodiment 21, wherein the bluebuck gene variant comprises one or more substitutions within the regulatory region and/or within the coding region of the gene as compared to a corresponding reference genome, wherein the corresponding reference genome is the genome of the animal prior to the one or more substitutions.
[0221] Embodiment 23 is the transgenic animal of embodiment 21, wherein the transgenic animal fails to express an endogenous homologue of at least one of ABCB6, ACE2, AP3B1, AP3D1, ASIP, ATP7A, BCL2, BLOC1S2, BLOC1S3, BLOC1S4, BLOC1S5, BRAF, DCT, DCTN1, DCTN2, DOCK7, DSTYK, DTNBP1, EED, FIG. 4, GGT1, GPR143, HPS1, HPS3, HPS4, HPS5, HPS6, LYST, MBTPS1, MCOLN3, MFSD12, MITF, MKLN1, MLANA, MPLH, MREG, MYO5A, NOTCH1, NOTCH2, OCA2, PAH, PIKFYVE, PMEL, RAB27A, RAB38, RABGGTA, RAF1, SLC24A5, SLC45A2, SLC7A11, SNAI2, SPAG9, TPCN2, TYR, TYRP1, VAC14, VPS33A, YKT6, ASCC2, ATP6V0A2, CCDC53, CD72, CDK12, CHD8, COMMD5, DSCR3, EP300, FRYL, HDAC4, HNRNPA2B1L1, HNRNPA2B1L2, HNRNPA2B1L3, HNRNPA2B1L4, INTS8, NCOR1, RAB9A, RBI, SCAF4, SEC31A, SIAH1, SMG7, SNX13L1, SNX13L2, TBC1D5, WDFY1, ADAMTS20, BMP4, EDN3, EDNRB, ETS1L1, ETS1L2, FOXD3, HDAC1, IRF1, KIT, KITLG, PAX3, SOX10, SOX2, TRPM1, WNT3A, and ZFHX4.
[0222] Embodiment 24 is the transgenic animal of embodiment 23 wherein the transgenic animal fails to express the endogenous homologue of 2, 3, 4, 5, 6, 7, 8, 9, 10, 15, 20, 25, 30, 35, 40, 45, 50, 55, 60, 65, 70, 75, 80, 85, 90, 95, 100, 101, 102 (or any number in between) of ABCB6, ACE2, AP3B1, AP3D1, ASIP, ATP7A, BCL2, BLOC1S2, BLOC1S3, BLOC1S4, BLOC1S5, BRAF, DCT, DCTN1, DCTN2, DOCK7, DSTYK, DTNBP1, EED, FIG. 4, GGT1, GPR143, HPS1, HPS3, HPS4, HPS5, HPS6, LYST, MBTPS1, MCOLN3, MFSD12, MITF, MKLN1, MLANA, MPLH, MREG, MYO5A, NOTCH1, NOTCH2, OCA2, PAH, PIKFYVE, PMEL, RAB27A, RAB38, RABGGTA, RAF1, SLC24A5, SLC45A2, SLC7A11, SNAI2, SPAG9, TPCN2, TYR, TYRP1, VAC14, VPS33A, YKT6, ASCC2, ATP6V0A2, CCDC53, CD72, CDK12, CHD8, COMMD5, DSCR3, EP300, FRYL, HDAC4, HNRNPA2B1L1, HNRNPA2B1L2, HNRNPA2B1L3, HNRNPA2B1L4, INTS8, NCOR1, RAB9A, RB1, SCAF4, SEC31A, SIAH1, SMG7, SNX13L1, SNX13L2, TBC1D5, WDFY1, ADAMTS20, BMP4, EDN3, EDNRB, ETS1L1, ETS1L2, FOXD3, HDAC1, IRF1, KIT, KITLG, PAX3, SOX10, SOX2, TRPM1, WNT3A, and ZFHX4.
[0223] Embodiment 25 is the transgenic animal of any one of embodiments 1-24, wherein the transgenic animal is an antelope.
[0224] Embodiment 26 is the transgenic animal of embodiment 25, wherein the transgenic animal is a roan antelope (Hippotragus equinus) cell or a sable antelope (Hippotragus niger).
[0225] Embodiment 27 is a recombinant host cell comprising at least one bluebuck (Hippotragus leucophaeus) gene variant associated with gray/blue coat color and/or melanogenesis and/or at least one bluebuck variant associated with altered facial pattern.
[0226] Embodiment 28 is the recombinant host cell of embodiment 27, wherein the at least one bluebuck gene variant associated with gray/blue coat color and/or melanogenesis is selected from an ABCB6 variant, an ACE2 variant, an AP3B1 variant, an AP3D1 variant, an ASIP variant, an ATP7A variant, a BCL2 variant, a BLOC1S2 variant, a BLOC1S3 variant, a BLOC1S4 variant, a BLOC1S5 variant, a BRAF variant, a DCT variant, a DCTN1 variant, a DCTN2 variant, a DOCK7 variant, a DSTYK variant, a DTNBP1 variant, an EED variant, a FIG. 4 variant, a GGT1 variant, a GPR143 variant, a HPS1 variant, a HPS3 variant, a HPS4 variant, a HPS5 variant, a HPS6 variant, a LYST variant, a MBTPS1 variant, a MCOLN3 variant, a MFSD12 variant, a MITF variant, a MKLN1 variant, a MLANA variant, a MPLH variant, a MREG variant, a MYO5A variant, a NOTCH1 variant, a NOTCH2 variant, an OCA2 variant, a PAH variant, a PIKFYVE variant, a PMEL variant, a RAB27A variant, a RAB38 variant, a RABGGTA variant, a RAF1 variant, a SLC24A5 variant, a SLC45A2 variant, a SLC7A11 variant, a SNAI2 variant, a SPAG9 variant, a TPCN2 variant, a TYR variant, a TYRP1 variant, a VAC14 variant, a VPS33A variant, a YKT6 variant, an AP3D1 variant, an ASCC2 variant, an ATP6V0A2 variant, a CCDC53 variant, a CD72 variant, a CDK12 variant, a CHD8 variant, a COMMD5 variant, a DSCR3 variant, an EP300 variant, a FIG. 4 variant, a FRYL variant, a HDAC4 variant, a HNRNPA2B1L1 variant, a HNRNPA2B1L2 variant, a HNRNPA2B1L3 variant, a HNRNPA2B1L4 variant, a HPS3 variant, a HPS4 variant, a HPS5 variant, a HPS6 variant, an INTS8 variant, a LYST variant, a NCOR1 variant, a RAB9A variant, a RB1 variant, a SCAF4 variant, a SEC31A variant, a SIAH1 variant, a SMG7 variant, a SNX13L1 variant, a SNX13L2 variant, a TBC1D5 variant, and a WDFY1 variant.
[0227] Embodiment 29 is the recombinant host cell of embodiment 27, wherein the at least one bluebuck gene variant associated with altered facial pattern is selected from the group consisting of an ADAMTS20 variant, a BMP4 variant, a DOCK7 variant, an EDN3 variant, an EDNRB variant, an ETS1L1 variant, an ETS1L2 variant, a FOXD3 variant, a HDAC1 variant, an IRF1 variant, a KIT variant, a KITLG variant, a MCOLN3 variant, a MITF variant, a PAX3 variant, a SNAI2 variant, a SOX10 variant, a SOX2 variant, a TRPM1 variant, a WNT3A variant, and a ZFHX4 variant.
[0228] Embodiment 30 is the recombinant host cell of embodiment 27, wherein the bluebuck gene variant comprises at least one change in the nucleotide sequence of the gene.
[0229] Embodiment 31 is the recombinant host cell of embodiment 27, wherein the change in the nucleotide sequence is a substitution, an insertion, a deletion, or a combination thereof.
[0230] Embodiment 32 is the recombinant host cell of embodiment 31, wherein the substitution, the insertion, the deletion, or a combination thereof is in a 5′ untranslated region of the gene, an intron of the gene, an exon of the gene, a 3′ untranslated region of the gene, or a combination thereof.
[0231] Embodiment 33 is the recombinant host cell of embodiment 31, wherein the substitution, the insertion, the deletion, or a combination thereof is in a regulatory region of the gene.
[0232] Embodiment 34 is the recombinant host cell of embodiment 27, wherein the bluebuck gene variant associated with gray/blue coat color comprises a nucleotide sequence having at least 80%, at least 85%, at least 90%, or at least 95% identity to a nucleotide sequence selected from the group consisting of SEQ ID NOs: 45-102 and combinations thereof.
[0233] Embodiment 35 is the recombinant host cell of embodiment 27, wherein the bluebuck gene variant associated with gray/blue coat color comprises a nucleotide sequence selected from the group consisting of SEQ ID NOs: 147-204, and combinations thereof.
[0234] Embodiment 35a is the recombinant host cell of embodiment 27, wherein the bluebuck gene variant associated with melanogenesis comprises a nucleotide sequence having at least 80%, at least 85%, at least 90%, or at least 95% identity to a nucleotide sequence selected from the group consisting of SEQ ID NOs: 48, 64, 68-72, 120-146, and combinations thereof.
[0235] Embodiment 35b is the recombinant host cell of embodiment 27, wherein the bluebuck gene variant associated with melanogenesis comprises a nucleotide sequence selected from the group consisting of SEQ ID NOs: 150, 166, 170-174, 222-248, and combinations thereof.
[0236] Embodiment 36 is the recombinant host cell of embodiment 27, wherein the bluebuck gene variant associated with altered facial pattern comprises a nucleotide sequence having at least 80%, at least 85%, at least 90%, or at least 95% identity to a nucleotide sequence selected from the group consisting of SEQ ID NOs: 60, 74, 76, 95, 103-119, and combinations thereof.
[0237] Embodiment 37 is the recombinant host cell of embodiment 27, wherein the bluebuck gene variant associated with altered facial pattern comprises a nucleotide sequence selected from the group consisting of SEQ ID NOs: 162, 176, 178, 197, 205-221, and combinations thereof.
[0238] Embodiment 38 is the recombinant host cell of embodiment 28, wherein the ASIP variant, the LYST variant, the SLC45A2 variant, the BCL2 variant, the DCT variant, and/or the MYO5A variant is in a coding region.
[0239] Embodiment 39 is the recombinant host cell of embodiment 38, wherein:
[0240] (a) the ASIP variant in the coding region is selected from an isoleucine substitution for valine at amino acid position 39; and/or a tryptophan substitution for arginine at amino acid position 10, wherein the amino acid position corresponds to SEQ ID NO:2;
[0241] (b) the LYST variant in the coding region is selected from a tyrosine substitution for a cysteine at amino acid position 1352, and/or an arginine substitution for a valine at amino acid position 1079, wherein the amino acid position corresponds to SEQ ID NO:10;
[0242] (c) the SLC45A2 variant in the coding region is selected from a valine substitution for a methionine at amino acid position 475, and/or a cysteine substitution for an arginine at amino acid position 59, wherein the amino acid position corresponds to SEQ ID NO: 12;
[0243] (d) the BCL2 variant in the coding region is selected from a threonine substitution for an asparagine at amino acid position 139, and/or an aspartic acid substitution for a glycine at amino acid position 127, wherein the amino acid position corresponds to SEQ ID NO: 14;
[0244] (e) the DCT variant in the coding region is selected from a phenylalanine substitution for a leucine at amino acid position 240, and/or an arginine substitution for a tryptophan at amino acid position 22, wherein the amino acid position corresponds to SEQ ID NO:16; and/or
[0245] (f) the MYO5A variant in the coding region is selected from a serine substitution for a proline at amino acid position 1321, and/or a serine substitution for an asparagine at amino acid position 372, wherein the amino acid position corresponds to SEQ ID NO:20.
[0246] Embodiment 40 is the recombinant host cell of embodiment 28, wherein the ASIP variant, the MLPH variant, and/or the LYST variant is in a regulatory region.
[0247] Embodiment 41 is the recombinant host cell of embodiment 40, wherein:
[0248] (a) the ASIP variant in the regulatory region is selected from an adenine substitution for a guanine at nucleotide position 919, a thymine substitution for a guanine at nucleotide position 1530, a thymine substitution for an adenine at nucleotide position 1578, a thymine substitution for a cytosine at nucleotide position 3703, an adenine substitution for a guanine at nucleotide position 3892, a cytosine substitution for a thymine at nucleotide position 4274, a thymine substitution for an adenine at nucleotide position 4370, a thymine substitution for a cytosine at nucleotide position 4807, a guanine substitution for an adenine at nucleotide position 4821, and/or an adenine substitution for a guanine at nucleotide position 4905, wherein the nucleotide position corresponds to SEQ ID NO:25;
[0249] (b) the MLPH variant in the regulatory region is selected from a cytosine substitution for a guanine at nucleotide position 1238, an adenine substitution for a thymine at nucleotide position 1299; an adenine substitution for a cytosine at nucleotide position 1488, an adenine substitution for a guanine at nucleotide position 1526, a guanine substitution for a thymine at nucleotide position 1618, an adenine substitution for a guanine at nucleotide position 1653, an adenine substitution for a guanine at nucleotide position 1672; a thymine substitution for a cytosine at nucleotide position 1718, an adenine substitution for a guanine at nucleotide position 1837, a guanine substitution for an adenine at nucleotide position 1949, an adenine substitution for a cytosine at nucleotide position 2472, a guanine substitution for an adenine at nucleotide position 2675, a thymine substitution for a cytosine at nucleotide position 2691, a guanine substitution for a thymine at nucleotide position 2900, a guanine substitution for an adenine at nucleotide position 3029, a guanine substitution for an adenine at nucleotide position 3090, a guanine substitution for a thymine at nucleotide position 3272, a cytosine substitution for a thymine at nucleotide position 3380, a cytosine substitution for a thymine at nucleotide position 3449, a cytosine substitution for a thymine at nucleotide position 3463, an adenine substitution for a guanine at nucleotide position 3513, a cytosine substitution for a thymine at nucleotide position 3559, a cytosine substitution for a thymine at nucleotide position 3581, a guanine substitution for a cytosine at nucleotide position 4352, a guanine substitution for a cytosine at nucleotide position 4356, a guanine substitution for an adenine at nucleotide position 4552, a guanine substitution for an adenine at nucleotide position 4690, a guanine substitution for an adenine at nucleotide position 4856, a cytosine substitution for a thymine at nucleotide position 4888, and/or a thymine substitution for a cytosine at nucleotide position 4990, wherein the nucleotide position corresponds to SEQ ID NO:27; and/or
[0250] (c) the LYST variant in the regulatory region is selected from a cytosine substitution for a guanine at nucleotide position 48, a cytosine substitution for an adenine at nucleotide position 67, a guanine substitution for a cytosine at nucleotide position 71, a thymine substitution for a cytosine at nucleotide position 247, a cytosine substitution for a thymine at nucleotide position 254, a guanine substitution for an adenine at nucleotide position 486, a thymine substitution for a cytosine at nucleotide position 883, a cytosine substitution for an adenine at nucleotide position 1002, an adenine substitution for a guanine at nucleotide position 1105, a thymine substitution for a cytosine at nucleotide position 1505, an adenine substitution for a guanine at nucleotide position 2350, a thymine substitution for a cytosine at nucleotide position 2612, a thymine substitution for a cytosine at nucleotide position 2661, a cytosine substitution for a thymine at nucleotide position 2668, a cytosine substitution for a thymine at nucleotide position 2818, a cytosine substitution for a guanine at nucleotide position 2873, a cytosine substitution for a guanine at nucleotide position 3223, an adenine substitution for a guanine at nucleotide position 3257, a thymine substitution for a cytosine at nucleotide position 4347, a cytosine substitution for a thymine at nucleotide position 4420, a thymine substitution for a cytosine at nucleotide position 4586, a cytosine substitution for a thymine at nucleotide position 4598, and/or a thymine substitution for a cytosine at nucleotide position 4619, wherein the nucleotide position corresponds to SEQ ID NO:29.
[0251] Embodiment 42 is the recombinant host cell of embodiment 29, wherein the MITF variant and the KIT variant is in a regulatory region.
[0252] Embodiment 43 is the recombinant host cell of embodiment 42, wherein
[0253] (a) the MITF variant in the regulatory region is selected from a thymine substitution for a cytosine at nucleotide position 514, an adenine substitution for a guanine at nucleotide position 6733, a thymine substitution for an adenine at nucleotide position 21322, an adenine substitution for a thymine at nucleotide position 29009, a thymine substitution for a cytosine at nucleotide position 37136, an adenine substitution for a thymine adenine at nucleotide position 48433, a thymine substitution for a guanine at nucleotide position 50738, a thymine substitution for a guanine at nucleotide position 52771, a thymine substitution for an adenine at nucleotide position 53986, a guanine substitution for an adenine at nucleotide position 85470, an adenine substitution for a guanine at nucleotide position 85945, a guanine substitution for a thymine at nucleotide position 89390, an adenine substitution for a guanine at nucleotide position 91717, a cytosine substitution for an adenine at nucleotide position 110490, an adenine substitution for a guanine at nucleotide position 114903, an adenine substitution for a guanine at nucleotide position 116734, an adenine substitution for a guanine at nucleotide position 119238, a cytosine substitution for an adenine at nucleotide position 122369, an adenine substitution for a cytosine at nucleotide position 126635, an adenine substitution for a guanine at nucleotide position 129446, a thymine substitution for a guanine at nucleotide position 133318, an adenine substitution for a guanine at nucleotide position 138944, a cytosine substitution for a thymine at nucleotide position 150167, an adenine substitution for a cytosine at nucleotide position 187625, a guanine substitution for an adenine at nucleotide position 208940, an adenine substitution for a guanine at nucleotide position 211614, a guanine substitution for an adenine at nucleotide position 216326, and/or a cytosine substitution for a thymine at nucleotide position 217379, wherein the nucleotide position corresponds to SEQ ID NO:33; and/or
[0254] (b) the KIT variant in the regulatory region is selected from a thymine substitution for a cytosine at nucleotide position 268, a cytosine substitution for a guanine at nucleotide position 510, a guanine substitution for an adenine at nucleotide position 517, an adenine substitution for a guanine at nucleotide position 2108, a thymine substitution for a cytosine at nucleotide position 2401, an adenine substitution for a thymine at nucleotide position 2504, a cytosine substitution for a thymine at nucleotide position 2835, a guanine substitution for a adenine at nucleotide position 3365, a cytosine substitution for a thymine at nucleotide position 4044, an adenine substitution for a guanine at nucleotide position 4166, an adenine substitution for a cytosine at nucleotide position 4531, an adenine substitution for a guanine at nucleotide position 4569, a thymine substitution for a guanine at nucleotide position 4714, an adenine substitution for a cytosine at nucleotide position 4859, an adenine substitution for a guanine at nucleotide position 4892, and/or a guanine substitution for an adenine at nucleotide position 4907, wherein the nucleotide position corresponds to SEQ ID NO:31.
[0255] Embodiment 44 is the recombinant host cell of embodiment 27, wherein the recombinant host cell further comprises at least one bluebuck gene variant with gray/blue coat color selected from:
[0256] (a) a loss-of-function agouti signaling protein (ASIP) variant;
[0257] (b) a defensin beta 103 (DEFB103) missense variant;
[0258] (c) a loss-of-function melanophilin (MLPH) variant;
[0259] (d) a premelanosome protein (PMEL) missense variant;
[0260] (e) a loss-of-function lysosomal trafficking regulator (LYST) variant; and/or
[0261] (f) a loss-of-function solute carrier family 45 member 2 (SLC45A2) variant.
[0262] Embodiment 45 is a recombinant host cell comprising at least one bluebuck (Hippotragus leucophaeus) gene variant associated with gray/blue coat color selected from:
[0263] (a) a loss-of-function agouti signaling protein (ASIP) variant;
[0264] (b) a defensin beta 103 (DEFB103) missense variant;
[0265] (c) a loss-of-function melanophilin (MLPH) variant;
[0266] (d) a premelanosome protein (PMEL) missense variant;
[0267] (e) a loss-of-function lysosomal trafficking regulator (LYST) variant; and/or
[0268] (f) a loss-of-function solute carrier family 45 member 2 (SLC45A2) variant.
[0269] Embodiment 46 is the recombinant host cell of embodiment 44 or 45, wherein:
[0270] (a) the loss-of-function ASIP variant comprises an insertion and deletion (indel);
[0271] (b) the DEFB103 missense variant comprises a glycine deletion at an amino acid position corresponding to position 23 of SEQ ID NO:4;
[0272] (c) the loss-of-function MLPH variant comprises an indel;
[0273] (d) the PMEL missense variant comprises a cysteine substitution for an arginine at an amino acid position corresponding to position 603 of SEQ ID NO:8;
[0274] (e) the loss-of-function LYST variant comprises an indel; and
[0275] (f) the loss-of-function SLC45A2 variant comprises an indel.
[0276] Embodiment 47 is the recombinant host cell of claim 45, wherein the recombinant host cell comprises 2, 3, 4, 5, 6, 7, 8, 9, 10, 15, 20, 25, 30, 40, 50, 60, 70, 80, 90, 95, 100, 101, 102 (or any number in between) bluebuck gene variants.
[0277] Embodiment 48 is the recombinant host cell of embodiment 45, wherein the recombinant host cell fails to express an endogenous homologue of at least one of ABCB6, ACE2, AP3B1, AP3D1, ASIP, ATP7A, BCL2, BLOC1S2, BLOC1S3, BLOC1S4, BLOC1S5, BRAF, DCT, DCTN1, DCTN2, DOCK7, DSTYK, DTNBP1, EED, FIG. 4, GGT1, GPR143, HPS1, HPS3, HPS4, HPS5, HPS6, LYST, MBTPS1, MCOLN3, MFSD12, MITF, MKLN1, MLANA, MPLH, MREG, MYO5A, NOTCH1, NOTCH2, OCA2, PAH, PIKFYVE, PMEL, RAB27A, RAB38, RABGGTA, RAF1, SLC24A5, SLC45A2, SLC7A11, SNAI2, SPAG9, TPCN2, TYR, TYRP1, VAC14, VPS33A, YKT6, ASCC2, ATP6V0A2, CCDC53, CD72, CDK12, CHD8, COMMD5, DSCR3, EP300, FRYL, HDAC4, HNRNPA2B1L1, HNRNPA2B1L2, HNRNPA2B1L3, HNRNPA2B1L4, INTS8, NCOR1, RAB9A, RB1, SCAF4, SEC31A, SIAH1, SMG7, SNX13L1, SNX13L2, TBC1D5, WDFY1, ADAMTS20, BMP4, EDN3, EDNRB, ETS1L1, ETS1L2, FOXD3, HDAC1, IRF1, KIT, KITLG, PAX3, SOX10, SOX2, TRPM1, WNT3A, and ZFHX4.
[0278] Embodiment 49 is the recombinant host cell of embodiment 48, wherein the recombinant host cell fails to express the endogenous homologue of 2, 3, 4, 5, 6, 7, 8, 9, 10, 15, 20, 25, 30, 35, 40, 45, 50, 55, 60, 65, 70, 75, 80, 85, 90, 95, 100, 101, 102 (or any number in between) of ABCB6, ACE2, AP3B1, AP3D1, ASIP, ATP7A, BCL2, BLOC1S2, BLOC1S3, BLOC1S4, BLOC1S5, BRAF, DCT, DCTN1, DCTN2, DOCK7, DSTYK, DTNBP1, EED, FIG. 4, GGT1, GPR143, HPS1, HPS3, HPS4, HPS5, HPS6, LYST, MBTPS1, MCOLN3, MFSD12, MITF, MKLN1, MLANA, MPLH, MREG, MYO5A, NOTCH1, NOTCH2, OCA2, PAH, PIKFYVE, PMEL, RAB27A, RAB38, RABGGTA, RAF1, SLC24A5, SLC45A2, SLC7A11, SNAI2, SPAG9, TPCN2, TYR, TYRP1, VAC14, VPS33A, YKT6, ASCC2, ATP6V0A2, CCDC53, CD72, CDK12, CHD8, COMMD5, DSCR3, EP300, FRYL, HDAC4, HNRNPA2B1L1, HNRNPA2B1L2, HNRNPA2B1L3, HNRNPA2B1L4, INTS8, NCOR1, RAB9A, RB1, SCAF4, SEC31A, SIAH1, SMG7, SNX13L1, SNX13L2, TBC1D5, WDFY1, ADAMTS20, BMP4, EDN3, EDNRB, ETS1L1, ETS1L2, FOXD3, HDAC1, IRF1, KIT, KITLG, PAX3, SOX10, SOX2, TRPM1, WNT3A, and ZFHX4.
[0279] Embodiment 50 is the recombinant host cell of any one of embodiments 27-49, wherein the recombinant host cell is an antelope cell.
[0280] Embodiment 51 is the recombinant host cell of embodiment 50, wherein the recombinant host cell is a roan antelope (Hippotragus equinus) cell or a sable antelope (Hippotragus niger) cell.
[0281] Embodiment 52 is the recombinant host cell of any one of embodiments 27-49, wherein the recombinant host cell is a stem cell.
[0282] Embodiment 53 is the recombinant host cell of embodiment 52, wherein the stem cell is selected from an induced stem cell, an embryonic stem (ES) cell, or a mesenchymal stem cell (MSC).
[0283] Embodiment 54 is the recombinant host cell of any one of embodiments 27-49, wherein the recombinant host cell is a reprogrammed cell.
[0284] Embodiment 55 is the recombinant host cell of any one of embodiments 27-49, wherein the recombinant host cell is a fibroblast cell or a mesenchymal cell.
[0285] Embodiment 56 is the recombinant host cell of any one of embodiments 27-49, wherein the recombinant host cell is an endothelial progenitor cell (EPC) or a pericyte.
[0286] Embodiment 57 is the recombinant host cell of any one of embodiments 27-49, wherein the recombinant host cell is selected from the group consisting of a nerve cell, a cartilage cell, a bone cell, a muscle cell, a fat cell, and an epidermal cell.
[0287] Embodiment 58 is a method of creating a transgenic animal with gray/blue coat color and/or an altered melanin biosynthesis pathway of a bluebuck and/or an altered facial pattern of a bluebuck, the method comprising:
[0288] (a) obtaining a cell from the animal;
[0289] (b) introducing into the cell at least one bluebuck (Hippotragus leucophaeus) gene variant associated with gray/blue coat color and/or melanogenesis, wherein the one or more bluebuck gene variants associated with gray/blue coat color are selected from an ABCB6 variant, an ACE2 variant, an AP3B1 variant, an AP3D1 variant, an ASIP variant, an ATP7A variant, a BCL2 variant, a BLOC1S2 variant, a BLOC1S3 variant, a BLOC1S4 variant, a BLOC1S5 variant, a BRAF variant, a DCT variant, a DCTN1 variant, a DCTN2 variant, a DOCK7 variant, a DSTYK variant, a DTNBP1 variant, an EED variant, a FIG. 4 variant, a GGT1 variant, a GPR143 variant, a HPS1 variant, a HPS3 variant, a HPS4 variant, a HPS5 variant, a HPS6 variant, a LYST variant, a MBTPS1 variant, a MCOLN3 variant, a MFSD12 variant, a MITF variant, a MKLN1 variant, a MLANA variant, a MPLH variant, a MREG variant, a MYO5A variant, a NOTCH1 variant, a NOTCH2 variant, an OCA2 variant, a PAH variant, a PIKFYVE variant, a PMEL variant, a RAB27A variant, a RAB38 variant, a RABGGTA variant, a RAF1 variant, a SLC24A5 variant, a SLC45A2 variant, a SLC7A11 variant, a SNAI2 variant, a SPAG9 variant, a TPCN2 variant, a TYR variant, a TYRP1 variant, a VAC14 variant, a VPS33A variant, and a YKT6 variant, and the one or more bluebuck gene variants associated with melanogenesis are selected from an AP3D1 variant, an ASCC2 variant, an ATP6V0A2 variant, a CCDC53 variant, a CD72 variant, a CDK12 variant, a CHD8 variant, a COMMD5 variant, a DSCR3 variant, an EP300 variant, a FIG. 4 variant, a FRYL variant, a HDAC4 variant, a HNRNPA2B1L1 variant, a HNRNPA2B1L2 variant, a HNRNPA2B1L3 variant, a HNRNPA2B1L4 variant, a HPS3 variant, a HPS4 variant, a HPS5 variant, a HPS6 variant, an INTS8 variant, a LYST variant, a NCOR1 variant, a RAB9A variant, a RB1 variant, a SCAF4 variant, a SEC31A variant, a SIAH1 variant, a SMG7 variant, a SNX13L1 variant, a SLX13L2 variant, a TBC1D5 variant, and a WDFY1 variant; and/or at least one bluebuck (Hippotragus leucophaeus) gene variant associated with altered facial pattern selected from an ADAMTS20 variant, a BMP4 variant, a DOCK7 variant, an EDN3 variant, an EDNRB variant, an ETS1L1 variant, an ETS1L2 variant, a FOXD3 variant, a HDAC1 variant, an IRF1 variant, a KIT variant, a KITLG variant, a MCOLN3 variant, a MITF variant, a PAX3 variant, a SNAI2 variant, a SOX10 variant, a SOX2 variant, a TRPM1 variant, a WNT3A variant, and a ZFHX4 variant; and
[0290] (c) utilizing the recombinant cell to produce a transgenic animal,
   wherein the transgenic animal has a gray/blue coat color and/or an altered melanin biosynthesis pathway of a bluebuck and/or an altered facial pattern of a bluebuck.
[0291] Embodiment 59 is the method of embodiment 58, wherein the bluebuck gene variant comprises at least one change in the nucleotide sequence of the gene.
[0292] Embodiment 60 is the method of embodiment 59, wherein the change in the nucleotide sequence is a substitution, an insertion, a deletion, or a combination thereof.
[0293] Embodiment 61 is the method of embodiment 60, wherein the substitution, the insertion, the deletion, or a combination thereof is in a 5′ untranslated region of the gene, an intron of the gene, an exon of the gene, a 3′ untranslated region of the gene, or a combination thereof.
[0294] Embodiment 62 is the method of embodiment 60, wherein the substitution, the insertion, the deletion, or a combination thereof is in a regulatory region of the gene.
[0295] Embodiment 63 is the method of embodiment 58, wherein the bluebuck gene variant associated with gray/blue coat color comprises a nucleotide sequence having at least 80%, at least 85%, at least 90%, or at least 95% identity to a nucleotide sequence selected from the group consisting of SEQ ID NOs: 45-102 and combinations thereof.
[0296] Embodiment 64 is the method of embodiment 58, wherein the bluebuck gene variant associated with gray/blue coat color comprises a nucleotide sequence selected from the group consisting of SEQ ID NOs: 147-204, and combinations thereof.
[0297] Embodiment 64a is the method of embodiment 58, wherein the bluebuck gene variant associated with melanogenesis comprises a nucleotide sequence having at least 80%, at least 85%, at least 90%, or at least 95% identity to a nucleotide sequence selected from the group consisting of SEQ ID NOs: 48, 64, 68-72, 120-146, and combinations thereof.
[0298] Embodiment 64 is the method of embodiment 58, wherein the bluebuck gene variant associated with melanogenesis comprises a nucleotide sequence selected from the group consisting of SEQ ID NOs: 150, 166, 170-174, 222-248, and combinations thereof.
[0299] Embodiment 65 is the method of embodiment 58, wherein the bluebuck gene variant associated with altered facial pattern comprises a nucleotide sequence having at least 80%, at least 85%, at least 90%, or at least 95% identity to a nucleotide sequence selected from the group consisting of SEQ ID NOs: 60, 74, 76, 95, 103-119, and combinations thereof.
[0300] Embodiment 66 is the method of embodiment 58, wherein the bluebuck gene variant associated with altered facial pattern comprises a nucleotide sequence selected from the group consisting of SEQ ID NOs: 162, 176, 178, 197, 205-221, and combinations thereof.
[0301] Embodiment 67 is the method of any one of embodiments 58, wherein the ASIP variant, the LYST variant, the SLC45A2 variant, the BCL2 variant, the DCT variant, and/or the MYO5A variant is in a coding region.
[0302] Embodiment 68 is the method of embodiment 67, wherein:
[0303] (a) the ASIP variant in the coding region is selected from an isoleucine substitution for valine at amino acid position 39; and/or a tryptophan substitution for arginine at amino acid position 10, wherein the amino acid position corresponds to SEQ ID NO:2;
[0304] (b) the LYST variant in the coding region is selected from a tyrosine substitution for a cysteine at amino acid position 1352, and/or an arginine substitution for a valine at amino acid position 1079, wherein the amino acid position corresponds to SEQ ID NO:10;
[0305] (c) the SLC45A2 variant in the coding region is selected from a valine substitution for a methionine at amino acid position 475, and/or a cysteine substitution for an arginine at amino acid position 59, wherein the amino acid position corresponds to SEQ ID NO:12;
[0306] (d) the BCL2 variant in the coding region is selected from a threonine substitution for an asparagine at amino acid position 139, and/or an aspartic acid substitution for a glycine at amino acid position 127, wherein the amino acid position corresponds to SEQ ID NO:14;
[0307] (e) the DCT variant in the coding region is selected from a phenylalanine substitution for a leucine at amino acid position 240, and/or an arginine substitution for a tryptophan at amino acid position 22, wherein the amino acid position corresponds to SEQ ID NO:16; and/or
[0308] (f) the MYO5A variant in the coding region is selected from a serine substitution for a proline at amino acid position 1321, and/or a serine substitution for an asparagine at amino acid position 372, wherein the amino acid position corresponds to SEQ ID NO:20.
[0309] Embodiment 69 is the method of embodiment 58, wherein the ASIP variant, the MLPH variant, and/or the LYST variant is in a regulatory region.
[0310] Embodiment 70 is the method of embodiment 69, wherein:
[0311] (a) the ASIP variant in the regulatory region is selected from an adenine substitution for a guanine at nucleotide position 919, a thymine substitution for a guanine at nucleotide position 1530, a thymine substitution for an adenine at nucleotide position 1578, a thymine substitution for a cytosine at nucleotide position 3703, an adenine substitution for a guanine at nucleotide position 3892, a cytosine substitution for a thymine at nucleotide position 4274, a thymine substitution for an adenine at nucleotide position 4370, a thymine substitution for a cytosine at nucleotide position 4807, a guanine substitution for an adenine at nucleotide position 4821, and/or an adenine substitution for a guanine at nucleotide position 4905, wherein the nucleotide position corresponds to SEQ ID NO:25;
[0312] (b) the MLPH variant in the regulatory region is selected from a cytosine substitution for a guanine at nucleotide position 1238, an adenine substitution for a thymine at nucleotide position 1299; an adenine substitution for a cytosine at nucleotide position 1488, an adenine substitution for a guanine at nucleotide position 1526, a guanine substitution for a thymine at nucleotide position 1618, an adenine substitution for a guanine at nucleotide position 1653, an adenine substitution for a guanine at nucleotide position 1672; a thymine substitution for a cytosine at nucleotide position 1718, an adenine substitution for a guanine at nucleotide position 1837, a guanine substitution for an adenine at nucleotide position 1949, an adenine substitution for a cytosine at nucleotide position 2472, a guanine substitution for an adenine at nucleotide position 2675, a thymine substitution for a cytosine at nucleotide position 2691, a guanine substitution for a thymine at nucleotide position 2900, a guanine substitution for an adenine at nucleotide position 3029, a guanine substitution for an adenine at nucleotide position 3090, a guanine substitution for a thymine at nucleotide position 3272, a cytosine substitution for a thymine at nucleotide position 3380, a cytosine substitution for a thymine at nucleotide position 3449, a cytosine substitution for a thymine at nucleotide position 3463, an adenine substitution for a guanine at nucleotide position 3513, a cytosine substitution for a thymine at nucleotide position 3559, a cytosine substitution for a thymine at nucleotide position 3581, a guanine substitution for a cytosine at nucleotide position 4352, a guanine substitution for a cytosine at nucleotide position 4356, a guanine substitution for an adenine at nucleotide position 4552, a guanine substitution for an adenine at nucleotide position 4690, a guanine substitution for an adenine at nucleotide position 4856, a cytosine substitution for a thymine at nucleotide position 4888, and/or a thymine substitution for a cytosine at nucleotide position 4990, wherein the nucleotide position corresponds to SEQ ID NO:27; and/or
[0313] (c) the LYST variant in the regulatory region is selected from a cytosine substitution for a guanine at nucleotide position 48, a cytosine substitution for an adenine at nucleotide position 67, a guanine substitution for a cytosine at nucleotide position 71, a thymine substitution for a cytosine at nucleotide position 247, a cytosine substitution for a thymine at nucleotide position 254, a guanine substitution for an adenine at nucleotide position 486, a thymine substitution for a cytosine at nucleotide position 883, a cytosine substitution for an adenine at nucleotide position 1002, an adenine substitution for a guanine at nucleotide position 1105, a thymine substitution for a cytosine at nucleotide position 1505, an adenine substitution for a guanine at nucleotide position 2350, a thymine substitution for a cytosine at nucleotide position 2612, a thymine substitution for a cytosine at nucleotide position 2661, a cytosine substitution for a thymine at nucleotide position 2668, a cytosine substitution for a thymine at nucleotide position 2818, a cytosine substitution for a guanine at nucleotide position 2873, a cytosine substitution for a guanine at nucleotide position 3223, an adenine substitution for a guanine at nucleotide position 3257, a thymine substitution for a cytosine at nucleotide position 4347, a cytosine substitution for a thymine at nucleotide position 4420, a thymine substitution for a cytosine at nucleotide position 4586, a cytosine substitution for a thymine at nucleotide position 4598, and/or a thymine substitution for a cytosine at nucleotide position 4619, wherein the nucleotide position corresponds to SEQ ID NO:29.
[0314] Embodiment 71 is the method of embodiment 58, wherein the transgenic animal further comprises at least one bluebuck gene variant associated with gray/blue coat color selected from:
[0315] (a) a loss-of-function agouti signaling protein (ASIP) variant;
[0316] (b) a defensin beta 103 (DEFB103) missense variant;
[0317] (c) a loss-of-function melanophilin (MLPH) variant;
[0318] (d) a premelanosome protein (PMEL) missense variant;
[0319] (e) a loss-of-function lysosomal trafficking regulator (LYST) variant; and/or
[0320] (f) a loss-of-function solute carrier family 45 member 2 (SLC45A2) variant.
[0321] Embodiment 72 is a method of creating a transgenic animal with gray/blue coat color, the method comprising:
[0322] (a) obtaining a cell from the animal;
[0323] (b) introducing into the cell at least bluebuck gene variant associated with gray/blue coat color selected from:
   [0324] (1) a loss-of-function agouti signaling protein (ASIP) variant;
   [0325] (2) a defensin beta 103 (DEFB103) missense variant;
   [0326] (3) a loss-of-function melanophilin (MLPH) variant;
   [0327] (4) a premelanosome protein (PMEL) missense variant;
   [0328] (5) a loss-of-function lysosomal trafficking regulator (LYST) variant; and/or
   [0329] (6) a loss-of-function solute carrier family 45 member 2 (SLC45A2) variant, whereby introducing the at least one bluebuck gene variant produces a recombinant cell; and
[0330] (c) utilizing the recombinant cell to produce a transgenic animal,
[0331] wherein the transgenic animal has a gray/blue coat color.
[0332] Embodiment 73 is the method of embodiments 71 or 72, wherein:
[0333] (a) the loss-of-function ASIP variant comprises an insertion and deletion (indel);
[0334] (b) the DEFB103 missense variant comprises a glycine deletion at an amino acid position corresponding to position 23 of SEQ ID NO:4;
[0335] (c) the loss-of-function MLPH variant comprises an indel;
[0336] (d) the PMEL missense variant comprises a cysteine substitution for an arginine at an amino acid position corresponding to position 603 of SEQ ID NO:8;
[0337] (e) the loss-of-function LYST variant comprises an indel; and
[0338] (f) the loss-of-function SLC45A2 variant comprises an indel.
[0339] Embodiment 74 is the method of embodiment 73, wherein the transgenic animal further comprises at least one bluebuck (Hippotragus leucophaeus) gene variant associated with altered facial pattern selected from an ADAMTS20 variant, a BMP4 variant, a DOCK7 variant, an EDN3 variant, an EDNRB variant, an ETS1L1 variant, an ETS1L2 variant, a FOXD3 variant, a HDAC1 variant, an IRF1 variant, a KIT variant, a KITLG variant, a MCOLN3 variant, a MITF variant, a PAX3 variant, a SNAI2 variant, a SOX10 variant, a SOX2 variant, a TRPM1 variant, a WNT3A variant, and a ZFHX4 variant.
[0340] Embodiment 75 is the method of embodiment 58 or 74, wherein the MITF variant and the KIT variant is in a regulatory region.
[0341] Embodiment 76 is the method of embodiment 75, wherein
[0342] (a) the MITF variant in the regulatory region is selected from a thymine substitution for a cytosine at nucleotide position 514, an adenine substitution for a guanine at nucleotide position 6733, a thymine substitution for an adenine at nucleotide position 21322, an adenine substitution for a thymine at nucleotide position 29009, a thymine substitution for a cytosine at nucleotide position 37136, an adenine substitution for a thymine adenine at nucleotide position 48433, a thymine substitution for a guanine at nucleotide position 50738, a thymine substitution for a guanine at nucleotide position 52771, a thymine substitution for an adenine at nucleotide position 53986, a guanine substitution for an adenine at nucleotide position 85470, an adenine substitution for a guanine at nucleotide position 85945, a guanine substitution for a thymine at nucleotide position 89390, an adenine substitution for a guanine at nucleotide position 91717, a cytosine substitution for an adenine at nucleotide position 110490, an adenine substitution for a guanine at nucleotide position 114903, an adenine substitution for a guanine at nucleotide position 116734, an adenine substitution for a guanine at nucleotide position 119238, a cytosine substitution for an adenine at nucleotide position 122369, an adenine substitution for a cytosine at nucleotide position 126635, an adenine substitution for a guanine at nucleotide position 129446, a thymine substitution for a guanine at nucleotide position 133318, an adenine substitution for a guanine at nucleotide position 138944, a cytosine substitution for a thymine at nucleotide position 150167, an adenine substitution for a cytosine at nucleotide position 187625, a guanine substitution for an adenine at nucleotide position 208940, an adenine substitution for a guanine at nucleotide position 211614, a guanine substitution for an adenine at nucleotide position 216326, and/or a cytosine substitution for a thymine at nucleotide position 217379, wherein the nucleotide position corresponds to SEQ ID NO:33; and/or
[0343] (b) the KIT variant in the regulatory region is selected from a thymine substitution for a cytosine at nucleotide position 268, a cytosine substitution for a guanine at nucleotide position 510, a guanine substitution for an adenine at nucleotide position 517, an adenine substitution for a guanine at nucleotide position 2108, a thymine substitution for a cytosine at nucleotide position 2401, an adenine substitution for a thymine at nucleotide position 2504, a cytosine substitution for a thymine at nucleotide position 2835, a guanine substitution for a adenine at nucleotide position 3365, a cytosine substitution for a thymine at nucleotide position 4044, an adenine substitution for a guanine at nucleotide position 4166, an adenine substitution for a cytosine at nucleotide position 4531, an adenine substitution for a guanine at nucleotide position 4569, a thymine substitution for a guanine at nucleotide position 4714, an adenine substitution for a cytosine at nucleotide position 4859, an adenine substitution for a guanine at nucleotide position 4892, and/or a guanine substitution for an adenine at nucleotide position 4907, wherein the nucleotide position corresponds to SEQ ID NO:31.
[0344] Embodiment 77 is the method of embodiment 71, wherein the transgenic animal fails to express an endogenous homologue of at least one of ABCB6, ACE2, AP3B1, AP3D1, ASIP, ATP7A, BCL2, BLOC1S2, BLOC1S3, BLOC1S4, BLOC1S5, BRAF, DCT, DCTN1, DCTN2, DOCK7, DSTYK, DTNBP1, EED, FIG. 4, GGT1, GPR143, HPS1, HPS3, HPS4, HPS5, HPS6, LYST, MBTPS1, MCOLN3, MFSD12, MITF, MKLN1, MLANA, MPLH, MREG, MYO5A, NOTCH1, NOTCH2, OCA2, PAH, PIKFYVE, PMEL, RAB27A, RAB38, RABGGTA, RAF1, SLC24A5, SLC45A2, SLC7A11, SNAI2, SPAG9, TPCN2, TYR, TYRP1, VAC14, VPS33A, YKT6, ASCC2, ATP6V0A2, CCDC53, CD72, CDK12, CHD8, COMMD5, DSCR3, EP300, FRYL, HDAC4, HNRNPA2B1L1, HNRNPA2B1L2, HNRNPA2B1L3, HNRNPA2B1L4, INTS8, NCOR1, RAB9A, RB1, SCAF4, SEC31A, SIAH1, SMG7, SNX13L1, SNX13L2, TBC1D5, WDFY1, ADAMTS20, BMP4, EDN3, EDNRB, ETS1L1, ETS1L2, FOXD3, HDAC1, IRF1, KIT, KITLG, PAX3, SOX10, SOX2, TRPM1, WNT3A, and ZFHX4.
[0345] Embodiment 78 is the method of embodiment 77, wherein the transgenic animal fails to express the endogenous homologue of 2, 3, 4, 5, 6, 7, 8, 9, 10, 15, 20, 25, 30, 35, 40, 45, 50, 55, 60, 65, 70, 75, 80, 85, 90, 95, 100, 101, 102 (or any number in between) of ABCB6, ACE2, AP3B1, AP3D1, ASIP, ATP7A, BCL2, BLOC1S2, BLOC1S3, BLOC1S4, BLOC1S5, BRAF, DCT, DCTN1, DCTN2, DOCK7, DSTYK, DTNBP1, EED, FIG. 4, GGT1, GPR143, HPS1, HPS3, HPS4, HPS5, HPS6, LYST, MBTPS1, MCOLN3, MFSD12, MITF, MKLN1, MLANA, MPLH, MREG, MYO5A, NOTCH1, NOTCH2, OCA2, PAH, PIKFYVE, PMEL, RAB27A, RAB38, RABGGTA, RAF1, SLC24A5, SLC45A2, SLC7A11, SNAI2, SPAG9, TPCN2, TYR, TYRP1, VAC14, VPS33A, YKT6, ASCC2, ATP6V0A2, CCDC53, CD72, CDK12, CHD8, COMMD5, DSCR3, EP300, FRYL, HDAC4, HNRNPA2B1L1, HNRNPA2B1L2, HNRNPA2B1L3, HNRNPA2B1L4, INTS8, NCOR1, RAB9A, RB1, SCAF4, SEC31A, SIAH1, SMG7, SNX13L1, SNX13L2, TBC1D5, WDFY1, ADAMTS20, BMP4, EDN3, EDNRB, ETS1L1, ETS1L2, FOXD3, HDAC1, IRF1, KIT, KITLG, PAX3, SOX10, SOX2, TRPM1, WNT3A, and ZFHX4.
[0346] Embodiment 79 is the method of any one of embodiments 58-78, wherein the cell is a stem cell.
[0347] Embodiment 80 is the method of embodiment 79, wherein the stem cell is selected from an induced stem cell, an embryonic stem (ES) cell, or a mesenchymal stem cell (MSC).
[0348] Embodiment 81 is the method of any one of embodiments 58-78, wherein the cell is a reprogrammed cell.
[0349] Embodiment 82 is the method of any one of embodiments 58-78, wherein the cell is a fibroblast cell or a mesenchymal cell.
[0350] Embodiment 83 is the method of any one of embodiments 58-78, wherein the cell is an endothelial cell.
[0351] Embodiment 84 is the method of any one of embodiments 58-78, wherein the cell is selected from the group consisting of a nerve cell, a cartilage cell, a bone cell, a muscle cell, a fat cell, and an epidermal cell.
[0352] Embodiment 85 is the method of any one of embodiments 58-84, wherein the animal is an antelope.
[0353] Embodiment 86 is the method of embodiment 85, wherein the antelope is selected from a roan antelope (Hippotragus equimuis) or a sable antelope (Hippotragus niger).
[0354] Embodiment 87 is a transgenic animal made by the method of any one of embodiments 58-86.

[0355] Without further description, it is believed that one of ordinary skill in the art can, using the preceding description and the following illustrative examples, make and utilize the present invention and practice the claimed methods. The following working examples, therefore, specifically point out the preferred embodiments of the present invention, and are not to be construed as limiting in any way the remainder of the disclosure.

### EXAMPLES

### Example 1: Creation of Cells with Knock Outs in ASIP, MLPH, LYST, SLC45A2 and MITF Genes

### Reagents

[0356] IDT Alt-R S.p. Cas9 EGFP RNP (Catalog number: 10008161); A 1 μg/μl working stock was prepared according to standard protocols.
[0357] ASIP gRNA: sqRNA sequence: ACACCAGCAAGGUAGCCAGG (SEQ ID NO:37). A 15 μM working stock of the ASIP gRNA was prepared according to standard protocols.
[0358] MLPH gRNA: sqRNA sequence: AGAGGCCAAGCACGUCUGGG (SEQ ID NO:38). A 15 μM working stock of the MPLH gRNA was prepared according to standard protocols.
[0359] LYST gRNA: sqRNA sequence: CUGAAACAGAGCUUGCACAG (SEQ ID NO:39). A 15 μM working stock of the LYST gRNA was prepared according to standard protocols.
[0360] SLC45A2 gRNA: sqRNA sequence: GGAAGGCAGUCCAUCCAAUG (SEQ ID NO: 40). A 15 μM working stock of the SLC45A2 gRNA was prepared according to standard protocols.
[0361] MITF gRNAs: sqRNA sequences: MITF-L1: TCATAGCTACTCCCACAGGG (SEQ ID NO: 249); MITF-L2: TGGTGATTCCTTGAGGGATG (SEQ ID NO:250); MITF-L3: AACTAAGTAAGCTTGCCCTG (SEQ ID NO:251); MITF-R1: TTACCCACATCACTAAG ACC (SEQ ID NO:252); MITF-R2: TAAGGCGCTGGTGAAGTCAG (SEQ ID NO:253); MITF-R3: ACCAATCCTCACCTTTCACG (SEQ ID NO:254); MITF-R4: TCCTAAACGTACAATGA CTG (SEQ ID NO:255). 15 μM working stocks of the MITF gRNAs were prepared according to standard protocols.

[0362] In order to generate regulatory edits in the MITF locus that were predicted to lead to changes in coat patterning, homology directed repair was used to incorporate these variants. The ability to cut at the MITF locus was tested by testing the editing efficiency of 7 different gRNAs (FIG. 5). Editing efficiency was seen to be consistently high in all cases except for one, suggesting further edits will be able to be generated at this locus. Furthermore, delivery of editing materials was observed in roan fibroblasts (FIG. 6) via GFP fluorescence imaging.

[0363] For RNP and mRNA, the following chemistries were used: Ribojuice, RNAiMAX, and CRISPRmax. These were run in parallel for both mRNA and RNP Cas9. Duplicates were run of the above conditions so that 2 biological replicates were created for each gene.

[0364] Additional reagents: T175 (or larger) flask; DMEM media (antibiotic free); Opti-MEM; 1× DPBS; 0.5% Trypsin-EDTA; pipettes and tips; cell counter; trypan blue; 15 mL conical tubes; 50 mL conical tubes; microcentrifuge tubes; CRISPRmax; IDT Alt-R spCas9 GFP RNP (1 mg/ml); and guide RNA stocks disclosed above.

[0365] Cell Culture preparation: Cells were grown in a T-175 to attain the minimum total cells required of 1.9×10⁶ cells. Once the cells reached 60+% confluence, the cells were harvested for transfection. To harvest the cells, (1) the media was aspirated off of the T-175 flask on the opposing side of the adherent cells; (2) any remaining media was washed out of the T-175 flask with 25 mL of 1× DPBS, and then the DPBS was aspirated out of the flask; (3) approximately 7 mL of 0.05% Trypsin-EDTA was added to the flask, and the flask was placed back in the incubator for 2-3 minutes; (4) after the time had elapsed, the flask was removed from the incubator and 21 mL of cDMEM was added to neutralize the Trypsin reaction; (5) all of the media and cells was pipetted out of the flask and placed in a 50 ml conical; (6) the cells were centrifuged at 300×g for 5 minutes; (7) after the cells were pelleted, the cells were resuspended in 2 mL cDMEM; 20 μL were removed into a micro centrifuge tube and 20 μL of Trypan Blue was added to the micro centrifuge tube; 10 μL was added to each chamber of the cell counter and the cell density total was collected; (8) from this amount of cells to remove to achieve the needed cell total was calculated and these cells were set aside into a 50 ml conical for transfection, and any remaining cells were used for expansion or freezing. Cells used for this experiment were 23HE004 FB.

[0366] CRISPRmax: For 2 reactions each: 6 pmol RNAi duplex were diluted in 50 μl Opti-MEM I Medium without serum in the well of the tissue culture plate or microcentrifuge tube. The solution was mixed gently. For GFP RNP, 1.5 μL (6 pmol) was added; For ASIP RNP: 1250 ng: 240 ng: 2.5 μL Cas9 RNP and 6.66 μL ASIP guide was added. There was 1 reaction only of ASIP GFP mRNA: 1.25 μL Cas9 mRNA and 3.33 μL ASIP guide. Cas9 Plus reagent was mixed gently, then 2.5 μL of Cas9 Plus Reagent was added to 2× GFP conditions and 5.0 μL of Cas9 Plus Reagent was added to each of the mRNA and RNP reactions. CrisprMax reagent was mixed gently, then 1.5 μL of CrisprMax Reagent was added to 2× GFP conditions and 3.0 μL of CrisprMax Reagent was added to each of the mRNA and RNP reactions. All solutions were titurated/mixed well and were allowed to stand for 10 minutes to let the complexes form. 1.0 mL of 100 k cells was added and plated into 2 replicate wells. The cells were incubated for 24 hours for GFP then run through Flow. The ASIP cells were incubated for 48 hours expanding as necessary and then counted and pelleted to determine doubling rate and toxicity.

[0367] Negative control: For the negative control, there were 50K cells per well. There were 2 wells of negative controls. 0.5 mL of cells were added to the plate and no additional gRNA was added to the cells.

### Example 2: Creation of Roan Fibroblast Monoclonal Cells Lines Containing Knock Outs for ASIP, MLPH, LYST, and SLC45A2 Genes

[0368] Reagents: Seeded, proliferating fibroblasts in regular growth media; FGF2 (recombinant human FGF); 96 well plates; 100 ml multiwell channel pipettor; 25 ml well boats; 200 ml filter pipettes; 5 ml FACS tubes; FACS buffer (PBS, —Mg, —Ca; 2% FBS; 2.5 mM EDTA, pH 8.0; 25 mM HEPES; 1% Penn/Strep).
[0369] Cell information: Roan antelope cells (23HE_FB_004_Passage 5).
[0370] Preparation for Cell Sorting: Two days before the sort, the flask was seeded with appropriate number of cells to reach 80% confluency by sort day. The maximum amount of media (with a buffer to avoid spillage) was plated in the flask. The day before the sort, the media was collected from the cells to be sorted. The media was stored for filtration the day of sort. The cells were fed with fresh media to ensure that the cells were growing appropriately.

[0371] The day of the sort, the media was prepared as follows: The previously collected media was obtained and filtered 1:1 with fresh media in a 0.22 μM filter flask. Additional FBS was added to the media to bring to at least 20%. If using fibroblasts, FGF2 was added to the media for an effective concentration of 10 ng/ml (4.08 μL). Approximately 10.5 mL/96 well plate. The FACS buffer was cold and remained cold throughout the experiment.

[0372] The date of the sort, the plates were prepared as follows: Before the sort begins, 100 μL of conditioned media made above was pipetted and stored at 37° C. until the experiment was ready.

[0373] To sort the cells, the media was warmed to start the process. The start-up process for the Sony machine was begun. Once the machine had gone through the start-up process or if the machine had been cleaned, the cells were harvested for sort. The appropriate cell population was trypsinized/accutased with 0.05% trypsin until the cells came off the flask/plate at 37° C. While cells were in trypsin, an ice bucket was obtained, and the FACS tubes were numbered for the sort and tubes were obtained to spin down the cells. Once the cells detached, the trypsin was neutralized with regular media, and spun down at 500g×10 min. The media was removed from the cell pellet or as close as possible without disturbing the cell pellet. The pellet was resuspended in FACS buffer and pipetted through the top of the FACS tubes. The cells were pipetted to remove clumps of cells. The cells were placed back on ice. Once the cells were obtained, the cells were sorted. The gates for FACS were set, and the cells were gathered. Once the cells have been sorted, the cells were collected and placed at 37° C. The cells were stored at 37° C. as soon as the sort was finished. The cells were observed 24 hours later to confirm no contamination had occurred.

### Results:

[0374] Genomic Analysis: In order to determine how to revive the blue antelope (Hippotragus leucophaeus), the genome of the blue antelope was analyzed for variants. Variants found in the blue antelope genome in genes known to be associated with gray coloration can be found in the sequence list. Notably, putatively damaging variants were found in the genes LYST and ASIP, as well as regulatory variants in genes like MLPH, KIT, MITF, etc. Loss-of-function (LoF) variants in MLPH and both LoF variants and missense variants in LYST have been associated with gray coloration (aka coat color dilution) in several species including mice, dogs, cats, chicken, and cattle. ASIP on the other hand, is key regulator of MCIR and its loss of function has been shown to shift coat color from pheomelanin dominant (brown/red) to eumelanin dominant (black). In combination with disruption of MLPH and LYST, these edits should shift the coloration of the brown roan antelope (Hippotragus equinus) to gray.
[0375] Genome Editing: Cas9 and guide RNAs to generate coat color edits were delivered to roan antelope fibroblasts via chemical transfection using the CRISPRmax reagent (see methods). Editing efficiency and resulting variants were determined by next generation sequencing (NGS) on the Illumina MiSeq2. Insertions/deletions (indels) were generated as a consequence of double stranded break generation after Cas9-based cutting via non-homologous end joining. Indels were generated for the genes ASIP (FIGS. 1A and 1B), MLPH (FIGS. 2A and 2B), LYST (FIGS. 3A and 3B), and SLC45A2 (FIGS. 4A and 4B). Editing efficiencies were variable across loci, consistent with previous reports. These results demonstrated the ability to generate LoF variants in genes that generate a gray coat color.

[0376] The ability to monoclonally isolate edited fibroblast cells was next demonstrated. After editing, single cells were sorted by FACS into individual wells of a 96-well plate. Cells were grown on conditioned media after sorting (see methods for more details) to enhance outgrowth. Genotyping via NGS revealed single colonies containing biallelic/homozygous edits in the LYST gene (FIG. 7). Colonies showed significant growth 7 days after monoclonal isolation (FIG. 8), indicating that cells remained healthy after the editing and isolation processes.

### Example 3: Creation of Roan Fibroblast Monoclonal Cells Lines Containing Triple Knock Out of MLPH and ASIP Genes with Cell Raft

[0377] Purpose: Generate phenotype engineering edits in monoclonal roan antelope cells to generate gray coat color in service of de-extincting the bluebuck antelope.

### Materials/Methods

[0378] Cell Raft Protocol: 1×DPBS (Mg2+ and Ca2+ free) was warmed to 37° C. The reservoir(s) were filled with warmed 1×DPBS. For a quad array 1 mL per reservoir was used. For either single 200 μm or 100 μm, 3 mL of 1× DPBS was used. The 1× DPBS was allowed to incubate for at least 3 minutes. The PBS was removed with either low pressure vacuum or P1000 by tilting the array to the side and aspirating on the corner of the pooled 1×PBS. The washing steps were repeated twice more. If coating was used, the coating was added and the array sat overnight at 37° C. The reservoirs were washed 2-3 times the next day with sterile DI water, and then culture media was added (for quad array, 500 μl per reservoir was added, and for single use, 3 μl per use was added). The media was allowed to incubate for at least 3 minutes while cells were being prepared.

[0379] Preparing Cell Suspension: The cells were counted. An appropriate number of cells was added to the volume needed in a separate tube. The media was removed from the array. The cell suspension was added with a P1000 dropwise onto the yellow-brown grid. The array was placed in a standard 37° C. incubator. When an array was moved, the array was picked up vertically and then transferred instead of sliding against surface. Either the top of the array was labelled such that the yellow-brown grid was not obscured, or the side of the array was labelled. The lot number and array specifications were recorded for downstream data input.

[0380] Scanning Arrays: 4 hours after seeding cells, the array was scanned to determine which wells had single cells using the AIR System (Cell Microsystems; Durham, NC).

[0381] Isolations: Warm media was gently added to the arrays. The data was analyzed, and the rafts of interest were mapped to isolate or create a gate for the system to automatically isolate from. 100 μl of respective warm media was placed in each well of a 96 well flat bottom tissue culture plate corresponding to the plate map or 5 μl of lysis buffer in each well of PCR plate. The AIR system was turned on, and the AIR software was launched. A lint-free wipe was sprayed with ethanol, and the interior of the AIR system was wiped down. The Isolation Plate Map was selected, and then, “Access Wand” and “Wand Access Position” was clicked. The wand was thoroughly cleaned with ethanol and then clicked into place. “Wand to Home” and “Return Home” were subsequently clicked. The array was then loaded onto the collection plate. The lids of the 96-well plate were removed. The door was closed, and “Isolate” was selected. Upon completion of the isolation, the lids were placed back on the array, and the plate was returned to the incubator.

[0382] Results: 171 monoclonal lines were generated from the initial isolation that grew at normal doubling rates 1 week post editing and isolation. Cell lines were genotyped and 12 cell lines were found to contain edits to all three genes targeted. Lines were biobanked for future experiments and use in editing.

### Example 4: Creation of Steel Coat Mouse

[0383] Purpose: Generated knockout edits to ASIP and MLPH in 129 mouse (agouti/brown coat color) ES cells to model proposed bluebuck phenotype engineering edits.

### Materials/Methods

### Reagents:

TABLE 2
Target sgRNA sequences for ASIP and MLPH

| sgRNA name | sgRNA sequence | SEQ ID NO |
|---|---|---|
| KO ASIP 1 | TAACTCCTCCATGAACTCGC | 256 |
| KO ASIP 3 | CTGGCACTCGAGGAGACGCT | 257 |
| KO MLPH 1 | GCTGTTGAGGGGCTGGTCTC | 258 |
| KO MLPH 2 | AGACAGTGAGCAGACTGATG | 259 |
| MLPH sgRNA Ch71 | CCTTTCCACGCTCACAGACG | 260 |

[0384] sgRNA for both ASIP and MLPH was combined with gene editing enzyme and transfected into N2A cell following IDT protocol using RNAiMAX. Briefly, sgRNA stock (synthesized by Synthego (Redwood City, CA), dissolved in TE to 100 μM) was further diluted to 1 μM in TE. The gene editing enzyme (Synthego SpCas9 2NLS nuclease 300 μmol, NC2245954) was diluted to 1 μM in OptiMem (Thermo Fisher; Waltham, MA). For RNP formation, 1.5 μl of sgRNA (1 μM), 1.5 μl of gene editing enzyme (1 μM), 22 μl OptiMem (total 25 μl), was mixed at room temperature (RT) for 5 minutes. After mixing, the solution was kept at 4° C.

[0385] At the same time, 1.2 μl RNAiMAX (Thermo Fisher) was diluted in 23.8 μl of OptiMem (total 25 μl). The RNAiMAX mixture was added to the RNP solution (total 50 μl). The mixture was incubated at RT for 20 minutes. During the 20 minute incubation, the cells were dissociated and were diluted to a concentration of 4×10⁵ cells/ml. 100 μl of the cells was used for each transfection (4×10⁴ cells). The cells were transfected with the 50 μl RNP/RNAiMAX, (final RNP=10 nM) mix for 2 days (no media change).

[0386] gDNA extraction: The cell media was removed, the cells were washed with PBS, and were lysed with 50 μl of quickExtract. The lysed cells were diluted with 100 μl of H₂O and 2 μl of the diluted sample was used as a template for PCR.

[0387] PCR condition: The PCR reaction mix was incubated at 98° C. for 20 seconds, then the following cycle was done 30 times: 98° C. for 10 seconds, 58° C. for 5 seconds, and 68° C. for 5 seconds; followed by 68° C. for 5 seconds.

[0388] T7E1 assay: For the T7E1 assay, 10 μl of PCR reaction was mixed with 8 μl H₂O and 2 μl of 10× Buffer 2. The digest was annealed with 1 μl of T7E1 at 37° C. for 20 minutes.

TABLE 3
PCR primer information

| Primer name | Sequence Information | SEQ ID NO |
|---|---|---|
| PCR ASIP F | TCATGTCCCCTTTGCTTCAATC | 261 |
| PCR ASIP R | CCAAGTCCACCAAGCATCTTGACT | 262 |
| PCR MLPH F | CTTCAAAGCCCTTGACATACCTCCT | 263 |
| PCR MLPH R | GGAATTGGGTAGGAGGGAGAAGC | 264 |

[0389] Cells: Neuro-2a cells are mouse neuroblasts with neuronal and amoeboid stem cell morphology isolated from the brain tissue of the mouse. The cells lines were thawed and resuspended in cDMEM (DMEM, Fetal Bovine Serum 10%, Pen/Strep) and plated in a T75 culture flask. At 90% confluency, the cells were split into four T75 culture flasks. Once the cells were confluent, three T75 culture flasks were frozen down, and one T75 culture flask was split 1:6.

[0390] The cells were electroporated with the RNP containing sgRNAs targeting mouse MLPH and ASIP. After electroporation, 750 cells were plated onto one well of a six-well plate (replicate of 3) for manual picking. The remainder of the cells were plated into 24-well plates (coated with a layer of mouse embryonic feeder cells prior to plating). 24 hours after electroporation, images were taken with a green filter to empirically assess transfection efficiency. 48 hours after electroporation, cells were pelleted down for DNA isolated and subsequent sequencing/T7 assay to determine cutting efficiency of the guides.

[0391] From the experiments performed, 30 clones for MLPH KO 2; 24 clones from MLPH KO 3; 48 clones from ASIP KO 2 and MLPH KO 2; and 48 clones from ASIP KO 3 and MLPH KO 2 were frozen down.

[0392] Sequencing of clones: From the frozen clones, the following three candidate clones were identified: (a) Clone A6, which contained a 1 base pair insertion in ASIP and a 2 base pair deletion in MLPH; (b) Clone B6, which contained a 1 base pair insertion in ASIP and a 1 base pair insertion in MLPH; and (c) Clone E1, which contained a 1 base pair insertion in ASIP and a 4 base pair deletion in MLPH.

[0393] Results: Monoclonal embryonic stem cell(ES) lines were generated containing indel edits leading to total knockout of ASIP and MLPH. These cells were subsequently injected into albino embryos to generate chimeric mice (FIG. 9). The chimeric mice had gray patches on the fur demonstrating that the ASIP and MLPH edits resulted in the production of a gray coat color.

[0394] It will be appreciated by those skilled in the art that changes could be made to the embodiments described above without departing from the broad inventive concept thereof. It is understood, therefore, that this invention is not limited to the particular embodiments disclosed, but it is intended to cover modifications within the spirit and scope of the present invention as defined by the present description.

1. A transgenic animal comprising at least one bluebuck (Hippotragus leucophaeus) gene variant associated with gray/blue coat color and/or melanogenesis and/or at least one bluebuck variant associated with altered facial pattern.

2. The transgenic animal of claim 1, wherein;
(a) the at least one bluebuck gene variant associated with gray/blue coat color is selected from the group consisting of an ATP Binding Cassette Subfamily B Member 6 (LAN Blood Group) (ABCB6) variant, an Angiotensin Converting Enzyme 2 (ACE2) variant, an Adaptor Related Protein Complex 3 Subunit Beta 1 (AP3B1) variant, an Adaptor Related Protein Complex 3 Subunit Delta 1 (AP3D1) variant, an Agouti Signaling Protein (ASIP) variant, an ATPase Copper Transporting Alpha (ATP7A) variant, a BCL2 Apoptosis Regulator (BCL2) variant, a Biogenesis Of Lysosomal Organelles Complex 1 Subunit 2 (BLOC1S2) variant, a Biogenesis Of Lysosomal Organelles Complex 1 Subunit 3 (BLOC1S3) variant, a Biogenesis Of Lysosomal Organelles Complex 1 Subunit 4 (BLOC1S4) variant, a Biogenesis Of Lysosomal Organelles Complex 1 Subunit 5 (BLOC1S5) variant, a B-Raf Proto-Oncogene, Serine/Threonine Kinase (BRAF) variant, a Dopachrome Tautomerase (DCT) variant, a Dynactin Subunit 1 (DCTN1) variant, a Dynactin Subunit 2 (DCTN2) variant, a Dedicator Of Cytokinesis 7 (DOCK7) variant, a Dual Serine/Threonine And Tyrosine Protein Kinase (DSTYK) variant, a Dystrobrevin Binding Protein 1 (DTNBP1) variant, an Embryonic Ectoderm Development (EED) variant, a FIG. 4 Phosphoinositide 5-Phosphatase (FIG. 4) variant, a Gamma-Glutamyltransferase 1 (GGT1) variant, a G Protein-Coupled Receptor 143 (GPR143) variant, a HPS1 Biogenesis Of Lysosomal Organelles Complex 3 Subunit 1 (HPS1) variant, a HPS3 Biogenesis Of Lysosomal Organelles Complex 2 Subunit 1 (HPS3) variant, a HPS4 Biogenesis Of Lysosomal Organelles Complex 3 Subunit 2 (HPS4) variant, a HPS5 Biogenesis Of Lysosomal Organelles Complex 2 Subunit 2 (HPS5) variant, a HPS6 Biogenesis Of Lysosomal Organelles Complex 2 Subunit 3 (HPS6) variant, a Lysosomal Trafficking Regulator (LYST) variant, a Membrane Bound Transcription Factor Peptidase, Site 1 (MBTPS1) variant, a Mucolipin TRP Cation Channel 3 (MCOLN3) variant, a Major Facilitator Superfamily Domain Containing 12 (MFSD12) variant, a Melanocyte Inducing Transcription Factor (MITF) variant, a Muskelin 1 (MKLN1) variant, a Melan-A (MLANA) variant, a Melanophilin (MLPH) variant, a Melanoregulin (MREG) variant, a Myosin VA (MYO5A) variant, a Notch Receptor 1 (NOTCH1) variant, a Notch Receptor 2 (NOTCH2) variant, an OCA2 Melanosomal Transmembrane Protein (OCA2) variant, a Phenylalanine Hydroxylase (PAH) variant, a Phosphoinositide Kinase, FYVE-Type Zinc Finger Containing (PIKFYVE) variant, a Premelanosome Protein (PMEL) variant, a RAB27A, Member RAS Oncogene Family (RAB27A) variant, a RAB38, Member RAS Oncogene Family (RAB38) variant, a Rab Geranylgeranyltransferase Subunit Alpha (RABGGTA) variant, a Raf-1 Proto-Oncogene, Serine/Threonine Kinase (RAF1) variant, a Solute Carrier Family 24 Member 5 (SLC24A5) variant, a Solute Carrier Family 45 Member 2 (SLC45A2) variant, a Solute Carrier Family 7 Member 11 (SLC7A11) variant, a Snail Family Transcriptional Repressor 2 (SNAI2) variant, a Sperm Associated Antigen 9 (SPAG9) variant, a Two Pore Segment Channel 2 (TPCN2) variant, a Tyrosinase (TYR) variant, a Tyrosinase Related Protein 1 (TYRP1) variant, a VAC14 Component Of PIKFYVE Complex (VAC14) variant, a VPS33A Core Subunit Of CORVET And HOPS Complexes (VPS33A) variant, a YKT6 V-SNARE Homolog (YKT6) variant, and combinations thereof;
(b) the at least one bluebuck gene variant associated with melanogenesis is selected from the group consisting of an Adaptor Related Protein Complex 3 Subunit Delta 1 (AP3D1) variant, an Activating Signal Cointegrator 1 Complex Subunit 2 (ASCC2) variant, an ATPase H+ Transporting V0 Subunit A2 (ATP6V0A2) variant, a CCDC53 variant, a CD72 molecule (CD72) variant, a Cyclin Dependent Kinase 12 (CDK12) variant, a Chromodomain Helicase DNA Binding Protein 8 (CHD8) variant, a COMM Domain Containing 5 (COMMD5) variant, a DSCR3 variant, an E1A Binding Protein P300 (EP300) variant, a FIG. 4 Phosphoinositide 5-Phosphatase (FIG. 4) variant, a FRY Like Transcription Coactivator (FRYL) variant, a Histone Deacetylase 4 (HDAC4) variant, a Heterogeneous Nuclear Ribonucleoprotein A2/B1 Like 1 (HNRNPA2B1L1) variant, a Heterogeneous Nuclear Ribonucleoprotein A2/B1 Like 2 (HNRNPA2B1L2) variant, a Heterogeneous Nuclear Ribonucleoprotein A2/B1 Like 3 (HNRNPA2B1L3) variant, a Heterogeneous Nuclear Ribonucleoprotein A2/B1 Like 4 (HNRNPA2B1L4) variant, a HPS3 Biogenesis Of Lysosomal Organelles Complex 2 Subunit 1 (HPS3) variant, a HPS4 Biogenesis Of Lysosomal Organelles Complex 3 Subunit 2 (HPS4) variant, a HPS5 Biogenesis Of Lysosomal Organelles Complex 2 Subunit 2 (HPS5) variant, a HPS6 Biogenesis Of Lysosomal Organelles Complex 2 Subunit 3 (HPS6) variant, an Integrator Complex Subunit 8 (INTS8) variant, a Lysosomal Trafficking Regulator (LYST) variant, a Nuclear Receptor Corepressor 1 (NCOR1) variant, a RAB9A, Member RAS Oncogene Family (RAB9A) variant, a RB Transcriptional Corepressor 1 (RB1) variant, a SR-Related CTD Associated Factor 4 (SCAF4) variant, a SEC31 Homolog A, COPII Coat Complex Component (SEC31A) variant, a Siah E3 Ubiquitin Protein Ligase 1 (SIAH1) variant, a SMG7 Nonsense Mediated MRNA Decay Factor (SMG7) variant, a Sorting Nexin 13 Like 1 (SNX13L1) variant, a Sorting Nexin 13 Like 2 (SNX13L2) variant, a TBC1 Domain Family Member 5 (TBC1D5) variant, a WD Repeat And FYVE Domain Containing 1 (WDFY1) variant, and combinations thereof; and/or
(c) the bluebuck gene variant associated with altered facial pattern is selected from the group consisting of an ADAM Metallopeptidase With Thrombospondin Type 1 Motif 20 (ADAMTS20) variant, a Bone Morphogenetic Protein 4 (BMP4) variant, a Dedicator Of Cytokinesis 7 (DOCK7) variant, an Endothelin 3 (EDN3) variant, an Endothelin Receptor Type B (EDNRB) variant, an ETS Proto-Oncogene 1, Transcription Factor Like 1 (ETS1L1) variant, an ETS Proto-Oncogene 1, Transcription Factor Like 2 (ETS1L2) variant, a Forkhead Box D3 (FOXD3) variant, a Histone Deacetylase 1 (HDAC1) variant, an Interferon Regulatory Factor 1 (IRF1) variant, a KIT Proto-Oncogene, Receptor Tyrosine Kinase (KIT) variant, a KIT Ligand (KITLG) variant, a Mucolipin TRP Cation Channel 3 (MCOLN3) variant, a Melanocyte Inducing Transcription Factor (MITF) variant, a Paired Box 3 (PAX3) variant, a Snail Family Transcriptional Repressor 2 (SNAI2) variant, a SRY-Box Transcription Factor 10 (SOX10) variant, a SRY-Box Transcription Factor 2 (SOX2) variant, a Transient Receptor Potential Cation Channel Subfamily M Member 1 (TRPM1) variant, a Wnt Family Member 3A (WNT3A) variant, a Zinc Finger Homeobox 4 (ZFHX4) variant, and combinations thereof.

3-4. (canceled)

5. The transgenic animal of claim 1, wherein the bluebuck gene variant comprises at least one change in the nucleotide sequence of the gene.

6. The transgenic animal of claim 5, wherein the change in the nucleotide sequence is a substitution, an insertion, a deletion, or a combination thereof.

7. The transgenic animal of claim 6, wherein the substitution, the insertion, the deletion, or a combination thereof is in a 5′ untranslated region of the gene, an intron of the gene, an exon of the gene, a 3′ untranslated region of the gene, a regulatory region of the gene, or a combination thereof.

8. (canceled)

9. The transgenic animal of claim 2, wherein;
(i) the bluebuck gene variant associated with gray/blue coat color comprises: (a) a nucleotide sequence having at least 80%, at least 85%, at least 90%, or at least 95% identity to a nucleotide sequence selected from the group consisting of SEQ ID NOs: 45-102 and combinations thereof; or (b) a nucleotide sequence selected from the group consisting of SEQ ID NOs: 147-204, and combinations thereof;
(ii) the bluebuck gene variant associated with melanogenesis comprises: (a) a nucleotide sequence having at least 80%, at least 85%, at least 90%, or at least 95% identity to a nucleotide sequence selected from the group consisting of SEQ ID NOs: 48, 64, 68-72, 120-146, and combinations thereof; or (b) a nucleotide sequence selected from the group consisting of SEQ ID NOs: 150, 166, 170-174, 222-248, and combinations thereof; and/or
(iii) the bluebuck gene variant associated with altered facial pattern comprises: (a) a nucleotide sequence having at least 80%, at least 85%, at least 90%, or at least 95% identity to a nucleotide sequence selected from the group consisting of SEQ ID NOs: 60, 74, 76, 95, 103-119, and combinations thereof; or (b) comprises a nucleotide sequence selected from the group consisting of SEQ ID NOs: 162, 176, 178, 197, 205-221, and combinations thereof.

10-14. (canceled)

15. The transgenic animal of claim 1, wherein the transgenic animal comprises at least 2, 3, 4, 5, 6, 7, 8, 9, 10, 15, 20, 25, 30, 40, 50, 60, 70, 80, 90, 95, 100, 101, 102 (or any number in between) bluebuck gene variants.

16. The transgenic animal of claim 1, wherein the transgenic animal further comprises at least one bluebuck gene variant associated with gray/blue coat color selected from the group consisting of:
(a) a loss-of-function agouti signaling protein (ASIP) variant;
(b) a defensin beta 103 (DEFB103) missense variant;
(c) a loss-of-function melanophilin (MLPH) variant;
(d) a premelanosome protein (PMEL) missense variant;
(e) a loss-of-function lysosomal trafficking regulator (LYST) variant; and/or
(f) a loss-of-function solute carrier family 45 member 2 (SLC45A2) variant.

17. A transgenic animal comprising at least one bluebuck (Hippotragus leucophaeus) gene variant associated with gray/blue coat color selected from the group consisting of:
(a) a loss-of-function agouti signaling protein (ASIP) variant;
(b) a defensin beta 103 (DEFB103) missense variant;
(c) a loss-of-function melanophilin (MLPH) variant;
(d) a premelanosome protein (PMEL) missense variant;
(e) a loss-of-function lysosomal trafficking regulator (LYST) variant; and/or
(f) a loss-of-function solute carrier family 45 member 2 (SLC45A2) variant.

18. The transgenic animal of claim 1, wherein the transgenic animal fails to express an endogenous homologue of at least one of ABCB6, ACE2, AP3B1, AP3D1, ASIP, ATP7A, BCL2, BLOC1S2, BLOC1S3, BLOC1S4, BLOC1S5, BRAF, DCT, DCTN1, DCTN2, DOCK7, DSTYK, DTNBP1, EED, FIG. 4, GGT1, GPR143, HPS1, HPS3, HPS4, HPS5, HPS6, LYST, MBTPS1, MCOLN3, MFSD12, MITF, MKLN1, MLANA, MLPH, MREG, MYO5A, NOTCH1, NOTCH2, OCA2, PAH, PIKFYVE, PMEL, RAB27A, RAB38, RABGGTA, RAF1, SLC24A5, SLC45A2, SLC7A11, SNAI2, SPAG9, TPCN2, TYR, TYRP1, VAC14, VPS33A, YKT6, ASCC2, ATP6V0A2, CCDC53, CD72, CDK12, CHD8, COMMD5, DSCR3, EP300, FRYL, HDAC4, HNRNPA2B1L1, HNRNPA2B1L2, HNRNPA2B1L3, HNRNPA2B1L4, INTS8, NCOR1, RAB9A, RB1, SCAF4, SEC31A, SIAH1, SMG7, SNX13L1, SNX13L2, TBC1D5, WDFY1, ADAMTS20, BMP4, EDN3, EDNRB, ETS1L1, ETS1L2, FOXD3, HDAC1, IRF1, KIT, KITLG, PAX3, SOX10, SOX2, TRPM1, WNT3A, and ZFHX4.

19. The transgenic animal of claim 18, wherein the transgenic animal fails to express the endogenous homologue of 2, 3, 4, 5, 6, 7, 8, 9, 10, 15, 20, 25, 30, 35, 40, 45, 50, 55, 60, 65, 70, 75, 80, 85, 90, 95, 100, 101, 102 (or any number in between) of ABCB6, ACE2, AP3B1, AP3D1, ASIP, ATP7A, BCL2, BLOC1S2, BLOC1S3, BLOC1S4, BLOC1S5, BRAF, DCT, DCTN1, DCTN2, DOCK7, DSTYK, DTNBP1, EED, FIG. 4, GGT1, GPR143, HPS1, HPS3, HPS4, HPS5, HPS6, LYST, MBTPS1, MCOLN3, MFSD12, MITF, MKLN1, MLANA, MLPH, MREG, MYO5A, NOTCH1, NOTCH2, OCA2, PAH, PIKFYVE, PMEL, RAB27A, RAB38, RABGGTA, RAF1, SLC24A5, SLC45A2, SLC7A11, SNAI2, SPAG9, TPCN2, TYR, TYRP1, VAC14, VPS33A, YKT6, ASCC2, ATP6V0A2, CCDC53, CD72, CDK12, CHD8, COMMD5, DSCR3, EP300, FRYL, HDAC4, HNRNPA2B1L1, HNRNPA2B1L2, HNRNPA2B1L3, HNRNPA2B1L4, INTS8, NCOR1, RAB9A, RBI, SCAF4, SEC31A, SIAH1, SMG7, SNX13L1, SNX13L2, TBC1D5, WDFY1, ADAMTS20, BMP4, EDN3, EDNRB, ETS1L1, ETS1L2, FOXD3, HDAC1, IRF1, KIT, KITLG, PAX3, SOX10, SOX2, TRPM1, WNT3A, and ZFHX4.

20. The transgenic animal of claim 1, wherein the transgenic animal is an antelope.

21. The transgenic animal of claim 20, wherein the transgenic animal is a roan antelope (Hippotragus equinus) or a sable antelope (Hippotragus niger).

22. A recombinant host cell comprising at least one bluebuck (Hippotragus leucophaeus) gene variant associated with gray/blue coat color and/or melanogenesis and/or at least one bluebuck variant associated with altered facial pattern.

23. The recombinant host cell of claim 22, wherein;
(a) the at least one bluebuck gene variant associated with gray/blue coat color and/or melanogenesis is selected from an ABCB6 variant, an ACE2 variant, an AP3B1 variant, an AP3D1 variant, an ASIP variant, an ATP7A variant, a BCL2 variant, a BLOC1S2 variant, a BLOC1S3 variant, a BLOC1S4 variant, a BLOC1S5 variant, a BRAF variant, a DCT variant, a DCTN1 variant, a DCTN2 variant, a DOCK7 variant, a DSTYK variant, a DTNBP1 variant, an EED variant, a FIG. 4 variant, a GGT1 variant, a GPR143 variant, a HPS1 variant, a HPS3 variant, a HPS4 variant, a HPS5 variant, a HPS6 variant, a LYST variant, a MBTPS1 variant, a MCOLN3 variant, a MFSD12 variant, a MITF variant, a MKLN1 variant, a MLANA variant, a MLPH variant, a MREG variant, a MYO5A variant, a NOTCH1 variant, a NOTCH2 variant, an OCA2 variant, a PAH variant, a PIKFYVE variant, a PMEL variant, a RAB27A variant, a RAB38 variant, a RABGGTA variant, a RAF1 variant, a SLC24A5 variant, a SLC45A2 variant, a SLC7A11 variant, a SNAI2 variant, a SPAG9 variant, a TPCN2 variant, a TYR variant, a TYRP1 variant, a VAC14 variant, a VPS33A variant, a YKT6 variant, an AP3D1 variant, an ASCC2 variant, an ATP6V0A2 variant, a CCDC53 variant, a CD72 variant, a CDK12 variant, a CHD8 variant, a COMMD5 variant, a DSCR3 variant, an EP300 variant, a FIG. 4 variant, a FRYL variant, a HDAC4 variant, a HNRNPA2B1L1 variant, a HNRNPA2B1L2 variant, a HNRNPA2B1L3 variant, a HNRNPA2B1L4 variant, a HPS3 variant, a HPS4 variant, a HPS5 variant, a HPS6 variant, an INTS8 variant, a LYST variant, a NCOR1 variant, a RAB9A variant, a RB1 variant, a SCAF4 variant, a SEC31A variant, a SIAH1 variant, a SMG7 variant, a SNX13L1 variant, a SNX13L2 variant, a TBC1D5 variant, a WDFY1 variant, and combinations thereof; and/or
(b) the at least one bluebuck gene variant associated with altered facial pattern is selected from an ADAMTS20 variant, a BMP4 variant, a DOCK7 variant, an EDN3 variant, an EDNRB variant, an ETS1L1 variant, an ETS1L2 variant, a FOXD3 variant, a HDAC1 variant, an IRF1 variant, a KIT variant, a KITLG variant, a MCOLN3 variant, a MITF variant, a PAX3 variant, a SNAI2 variant, a SOX10 variant, a SOX2 variant, a TRPM1 variant, a WNT3A variant, and a ZFHX4 variant.

24. (canceled)

25. The recombinant host cell of claim 22, wherein the bluebuck gene variant comprises at least one change in the nucleotide sequence of the gene.

26. The recombinant host cell of claim 25, wherein the change in the nucleotide sequence is a substitution, an insertion, a deletion, or a combination thereof.

27. The recombinant host cell of claim 26, wherein the substitution, the insertion, the deletion, or a combination thereof is in a 5′ untranslated region of the gene, an intron of the gene, an exon of the gene, a 3′ untranslated region of the gene, a regulatory region of the gene, or a combination thereof.

28. (canceled)

29. The recombinant host cell of claim 23, wherein:
(i) the bluebuck gene variant associated with gray/blue coat color and/or melanogenesis comprises:
(a) a nucleotide sequence having at least 80%, at least 85%, at least 90%, or at least 95% identity to a nucleotide sequence selected from the group consisting of SEQ ID NOs: 45-102, 120-146, and combinations thereof; or
(b) nucleotide sequence selected from the group consisting of SEQ ID NOs: 147-204, 222-248, and combinations thereof; and/or
(ii) the bluebuck gene variant associated with altered facial pattern comprises:
(a) a nucleotide sequence having at least 80%, at least 85%, at least 90%, or at least 95% identity to a nucleotide sequence selected from the group consisting of SEQ ID NOs: 60, 74, 76, 95, 103-119, and combinations thereof; or
(b) a nucleotide sequence selected from the group consisting of SEQ ID NOs: 162, 176, 178, 197, 205-221, and combinations thereof.

30-32. (canceled)

33. The recombinant host cell of claim 22, wherein the recombinant host cell comprises at least 2, 3, 4, 5, 6, 7, 8, 9, 10, 15, 20, 25, 30, 40, 50, 60, 70, 80, 90, 95, 100, 101, 102 (or any number in between) bluebuck gene variants.

34. The recombinant host cell of claim 22, wherein the recombinant host cell further comprises at least one bluebuck gene variant associate with gray/blue coat color selected from:
(a) a loss-of-function agouti signaling protein (ASIP) variant;
(b) a defensin beta 103 (DEFB103) missense variant;
(c) a loss-of-function melanophilin (MLPH) variant;
(d) a premelanosome protein (PMEL) missense variant;
(e) a loss-of-function lysosomal trafficking regulator (LYST) variant; and/or
(f) a loss-of-function solute carrier family 45 member 2 (SLC45A2) variant.

35. A recombinant host cell comprising at least one bluebuck (Hippotragus leucophaeus) gene variant associated with gray/blue coat color selected from:
(a) a loss-of-function agouti signaling protein (ASIP) variant;
(b) a defensin beta 103 (DEFB103) missense variant;
(c) a loss-of-function melanophilin (MLPH) variant;
(d) a premelanosome protein (PMEL) missense variant;
(e) a loss-of-function lysosomal trafficking regulator (LYST) variant; and/or
(f) a loss-of-function solute carrier family 45 member 2 (SLC45A2) variant.

36. The recombinant host cell of claim 22, wherein the recombinant host cell fails to express an endogenous homologue of at least one of ABCB6, ACE2, AP3B1, AP3D1, ASIP, ATP7A, BCL2, BLOC1S2, BLOC1S3, BLOC1S4, BLOC1S5, BRAF, DCT, DCTN1, DCTN2, DOCK7, DSTYK, DTNBP1, EED, FIG. 4, GGT1, GPR143, HPS1, HPS3, HPS4, HPS5, HPS6, LYST, MBTPS1, MCOLN3, MFSD12, MITF, MKLN1, MLANA, MLPH, MREG, MYO5A, NOTCH1, NOTCH2, OCA2, PAH, PIKFYVE, PMEL, RAB27A, RAB38, RABGGTA, RAF1, SLC24A5, SLC45A2, SLC7A11, SNAI2, SPAG9, TPCN2, TYR, TYRP1, VAC14, VPS33A, YKT6, ASCC2, ATP6V0A2, CCDC53, CD72, CDK12, CHD8, COMMD5, DSCR3, EP300, FRYL, HDAC4, HNRNPA2B1L1, HNRNPA2B1L2, HNRNPA2B1L3, HNRNPA2B1L4, INTS8, NCOR1, RAB9A, RB1, SCAF4, SEC31A, SIAH1, SMG7, SNX13L1, SNX13L2, TBC1D5, WDFY1, ADAMTS20, BMP4, EDN3, EDNRB, ETS1L1, ETS1L2, FOXD3, HDAC1, IRF1, KIT, KITLG, PAX3, SOX10, SOX2, TRPM1, WNT3A, and ZFHX4.

37. The recombinant host cell of claim 35, wherein the recombinant host cell fails to express the endogenous homologue of 2, 3, 4, 5, 6, 7, 8, 9, 10, 15, 20, 25, 30, 35, 40, 45, 50, 55, 60, 65, 70, 75, 80, 85, 90, 95, 100, 101, 102 (or any number in between) of ABCB6, ACE2, AP3B1, AP3D1, ASIP, ATP7A, BCL2, BLOC1S2, BLOC1S3, BLOC1S4, BLOC1S5, BRAF, DCT, DCTN1, DCTN2, DOCK7, DSTYK, DTNBP1, EED, FIG. 4, GGT1, GPR143, HPS1, HPS3, HPS4, HPS5, HPS6, LYST, MBTPS1, MCOLN3, MFSD12, MITF, MKLN1, MLANA, MLPH, MREG, MYO5A, NOTCH1, NOTCH2, OCA2, PAH, PIKFYVE, PMEL, RAB27A, RAB38, RABGGTA, RAF1, SLC24A5, SLC45A2, SLC7A11, SNAI2, SPAG9, TPCN2, TYR, TYRP1, VAC14, VPS33A, YKT6, ASCC2, ATP6V0A2, CCDC53, CD72, CDK12, CHD8, COMMD5, DSCR3, EP300, FRYL, HDAC4, HNRNPA2B1L1, HNRNPA2B1L2, HNRNPA2B1L3, HNRNPA2B1L4, INTS8, NCOR1, RAB9A, RB1, SCAF4, SEC31A, SIAH1, SMG7, SNX13L1, SNX13L2, TBC1D5, WDFY1, ADAMTS20, BMP4, EDN3, EDNRB, ETS1L1, ETS1L2, FOXD3, HDAC1, IRF1, KIT, KITLG, PAX3, SOX10, SOX2, TRPM1, WNT3A, and ZFHX4.

38. The recombinant host cell of claim 22, wherein the recombinant host cell is an antelope cell.

39. The recombinant host cell of claim 38, wherein the recombinant host cell is a roan antelope (Hippotragus equinus) cell or a sable antelope (Hippotragus niger) cell.

40. The recombinant host cell of claim 22, wherein the recombinant host cell is a stem cell, a reprogrammed cell, a fibroblast cell, a mesenchymal cell, endothelial progenitor cell (EPC), a pericyte, a nerve cell, a cartilage cell, a bone cell, a muscle cell, a fat cell, or an epidermal cell.

41. The recombinant host cell of claim 40, wherein the stem cell is selected from an induced stem cell, an embryonic stem (ES) cell, or a mesenchymal stem cell (MSC).

42-45. (canceled)

46. A method of creating a transgenic animal with gray/blue coat color and/or an altered melanin biosynthesis pathway of a bluebuck and/or an altered facial pattern of a bluebuck, the method comprising:
(a) obtaining a cell from the animal;
(b) introducing into the cell at least one bluebuck (Hippotragus leucophaeus) gene variant associated with gray/blue coat color and/or melanogenesis, wherein the one or more bluebuck gene variants associated with gray/blue coat color are selected from an ABCB6 variant, an ACE2 variant, an AP3B1 variant, an AP3D1 variant, an ASIP variant, an ATP7A variant, a BCL2 variant, a BLOC1S2 variant, a BLOC1S3 variant, a BLOC1S4 variant, a BLOC1S5 variant, a BRAF variant, a DCT variant, a DCTN1 variant, a DCTN2 variant, a DOCK7 variant, a DSTYK variant, a DTNBP1 variant, an EED variant, a FIG. 4 variant, a GGT1 variant, a GPR143 variant, a HPS1 variant, a HPS3 variant, a HPS4 variant, a HPS5 variant, a HPS6 variant, a LYST variant, a MBTPS1 variant, a MCOLN3 variant, a MFSD12 variant, a MITF variant, a MKLN1 variant, a MLANA variant, a MLPH variant, a MREG variant, a MYO5A variant, a NOTCH1 variant, a NOTCH2 variant, an OCA2 variant, a PAH variant, a PIKFYVE variant, a PMEL variant, a RAB27A variant, a RAB38 variant, a RABGGTA variant, a RAF1 variant, a SLC24A5 variant, a SLC45A2 variant, a SLC7A11 variant, a SNAI2 variant, a SPAG9 variant, a TPCN2 variant, a TYR variant, a TYRP1 variant, a VAC14 variant, a VPS33A variant, and a YKT6 variant, and the one or more bluebuck gene variants associated with melanogenesis are selected from an AP3D1 variant, an ASCC2 variant, an ATP6V0A2 variant, a CCDC53 variant, a CD72 variant, a CDK12 variant, a CHD8 variant, a COMMD5 variant, a DSCR3 variant, an EP300 variant, a FIG. 4 variant, a FRYL variant, a HDAC4 variant, a HNRNPA2B1L1 variant, a HNRNPA2B1L2 variant, a HNRNPA2B1L3 variant, a HNRNPA2B1L4 variant, a HPS3 variant, a HPS4 variant, a HPS5 variant, a HPS6 variant, an INTS8 variant, a LYST variant, a NCOR1 variant, a RAB9A variant, a RB1 variant, a SCAF4 variant, a SEC31A variant, a SIAH1 variant, a SMG7 variant, a SNX13L1 variant, a SLX13L2 variant, a TBC1D5 variant, and a WDFY1 variant; and/or the bluebuck gene variant associated with altered facial pattern selected from an ADAMTS20 variant, a BMP4 variant, a DOCK7 variant, an EDN3 variant, an EDNRB variant, an ETS1L1 variant, an ETS1L2 variant, a FOXD3 variant, a HDAC1 variant, an IRF1 variant, a KIT variant, a KITLG variant, a MCOLN3 variant, a MITF variant, a PAX3 variant, a SNAI2 variant, a SOX10 variant, a SOX2 variant, a TRPM1 variant, a WNT3A variant, and a ZFHX4 variant; and
(c) utilizing the recombinant cell to produce a transgenic animal,
wherein the transgenic animal has a gray/blue coat color and/or an altered melanin biosynthesis pathway of a bluebuck and/or an altered facial pattern of a bluebuck.

47. The method of claim 46, wherein the bluebuck gene variant comprises at least one change in the nucleotide sequence of the gene.

48. The method of claim 47, wherein the change in the nucleotide sequence is a substitution, an insertion, a deletion, or a combination thereof.

49. The method of claim 48, wherein the substitution, the insertion, the deletion, or a combination thereof is in a 5′ untranslated region of the gene, an intron of the gene, an exon of the gene, a 3′ untranslated region of the gene, regulatory region of the gene, or a combination thereof.

50. (canceled)

51. The method of claim 46, wherein:
(i) the bluebuck gene variant associated with gray/blue coat color and/or melanogenesis comprises:
(a) a nucleotide sequence having at least 80%, at least 85%, at least 90%, or at least 95% identity to a nucleotide sequence selected from the group consisting of SEQ ID NOs: 45-102, 120-146, and combinations thereof; or
(b) a nucleotide sequence selected from the group consisting of SEQ ID NOs: 147-204, 222-248, and combinations thereof; and/or
(ii) the bluebuck gene variant associated with altered facial pattern comprises:
(a) a nucleotide sequence having at least 80%, at least 85%, at least 90%, or at least 95% identity to a nucleotide sequence selected from the group consisting of SEQ ID NOs: 60, 74, 76, 95, 103-119, and combinations thereof; or
(b) a nucleotide sequence selected from the group consisting of SEQ ID NOs: 162, 176, 178, 197, 205-221, and combinations thereof.

52-54. (canceled)

55. The method of claim 46, wherein at least 2, 3, 4, 5, 6, 7, 8, 9, 10, 15, 20, 25, 30, 40, 50, 60, 70, 80, 90, 95, 100, 101, 102 (or any number in between) bluebuck gene variants are introduced into the cell.

56. The method of claim 46, wherein the transgenic animal further comprises at least one bluebuck gene variant associated with gray/blue coat color selected from:
(a) a loss-of-function agouti signaling protein (ASIP) variant;
(b) a defensin beta 103 (DEFB103) missense variant;
(c) a loss-of-function melanophilin (MLPH) variant;
(d) a premelanosome protein (PMEL) missense variant;
(e) a loss-of-function lysosomal trafficking regulator (LYST) variant; and/or
(f) a loss-of-function solute carrier family 45 member 2 (SLC45A2) variant.

57. A method of creating a transgenic animal with gray/blue coat color, the method comprising:
(a) obtaining a cell from the animal;
(b) introducing into the cell at least one bluebuck gene variant associated with gray/blue coat color selected from:
(1) a loss-of-function agouti signaling protein (ASIP) variant;
(2) a defensin beta 103 (DEFB103) missense variant;
(3) a loss-of-function melanophilin (MLPH) variant;
(4) a premelanosome protein (PMEL) missense variant;
(5) a loss-of-function lysosomal trafficking regulator (LYST) variant; and/or
(6) a loss-of-function solute carrier family 45 member 2 (SLC45A2) variant, whereby introducing the at least one bluebuck gene variant produces a recombinant cell; and
(c) utilizing the recombinant cell to produce a transgenic animal,
wherein the transgenic animal has a gray/blue coat color.

58. The method of claim 57, wherein the transgenic animal further comprises at least one bluebuck (Hippotragus leucophaeus) gene variant associated with altered facial pattern selected from an ADAMTS20 variant, a BMP4 variant, a DOCK7 variant, an EDN3 variant, an EDNRB variant, an ETS1L1 variant, an ETS1L2 variant, a FOXD3 variant, a HDAC1 variant, an IRF1 variant, a KIT variant, a KITLG variant, a MCOLN3 variant, a MITF variant, a PAX3 variant, a SNAI2 variant, a SOX10 variant, a SOX2 variant, a TRPM1 variant, a WNT3A variant, and a ZFHX4 variant.

59. The method of claim 46, wherein the transgenic animal fails to express an endogenous homologue of at least one of ABCB6, ACE2, AP3B1, AP3D1, ASIP, ATP7A, BCL2, BLOC1S2, BLOC1S3, BLOC1S4, BLOC1S5, BRAF, DCT, DCTN1, DCTN2, DOCK7, DSTYK, DTNBP1, EED, FIG. 4, GGT1, GPR143, HPS1, HPS3, HPS4, HPS5, HPS6, LYST, MBTPS1, MCOLN3, MFSD12, MITF, MKLN1, MLANA, MLPH, MREG, MYO5A, NOTCH1, NOTCH2, OCA2, PAH, PIKFYVE, PMEL, RAB27A, RAB38, RABGGTA, RAF1, SLC24A5, SLC45A2, SLC7A11, SNAI2, SPAG9, TPCN2, TYR, TYRP1, VAC14, VPS33A, YKT6, ASCC2, ATP6V0A2, CCDC53, CD72, CDK12, CHD8, COMMD5, DSCR3, EP300, FRYL, HDAC4, HNRNPA2B1L1, HNRNPA2B1L2, HNRNPA2B1L3, HNRNPA2B1L4, INTS8, NCOR1, RAB9A, RB1, SCAF4, SEC31A, SIAH1, SMG7, SNX13L1, SNX13L2, TBC1D5, WDFY1, ADAMTS20, BMP4, EDN3, EDNRB, ETS1L1, ETS1L2, FOXD3, HDAC1, IRF1, KIT, KITLG, PAX3, SOX10, SOX2, TRPM1, WNT3A, and ZFHX4.

60. The method of claim 46, wherein the transgenic animal fails to express the endogenous homologue of 2, 3, 4, 5, 6, 7, 8, 9, 10, 15, 20, 25, 30, 35, 40, 45, 50, 55, 60, 65, 70, 75, 80, 85, 90, 95, 100, 101, 102 (or any number in between) of ABCB6, ACE2, AP3B1, AP3D1, ASIP, ATP7A, BCL2, BLOC1S2, BLOC1S3, BLOC1S4, BLOC1S5, BRAF, DCT, DCTN1, DCTN2, DOCK7, DSTYK, DTNBP1, EED, FIG. 4, GGT1, GPR143, HPS1, HPS3, HPS4, HPS5, HPS6, LYST, MBTPS1, MCOLN3, MFSD12, MITF, MKLN1, MLANA, MLPH, MREG, MYO5A, NOTCH1, NOTCH2, OCA2, PAH, PIKFYVE, PMEL, RAB27A, RAB38, RABGGTA, RAF1, SLC24A5, SLC45A2, SLC7A11, SNAI2, SPAG9, TPCN2, TYR, TYRP1, VAC14, VPS33A, YKT6, ASCC2, ATP6V0A2, CCDC53, CD72, CDK12, CHD8, COMMD5, DSCR3, EP300, FRYL, HDAC4, HNRNPA2B1L1, HNRNPA2B1L2, HNRNPA2B1L3, HNRNPA2B1L4, INTS8, NCOR1, RAB9A, RB1, SCAF4, SEC31A, SIAH1, SMG7, SNX13L1, SNX13L2, TBC1D5, WDFY1, ADAMTS20, BMP4, EDN3, EDNRB, ETS1L1, ETS1L2, FOXD3, HDAC1, IRF1, KIT, KITLG, PAX3, SOX10, SOX2, TRPM1, WNT3A, and ZFHX4.

61. The method of claim 46, wherein the cell is a stem cell, a reprogrammed cell, a fibroblast cell, a mesenchymal cell, a nerve cell, a cartilage cell, a bone cell, a muscle cell, a fat cell, an epidermal cell, an endothelial progenitor cell (EPC), or a pericyte.

62. The method of claim 61, wherein the stem cell is selected from an induced stem cell, an embryonic stem (ES) cell, or a mesenchymal stem cell (MSC).

63-66. (canceled)

67. The method of claim 46, wherein the animal is an antelope.

68. The method of claim 67, wherein the antelope is selected from a roan antelope (Hippotragus equinus) or a sable antelope (Hippotragus niger).

69. A transgenic animal made by the method claim 46.

The application's sequence listing, which the Patent Office published only in electronic form, follows.

SEQUENCE LISTING (264 sequences)

SEQ ID NO: 1 - DNA, 537 bp, synthetic construct
  source 1..537: mol_type = other DNA
atgaggaagccagctactgggagttcccggggtcttttaaaaatctcacagcaacacatcttgcctctgctgcataagaacagggaagacgctcagctctggcttcccttagaggtaaaagacactcctcctgggatggatgtcagccgcctcctcctggctaccttgctggtgtgcctgtgcttcctcactgcctacagccacctggcacctgaggaaaagcccagagatgaaaggaacctgaagaacaactcttccatgaacctgttggatttcccttctgtctctatcgtggcactgaacaagaaatccaagaagatcagcagaaatgaagcggaaaagaagaaaagaccttccaagagaaaggcgccgatgaagaacgtggcacggacccggcccccgccgcctaccccctgcgtggccacccgcgatagctgcaagcctccagcgcccgcctgctgcgacccgtgcgccttctgccagtgccgctttttccgcagcgcctgctcctgccgcgtgctcaaccccacctgctga

SEQ ID NO: 2 - protein, 178 aa, synthetic construct
MRKPATGSSRGLLKISQQHILPLLHKNREDAQLWLPLEVKDTPPGMDVSRLLLATLLVCLCFLTAYSHLAPEEKPRDERNLKNNSSMNLLDFPSVSIVALNKKSKKISRNEAEKKKRPSKRKAPMKNVARTRPPPPTPCVATRDSCKPPAPACCDPCAFCQCRFFRSACSCRVLNPTC

SEQ ID NO: 3 - DNA, 201 bp, synthetic construct
  source 1..201: mol_type = other DNA
atgaggctctactaccttctctttgcgttgctcttcttgttcttgctgcctgttccaggcaatggcatcataagcgggttacgaaagtattattgcaaaataagaagcggccggtgtgctctgattggctgccttccaaaggaggaagagataggccgctgttccctgactggccgaaaatgctgccggaagaagaaatga

SEQ ID NO: 4 - protein, 66 aa, synthetic construct
MRLYYLLFALLFLFLLPVPGNGIISGLRKYYCKIRSGRCALIGCLPKEEEIGRCSLTGRKCCRKKK

SEQ ID NO: 5 - DNA, 1716 bp, synthetic construct
  source 1..1716: mol_type = other DNA
atggggaagacactggatctctccaagctcacggatgaagaggccaagcacgtctgggaggtggttcaacgggacttcgaccttcgaaggaaagaagaggaaagactagaggggttgaagggcaagattaagaaggaaaactccaagagggagctgctttcagacacggcccacctgaataacacccactgcgcccactgcctgcagccctaccggctccttgagacccccaagaggcaatgcctggactgccacctcttcacttgcagaggctgtggccacccccacccagaggaggaaggctggctctgtgatccctgccacctggccagggtcgtgaagatgggctcactggagtggtactatgggcacgtaagagcccgcttcaagcgcttcgggagtgcccaggtggtccggtccctctgtgggcggctgcagagagcaggtgggcctgagcagatgcccggagacccaagtggagaggaagagccgtttgaagaggatggagaagggggcacagcggcccaggcccagcccctcggcagccaaaaaaagcgcctcctccccatccacggctgggactttgaggccgactccgacgactccgatccatcctgtggtcacccgccaagcctgtcctcggtctcaggggccacggacggcctgcaggccctcacagatgacccctgcgcagaggagagcaccccccaggaggccgggatcctagaccaggctggtgccagggcccccgggtgccacccccgtccagaagagcagagggtcggcctctcacctgctggaccagacgagctctcggagctctgcctgccgggagagtcctgccctgcaggcccaagggtcactgccactcctgggacgaacatcctcaggaatgggcagctgtcctcccagtacctggccgacgtggacacctcggatgaagaaaacacctggactcagagagtggcctctcaccatcccagacagaaaggctggaccgcctctgacagccagcatccaggtggcgacgagcccacagatgctgacgcggaagaggcggccctcaagagaaagctggaggagttgaccagccacatcagtgaccaaggggtctcatccgcagaggaggaagagggcacggatgcaggggctgagatgggcagaagcaagaccatcgaggaccaccctggggccacttgggaggtgcgcacggcagcaggccaaacacccagctggggaaaggacccgctgagtcctggggaccccgagcagcccagcaggaccacggaggcagagctggcggagctggagggccaagtggccgccacaacttgcgaggtgcggcggacagagagccaggtttcaaatatcaagtccaggattgcagccttgcaggcagcggggctcacggtgcggccctcaggaaagccccagaggaagtctaacctcccgatctttcttccccggcttgtcaggaaatctggccagagtctgaaggatccaaacgcagaccctatggatgaggccgaggtggaggctgtgccctgtctcgtgaggaggaagctcagcaattaccccaaaagccaagacaaagatgatgactccttcagtcgaaagtccatgtaccgtggatccctgacccagagaaaccccaacggcaggaagagagctgccaaccacagctttgcgaaacccgtgatgacccaccagccctaa

SEQ ID NO: 6 - protein, 571 aa, synthetic construct
MGKTLDLSKLTDEEAKHVWEVVQRDFDLRRKEEERLEGLKGKIKKENSKRELLSDTAHLNNTHCAHCLQPYRLLETPKRQCLDCHLFTCRGCGHPHPEEEGWLCDPCHLARVVKMGSLEWYYGHVRARFKRFGSAQVVRSLCGRLQRAGGPEQMPGDPSGEEEPFEEDGEGGTAAQAQPLGSQKKRLLPIHGWDFEADSDDSDPSCGHPPSLSSVSGATDGLQALTDDPCAEESTPQEAGILDQAGARAPGCHPRPEEQRVGLSPAGPDELSELCLPGESCPAGPRVTATPGTNILRNGQLSSQYLADVDTSDEENTWTQRVASHHPRQKGWTASDSQHPGGDEPTDADAEEAALKRKLEELTSHISDQGVSSAEEEEGTDAGAEMGRSKTIEDHPGATWEVRTAAGQTPSWGKDPLSPGDPEQPSRTTEAELAELEGQVAATTCEVRRTESQVSNIKSRIAALQAAGLTVRPSGKPQRKSNLPIFLPRLVRKSGQSLKDPNADPMDEAEVEAVPCLVRRKLSNYPKSQDKDDDSFSRKSMYRGSLTQRNPNGRKRAANHSFAKPVMTHQP

SEQ ID NO: 7 - DNA, 1944 bp, synthetic construct
  source 1..1944: mol_type = other DNA
atggatctggtgctgagaaaataccttctccatgtggctctgatgggtgttcttctggctgtaggggccacagaaggacccagagacagggactggcttggtgtctcaaggcagctcagaattaaagcatggaacagacagctgtatccagagtggacagaaagccaggggcctgactgctggagaggtggccacgtatccctgaaggtcagcaatgatgggcctacactgattggggcaaatgcctccttctctattgccttacactttcctaaaaaccaaaaggtgctgccagatgggcaggtcgtctgggccaacaccaccatcatcaatgggagccaggtgtggggaggacagctggtatatccccaagaacctgatgatacctgcatcttccccgatgggggcgcctgcccttctggccctttatctcagaaaagatgctttgtttatgtctggaagacctgggaccagtactggcaagttctggggggcccagtgtctggattgagcattgggacagacaaggccgtgctgggcacacataagatggaagtgactgtctaccaccgccgggggtcccagagctacgtgcccctcgctcactccagttcaaccttcaccattactgaccaggtgcccttctccgtgagtgtgtctcagctgcaggccttggatggaaggaacaagcgcttcctgagaaagcagcctctgacctttgccctccagctccatgatcccagtggctatttggctggggctgacctttcctacacctgggactttggtgacagtacagggaccctgatctctcgggcactcatggccactcacacttacctagagtctggcccagtcactgcacaggtggtgctgcaggctgccattcctctcacctcctgtggctcctctccagttccaggcaccacagatagccatgtgacaactgcagaggcccctggaagcacagctggccaagtgcctactacagaagtcataggcaccacacctggccaggtgccaactgcagaggcccctggcaccacagttgggtgggtgccaaccacagagggtataggtaccacacctgagcaggtggcaacctccaaagtcttaagtaccacaccagcggagaagccaactgcaaaggctacaggtaggacacctgaagtgtcaactacagagccctctggagccacggttacacggggaacaactccagagctggtggagaccacagctggagaggtgtccactcctgagcctgcgggttcaaataccagcccattcatgcctacagaaggtactgcaggctccctgagccccctgccggatgacaccttagtcctggtgaagcgccaagcccccctggactgtgttctgtatcgctatggctccttttctctcaccctggacattgtccagggtattgagagtgctgagatcctacaggctgtgtcatccagcgaaggagatgcatttgagctgactgtgtcttgccaaggcgggctacccaaggaagcctgcatggacatttcatcgccagggtgtcagccgcctgcccagcggctgtgtcagcctgtgccccccagcccagcctgccagctggttttgcaccaggtactgaagggtggctcagggacctactgcctcaatgtgtctttggctgatgccaatagcctggcgatggtcagcacccagcttgtcatgcctgggcaagaagcaggcctcaggcaggctcctctgttcgtgggcatcttgctggtgctgacagctttgttgcttgcatctctgatatacaggcgatgtcttatgaagcaaggctcagcagtcccccttccccagctgccacacggtagaacccagtggctacgtctgccctgggtcttccgctcttgccccattggtgagagcaaacccctcctcagtgggcagcaggtctga

SEQ ID NO: 8 - protein, 647 aa, synthetic construct
MDLVLRKYLLHVALMGVLLAVGATEGPRDRDWLGVSRQLRIKAWNRQLYPEWTESQGPDCWRGGHVSLKVSNDGPTLIGANASFSIALHFPKNQKVLPDGQVVWANTTIINGSQVWGGQLVYPQEPDDTCIFPDGGACPSGPLSQKRCFVYVWKTWDQYWQVLGGPVSGLSIGTDKAVLGTHKMEVTVYHRRGSQSYVPLAHSSSTFTITDQVPFSVSVSQLQALDGRNKRFLRKQPLTFALQLHDPSGYLAGADLSYTWDFGDSTGTLISRALMATHTYLESGPVTAQVVLQAAIPLTSCGSSPVPGTTDSHVTTAEAPGSTAGQVPTTEVIGTTPGQVPTAEAPGTTVGWVPTTEGIGTTPEQVATSKVLSTTPAEKPTAKATGRTPEVSTTEPSGATVTRGTTPELVETTAGEVSTPEPAGSNTSPFMPTEGTAGSLSPLPDDTLVLVKRQAPLDCVLYRYGSFSLTLDIVQGIESAEILQAVSSSEGDAFELTVSCQGGLPKEACMDISSPGCQPPAQRLCQPVPPSPACQLVLHQVLKGGSGTYCLNVSLADANSLAMVSTQLVMPGQEAGLRQAPLFVGILLVLTALLLASLIYRRCLMKQGSAVPLPQLPHGRTQWLRLPWVFRSCPIGESKPLLSGQQV

SEQ ID NO: 9 - DNA, 11391 bp, synthetic construct
  source 1..11391: mol_type = other DNA
atgagcactgacagtaactcattggcgcgtgagtttctgaccgatgtcaaccggctttgcaatgcagtggtccagagagtggaggccagggaggaagaagaagaggaaacccacatggcaaccctcggacaataccttgtccatggccgaggatttctgttacttacgaagctaaattctatcattgatcaggcattgacatgcagagaagaactccttacccttcttctgtcactccttccattggtatggaagatacctgttcaagaagaaaaggcaacagactttaatctaccattctcagctggtataatcctgaccaaagaaaagaactcaagttctcaaagatctactcaggaaaaattatatttagaaggaagtgctccagctggtcaggtttctgcaaaagtaaatgtttttagaaaaagcaggcggcaacgtaaaactacccatcgttattctgtaagagatgcaagaaagacacagctttccacctcagattcagaagccaattcagatgacaaaagtatagtaatgactaaatacagaaggtcccatgtgctgcagcattttgtaaaacagtgtcctaaagaagaccaccttacagctaagcttaaccacttatcaaccaaagagcagactcctcctgacaccatggctttggaaaattccagagaaatgattccaagagaggagtcaaacactgacattttaagtgagccagctgccttgtctaccatcagtcacatgaacaattctccatttgacttatgtcatgttttgttatctttattagagaaagtttgtaagtttgacattaccttgaatcataattctgctctcgcagccagtgtagtgcccacactgactgaattcctagcgggttttggggactgctgtaatctcagtgacaatttggagggtcagatggtttctgcaggttggactgaagaaccagtggctttgattcaacggatgcttttccgaacagtactgcatctgatgtcagtagatattagtacggcagaggtgatgccagaaaatctcagaaaaaatttaacagaattgcttagagcagctttaaaaattagaacttgcctagaaaagcaacctgacccttttgccccaagacagaagaaaacactacaagagggtcaggaagattttgtgttttccaagtatcgtcatagagtgcttcttttacctgagctgctggagggagttctgcagatcctgatctgttgtcttcaaagtgcaacttcaaatccgttcttcttcagtcaagccatggatctggtccaagaattcattcagcatcacggatttcatttatttgaaacagcagttcttcaaatggaatggctggttgtaagagatggagttcctcccgaggcctcaggacatttgaaagccctcatcaataatgtcatgaaaataatgagcactgtcaaaaaagtgaagtcagagcagctgcatcattcaatgtgtacaagaaaaaggcacagacgttgcgaatattcccacttcatgcatcaccacagagacctctcaggtctgttggtctcggcttttaaaaaccaggtttccaagagcccatttgaagagacggcagatggagacgtgtattaccctgagcggtgctgttgcattgctgtgtgttcccaccagtgcttacgcttactgcagcaggcttccttgagcagcacgtgtgtccagatcctctcaggggttcagaacatcggcatatgctgttgtatggatcccaaatctgtaattgttcctctcctccatgcttttaagttgccagcactgaaaagctgtcagcagcatatactgaatattcttcacaaactcattttggaccagttaggaggagctgagataccgcagaaaactaaaaaagcagcttgcaacatctgtactgttgactcagatcaactagccaaattagaggagaccctgcagggaaactcttacaatgctgaaccttcctcaggtgtatctagtccaccctacagatttcaaggcatcctgcccagcagtggatcagaagacttgctgtggaaatgggatgccttagaggcttatcagaattttgttttcgaagaggacagattacggagtgtacagattgcaaatcacatttgcagtttgatccagaaaggcaatgttgttgttcagtggaaactgtataactgtgtatttaatcctgtgctgcaaagaggagttgaattagcacatcactgtcaacagcttagcattacttcagctcagactcatgtctgtagccatcataaccagtgtttgccccaggaagtacttcagatctatttaaaaactctgcctaccctgcttaaatcaagggtaataagagatttgtttttaagttgtaatggagtaaaccaaataattgaattaaattacttagatggtatccgaaatcactcactaaaagcatttgaaactctgataatcagcctaggggaacaacagaaagattcttcaattccaggtattgacgggatagaccttgaacagaaggagttgtcatctttaaatgtcagtactttgtataaccagcaagcttattcagattctcagagtcttagtaaattttatgcccggctcaaagatgcttatccaaagaaacgaaagtctgtggtgcaggatgttcatatcaacacaattaacctcttcctctgtgtggcgttcttgtgtgtaagtaaagaggcggaatctgacagagaattagccaatgattcagaggatacttctggctatgacagtacagcgagcgagcctttgcaacacatgctgccgtgtttctctctcgagagcctcgtcctgccctctcccaaacacatgcaccaagcagctgacatttggtccatgtgtcgttggatctacatgttaagtcccattttccagaaacagttttataggctcggtggtttccaagtatgccataaattaatatttatggtaatacaggaactgttcagaaatcctgaagaggagcaagggagaagggaaggagatcgaaacatggatgaaaatcaagatttaaacagaatttctcaacctgagatcactgtgaaagaagatttattatctttgactgtaaaaagtgaccccacaccagcagaactgagtagtctgaaaaagagtgctgacagtttaggtaaattcgagtcagagcatctttcttctgtaaatgtggaacagattccagctgtggaagctgttccagaggaaacagaagtctttatgagtcgaaaaagcgaaacctcacttcagggcatacgacttttggaagcccttctggccatttgtcttcatggcaccagagcttgtcagcaaaagatggagttggagttacccaatcagaacttgtctgtggaaactatattgcatgaaatgagggatcatctttccaagtcaaaggttatagaaacagaattagcaaagcctttatttgatgccctgcttcgagttgcactggggaatcattcagcagattttgagcatgatgatgctatgactgagaagagtcatcagtctgaagaagaactgtcatcccagcctggtgatttttcagaagaagctgaggattctcagtgttgcagttttaaacttctggttgaagaagaaggttatgaagcagatagtgaaagcaatcctgaggatagtgaatcctgggatgatggggtagacttaaagcctgaagcagaaagtttcattgcatcaagcagtccaaatgacttacttgaaaacctcgctcaaggggaaataatttatcctgagatttgtacgttggaattaaatttgctttctactggtaaagctaaacttgatgtgcttacccatgtatttgagagttttttgaaaatcatcagacagaaagaaaagaatatttttctactcatgcaacagggaactgtgaaaaatcttttaggaggattcttgagtattttaacacagactgattctgattttcaagcatgccagagagtattggtggatcttttggtatctttgatgagttcaagaacatgttcagaagagctaacccttcttttgagaatatttctggagaaatctccttgtacagaaattcttcttctgggtattctgaaaattgttgaaagtgacattactatgagtccttcacagtatctaaccttccctttactgtatactccaaatttaagcaatggtgtttcatcacaaaagtgccccgggattctcaacagtaaggccatggggctgttgagaagagcacgagtgtcacgttgtaagaaagagggcgagagtgagagttttccccagcagctgctttcctcttggcacatagccccagtccacttgcctttgctcggacagccacacctgtcagaaggcttcagcatttccctgtggtttaatgtggagtgtatcctcgaagctgagagtaccacagaaaaagggaagaagacaaggaaaagaaacaagtcactgattttattggacagtagttttgatggaacagagaacaacagactggaaggtgcagcatatgtgaatcctggtgaaaggctcatagaagaaggttgtattcatatgatctcattgggatccaaagcactgatgatccaagtgtgggctgatccccacaccggcacttttatttttcgtgtctgcatggattcaaacgatgatacaaaagttgtgttactagcacaggttgaatcacaggagaatattttcctcccaagcaaatggcaacatttagtactcacttacttacagcagccccaagggaaaaagaatatccatgggaaactctccatatggatctctggacagaggaagcctgatgttactttggattttatgcttccaagaaaaacgagtttgtcatctgacagcaataaaacattttgcatgatcggccattgtttatcatcccaagaagaatgtttgcaattggctggaaaatggggcctgggaaatttactcctcttcaatggggctaagattggctcgcaagaggcattttatctatatgcttgtggacccaaccatacgtccataatgccatgtaaatatggcaagcctgtgaatgactactccaagtacattaataaagaaattttgcaatgtgaacaaatcagagaactttttatgaccaacaaagatgtggacattggtcttttaattgaaagtctttcagttgtatatacaacttactgtcctgctcagtataccatctatgagccagttattagacttaaaggtcaaatgaaaacccaactctctcaaagacccttcagctcaaaagaagttcacagtatcttactagaacctcatcatctaaagaatctccagcccactgaatgtaaaacccttcaaggcattttgcatgagattggtggaactggtatatttgtctttctctttgctagggttgtggaactcagtagctgtgaagaaactcaagcgttagcattgagagttatactctcattaattaaatacaaccaacagagaatacatgagttagaaaactgtaatggactttccatgattcatcaggtgttgataaaacaaaaatgcattgttggctttcacattttgaagacccttcttgaaggttgctgtggtgaagatattattcatatcaatgagaatggagaatttaagttggatgtagagtctaatgctataatccaggatgttaaactgttagaggaactattgctagactggaagatatggaataaagcggagcacggtgtttgggaagctctgctggcagccctagaagtcctcatcagagcagaccaccagcagcagatgtttaatattaagcagttattgaaagctcgagtagttcatcactttctactgacctgccaggttttgcaggaacacaaagaggggcagcttatatccatgccccgagaggtttgtaaatcatttgtgaaaattacagcagaagtccttggatctcctccagatttggaattattgacgattatcttcaatttcctgttagcggttcatcctcctactaatacttatgtttgtcacaaccccacaaacttctatttttctttgcacatagatggcaagatctttcaggaaaaagtgcagtcaatcatgtacttgaggcattctagcagtggaggaaagtctgttactagccctggatttatgataataagcccatcagattttactgcttcaccacctgaaggaaacaggtcatccagtgctgttccaaagcaggtagctgccagtatgctgcgttctagaagcctcccagcatttcctacttcttcacctcacataaagccatggaaactgactggaagtttgggttgtagtattgacaagttacagagttttgtagatgatggcgttgcttcccagccagagaaatggagccctctgaggagttccgagacactagaaaaaaccaaacaagatgccttcgtcagtagctgtgagtctgcaaaaatggtttgtgaaacggaagctgccctttcggcccaagcctctgtcagtgatgccccaaaaggagtcttggaacttccggcggtcaacatagatcagaaagacttcggagcagagcccagatcagacgacgacagtcctggggacgagtcctgcccacgccgacctctttacctgaagggactggcctcgttccagcgcagccacagcaccattgccagcctggggctagctttcccctctcagaacggctctgcggctgtcggccggtggccaagtcttgttgacaggaactccaacgactgggaaaacttcgctcttcctgtcggttatgagccacaccacagccgaactacaggtgctcacagtgtaaccgaagactgcttggtacctatatgctgtgggttgtatgaactcctaagtggagttcttctcatcctgcctgatgttatgctggaagatgtgatggacgggctcattcaagcagatacgcttttagtcctcgccaaccacccatcacctgctgtacaacaagaagttattaaactattagatgcatattttaatagagcatccaaggaacaaaaagataaatttctgaagaatcgtgggttttctttactagccaaccagttatatcttcatcggggaactcaggaattattagaatgcttcattgaaatgttctttgggcgacgtattggccttgatgaagaatttgatttggaagctgtgagcaacatgggacttttccagaagtggtctgtcattcctatactgggactaatagagacctccttatacgacaatgtgctcttgcataatgctctcttacttcttctccaaatattaaattcttgttctaaggtagcagatatgttgttggataatggtctactctacgtgttatgtaatacagtagcaaccctgaatggattagaaaagatcattcctttgaatgaatacagattacttgcttgtgatatacagcaacttttcatagcagttacaattcatgcttgcagttcctcaggctcacagtattttagagttattgaagatcttattgtactgcttggatatcttcaaaatagcaaaaacaggaggacccaaaatatggctgttgctctacagtttagagttctccaggctgctatggaatttataaggaccactgcaaatcatgactctgaaaaccttacagattcacttcagtcgccttctgctccccatcatacaatgtttcaaaagcgaaagagcgttgctggtcctcgaaaatttctccttgctcaaactgactctctgctgatgaaaatgcgttcagtagcaagtgatgaacttcatgtgatgatgcaacggagaatgagccaagagaaccctgtccaggcgactgaaacagagcttgcacagaggttgcagaggctcaccgtttttgcagttaacaggattgtttatcaagaatttaatccagatattattgacattttgagtactccagaaagtacaactcaaagcaggacctcagcttcccagactgaaatttctgaagaaaatattcatcatgaacagccttctgttttcaatccatttcagaaagaaatgttcatgtatctggtagaaggattcaaagtatctagtgcttcaggtaaaaccagtagttccaaacagcagtgggctaaaatcttgtggtcttgtaaggaaaccttccgaatgcaacttgggagactgctcgtgcatatgttgtctccagcccacccttcacaagagagaaagcaaatttttgaaatagttcgtgaaccaaatcatcaggaaatactgcgagactgtcttagcccatccctgcaacatggagccaaattagttttgtatttgtcagagttgatacataatcacaaagatgaattgactgaagaagaactagacacagcagaactgcttatgaatgctttaaaattatgtggtcataagtgcatccctcccagtgcctcaacaaaatcagaccttattagagtgatcaaagaggaacaaaggaaatatgaaactgaagaaggtgtgaataaagccaactggcagaaaacagttaataataatcagcaaagtctctttcagcgtttggattcaaaatcaaaggatatatctaaaatagctgcagatatcacccaggcagtgtctctttcccaaggaattgagagaaaaaaggtgatccagcatatcagaggaatgtacaaagtggatctgagtgccagcagacactggcaggagcttattcaacaactgacgcatgacagagcagtctggtatgaccccatctactatccaacttcatggcagttggatccaacagaagggccaaatcgagagaggagacgtttacagagatgttacttaactattccaaataagtatctgcttagggatcgacagaaatcagaagatgtggtcaaaccaccactctcttacctatttgaagacaaaactcattcttctttctcttctactgtaaaagacaaggctgcaagtgagtctataagagtcaatcgaaggtgtatcagcgttgcaccatctagagagacagctggtgaattgttattaggtaaatgtggaatgtattttgtggaagataacgcttctgatacagttgagagttctagccttcaaggagaattggaaccagcatcgttttcctggacatatgaagaaattaaagaagttcacaagcgttggtggcagttgagggataatgctgtagaaatatttttaacaaatggcagaacactcctgttagcatttgataacaccaaggttcgcgatgatgtataccacagtatactaaccaataacctccctaatcttctggaatatggcaatatcaccgctctgacaaatttgtggtatactgggcaaattactaattttgagtatctgactcacttaaacaaacatgccggccgatctttcaatgatctcatgcagtatccagtgttcccgttcatactggcagactatgttagtgagacccttgacctcagcgacccatcagtctacagaaatctctccaagcccatagctgtgcagtataaagaaaaagaagaccgttatgtggacacatacaagtacctggaggaggagtaccgcaggggcgcccgggacgacgaccccgtgcccccggtgcagccctaccactacggctcgcattactccaacagcggcaccgtgctgcacttcctggtcaggatgccgcccttcacgaagatgttcctagcgtaccaagatcaaagttttgacattccagacagaacttttcattctacaaatacaacttggcgcctctcatcttttgagtccatgactgatgtgaaagaacttatcccagagtttttctatcttccagaattcttagttaaccgtgaaggtttcgattttggtgtgcgtcagaacggtgagcgggttaatcacgtcaacctccctccttgggcacgtaacgatccccgtctttttatcctcatccatcgacaggctctagagtctgactacgtgtcccagaacatctgtcagtggattgacttggtattcgggtataaacaaaaagggaaggcctctgtccaagccatcaatgtttttcatcctgctacatattttggaatggatgtctctgcagttgaagatccagttcaaagacgagcactagaaaccatgataaaaacctatggccagacccctcgtcagctgttccaatcagcccacgcgagcagacctggctccaagctcaacatcgaaggggagcttcctgccgccgtggggttgttagtgcagtttgctttcagggaaaccagagaacaggtcaaggaaattacctatccgagtcctttgtcatggataaaaggcttgaaatggggggagtatgttggttccccaagtgctccagttcctgtggtctgcttcagccagccccacggagaaagatttggttgtctccaggctctgcccactagagcaatatgtggtttgtcccaaaatttctgtcttctgatgacatatagcaaagaacaaggtgtgagaagcatgaacagtactgacattcagtggtcagccatcctgagctggggatatgctgataacattttaaggttgaagagtaaacaaagcgagcctccaataaactttatacaaagttcacagcaatatcaggtgactagttgtgcttgggtccctgacagctgccagctgttcactgggagcaaatgtggtgtcatcacagcttactcaaacaggttcacaagcggcacgccttcagagatagaaatggagtctcagatacatctgtatgggcacacagaagagataaccagtttatgtgtctgcaaaccgtatagtataatgataagtgtgagcagagatggaacctgcatcgtatgggatttgaacagattatgctacgtacaaagtctggcgggacacaaaagcccagtcacggctgtctctgccagcgagactacaggtgacattgctacagtgtgtgactcagctggtggaggcagtgacctcagactctggacagtgaatggggacctcgttggacacgtccactgcagagagatcatttgttccgtggctttctctaaccagcctgagggaatatctatcaatgtgattgctgggggattagaaaatggaattgtaaggttatggagtacttgggacttaaagcctgtgcgggaaattacgtttcctaaatcaaataaacctattgtaagccttacattttcctgtgatggccaccatttgtacacagcgaacagcgatgggactgtgatcgcctggtgtcggaaggaccagcagcgcttgaaacatccaatgttctattccttcctcagcagctacgcagccggatga

SEQ ID NO: 10 - protein, 3796 aa, synthetic construct
MSTDSNSLAREFLTDVNRLCNAVVQRVEAREEEEEETHMATLGQYLVHGRGFLLLTKLNSIIDQALTCREELLTLLLSLLPLVWKIPVQEEKATDFNLPFSAGIILTKEKNSSSQRSTQEKLYLEGSAPAGQVSAKVNVFRKSRRQRKTTHRYSVRDARKTQLSTSDSEANSDDKSIVMTKYRRSHVLQHFVKQCPKEDHLTAKLNHLSTKEQTPPDTMALENSREMIPREESNTDILSEPAALSTISHMNNSPFDLCHVLLSLLEKVCKFDITLNHNSALAASVVPTLTEFLAGFGDCCNLSDNLEGQMVSAGWTEEPVALIQRMLFRTVLHLMSVDISTAEVMPENLRKNLTELLRAALKIRTCLEKQPDPFAPRQKKTLQEGQEDFVFSKYRHRVLLLPELLEGVLQILICCLQSATSNPFFFSQAMDLVQEFIQHHGFHLFETAVLQMEWLVVRDGVPPEASGHLKALINNVMKIMSTVKKVKSEQLHHSMCTRKRHRRCEYSHFMHHHRDLSGLLVSAFKNQVSKSPFEETADGDVYYPERCCCIAVCSHQCLRLLQQASLSSTCVQILSGVQNIGICCCMDPKSVIVPLLHAFKLPALKSCQQHILNILHKLILDQLGGAEIPQKTKKAACNICTVDSDQLAKLEETLQGNSYNAEPSSGVSSPPYRFQGILPSSGSEDLLWKWDALEAYQNFVFEEDRLRSVQIANHICSLIQKGNVVVQWKLYNCVFNPVLQRGVELAHHCQQLSITSAQTHVCSHHNQCLPQEVLQIYLKTLPTLLKSRVIRDLFLSCNGVNQIIELNYLDGIRNHSLKAFETLIISLGEQQKDSSIPGIDGIDLEQKELSSLNVSTLYNQQAYSDSQSLSKFYARLKDAYPKKRKSVVQDVHINTINLFLCVAFLCVSKEAESDRELANDSEDTSGYDSTASEPLQHMLPCFSLESLVLPSPKHMHQAADIWSMCRWIYMLSPIFQKQFYRLGGFQVCHKLIFMVIQELFRNPEEEQGRREGDRNMDENQDLNRISQPEITVKEDLLSLTVKSDPTPAELSSLKKSADSLGKFESEHLSSVNVEQIPAVEAVPEETEVFMSRKSETSLQGIRLLEALLAICLHGTRACQQKMELELPNQNLSVETILHEMRDHLSKSKVIETELAKPLFDALLRVALGNHSADFEHDDAMTEKSHQSEEELSSQPGDFSEEAEDSQCCSFKLLVEEEGYEADSESNPEDSESWDDGVDLKPEAESFIASSSPNDLLENLAQGEIIYPEICTLELNLLSTGKAKLDVLTHVFESFLKIIRQKEKNIFLLMQQGTVKNLLGGFLSILTQTDSDFQACQRVLVDLLVSLMSSRTCSEELTLLLRIFLEKSPCTEILLLGILKIVESDITMSPSQYLTFPLLYTPNLSNGVSSQKCPGILNSKAMGLLRRARVSRCKKEGESESFPQQLLSSWHIAPVHLPLLGQPHLSEGFSISLWFNVECILEAESTTEKGKKTRKRNKSLILLDSSFDGTENNRLEGAAYVNPGERLIEEGCIHMISLGSKALMIQVWADPHTGTFIFRVCMDSNDDTKVVLLAQVESQENIFLPSKWQHLVLTYLQQPQGKKNIHGKLSIWISGQRKPDVTLDFMLPRKTSLSSDSNKTFCMIGHCLSSQEECLQLAGKWGLGNLLLFNGAKIGSQEAFYLYACGPNHTSIMPCKYGKPVNDYSKYINKEILQCEQIRELFMTNKDVDIGLLIESLSVVYTTYCPAQYTIYEPVIRLKGQMKTQLSQRPFSSKEVHSILLEPHHLKNLQPTECKTLQGILHEIGGTGIFVFLFARVVELSSCEETQALALRVILSLIKYNQQRIHELENCNGLSMIHQVLIKQKCIVGFHILKTLLEGCCGEDIIHINENGEFKLDVESNAIIQDVKLLEELLLDWKIWNKAEHGVWEALLAALEVLIRADHQQQMFNIKQLLKARVVHHFLLTCQVLQEHKEGQLISMPREVCKSFVKITAEVLGSPPDLELLTIIFNFLLAVHPPTNTYVCHNPTNFYFSLHIDGKIFQEKVQSIMYLRHSSSGGKSVTSPGFMIISPSDFTASPPEGNRSSSAVPKQVAASMLRSRSLPAFPTSSPHIKPWKLTGSLGCSIDKLQSFVDDGVASQPEKWSPLRSSETLEKTKQDAFVSSCESAKMVCETEAALSAQASVSDAPKGVLELPAVNIDQKDFGAEPRSDDDSPGDESCPRRPLYLKGLASFQRSHSTIASLGLAFPSQNGSAAVGRWPSLVDRNSNDWENFALPVGYEPHHSRTTGAHSVTEDCLVPICCGLYELLSGVLLILPDVMLEDVMDGLIQADTLLVLANHPSPAVQQEVIKLLDAYFNRASKEQKDKFLKNRGFSLLANQLYLHRGTQELLECFIEMFFGRRIGLDEEFDLEAVSNMGLFQKWSVIPILGLIETSLYDNVLLHNALLLLLQILNSCSKVADMLLDNGLLYVLCNTVATLNGLEKIIPLNEYRLLACDIQQLFIAVTIHACSSSGSQYFRVIEDLIVLLGYLQNSKNRRTQNMAVALQFRVLQAAMEFIRTTANHDSENLTDSLQSPSAPHHTMFQKRKSVAGPRKFLLAQTDSLLMKMRSVASDELHVMMQRRMSQENPVQATETELAQRLQRLTVFAVNRIVYQEFNPDIIDILSTPESTTQSRTSASQTEISEENIHHEQPSVFNPFQKEMFMYLVEGFKVSSASGKTSSSKQQWAKILWSCKETFRMQLGRLLVHMLSPAHPSQERKQIFEIVREPNHQEILRDCLSPSLQHGAKLVLYLSELIHNHKDELTEEELDTAELLMNALKLCGHKCIPPSASTKSDLIRVIKEEQRKYETEEGVNKANWQKTVNNNQQSLFQRLDSKSKDISKIAADITQAVSLSQGIERKKVIQHIRGMYKVDLSASRHWQELIQQLTHDRAVWYDPIYYPTSWQLDPTEGPNRERRRLQRCYLTIPNKYLLRDRQKSEDVVKPPLSYLFEDKTHSSFSSTVKDKAASESIRVNRRCISVAPSRETAGELLLGKCGMYFVEDNASDTVESSSLQGELEPASFSWTYEEIKEVHKRWWQLRDNAVEIFLTNGRTLLLAFDNTKVRDDVYHSILTNNLPNLLEYGNITALTNLWYTGQITNFEYLTHLNKHAGRSFNDLMQYPVFPFILADYVSETLDLSDPSVYRNLSKPIAVQYKEKEDRYVDTYKYLEEEYRRGARDDDPVPPVQPYHYGSHYSNSGTVLHFLVRMPPFTKMFLAYQDQSFDIPDRTFHSTNTTWRLSSFESMTDVKELIPEFFYLPEFLVNREGFDFGVRQNGERVNHVNLPPWARNDPRLFILIHRQALESDYVSQNICQWIDLVFGYKQKGKASVQAINVFHPATYFGMDVSAVEDPVQRRALETMIKTYGQTPRQLFQSAHASRPGSKLNIEGELPAAVGLLVQFAFRETREQVKEITYPSPLSWIKGLKWGEYVGSPSAPVPVVCFSQPHGERFGCLQALPTRAICGLSQNFCLLMTYSKEQGVRSMNSTDIQWSAILSWGYADNILRLKSKQSEPPINFIQSSQQYQVTSCAWVPDSCQLFTGSKCGVITAYSNRFTSGTPSEIEMESQIHLYGHTEEITSLCVCKPYSIMISVSRDGTCIVWDLNRLCYVQSLAGHKSPVTAVSASETTGDIATVCDSAGGGSDLRLWTVNGDLVGHVHCREIICSVAFSNQPEGISINVIAGGLENGIVRLWSTWDLKPVREITFPKSNKPIVSLTFSCDGHHLYTANSDGTVIAWCRKDQQRLKHPMFYSFLSSYAAG

SEQ ID NO: 11 - DNA, 1731 bp, synthetic construct
  source 1..1731: mol_type = other DNA
atgaaagaatttgagccccgcccccagcctgaccgtctctgcgggccgtgcagccaggctccatgtcaaatccacctgggagcgcgaaccccagggccacggagaaggtggtgggcttgccggcaagttcctcgcccagtggccatgggagacaagagtgagcagtctgccctacgcacctataaatcccttgatgaggagggcctcttcggctctgcggagctgcccaaaagacccaccgggaaactggttatgcacagcatggccatgttcggccgggagttctgctatgcggtggaggcggcctacgtgactccagtgctgctcagtgtgggcctgcccaagagcctgtacagcatggtgtggctcctgagtcccatcttggggttcctgctgcagcccgtggtgggatcggccagcgaccactgccgggcccggttgggccgccggagaccctacatcctcacgctgtgcctcctgatgctcctgggcatggccatgtacctcaatggggacgcgatcatatcagctttgattgctgacccaaggaggaagcagatttgggccataagtgtcaccatgataggtgtggttctctttgattttgctgctgacttcattgatgggcccatcaaagcctacttgtttgatgtctgcactcatcgagataaggagaggggcctccactaccatgccctcttcacaggtttgggaggtgccctcggttaccttttaggtgccattgactgggcccacttggaactgggaagactgctgggcacggaattccaggtcatgttcttcttctcctcgctggtgctcactttgtgttttattatccatctgtgcagtatccctgaagccccacttacagatgttgcaaaggacattccctcacagcaagcctcccaggaccttgccttgtcatcagacaaaatgtacgaatatgggtctattgagaaagtaaaaaatggttatgtaaaccaagagttggtgctgcagggaggaaaaaccaaaaatcctgctgaacagactcagaggacaatgaccttgagatcactgttgagagcattgaggagcatgccccctcattaccgctgcctttgcatcagccacctcattggatggactgccttcctgtccaacatgctcttcttcacagacttcatgggccagattgtgtaccacggggacccctacggtgcccacaactccacagagttcctcatctaccaaagaggggttgaggttggatgttggggcttgtgcatcaactctatgttctcctcactttattcttactttcagaaagttttggttccctgcgtcggattaaagggtctttactttatggggtatttgctgtttggcctgggcacaggattcatcgggctcttcccaaatgtctactccaccctggccatgtgcaccttatttggcgtgatgtccagcaccctgtacacggtaccctttaccctcatcgctgtgtatcaccgtgaggagcagaagcagcgggccctgggtgggggcccggatggcagcggcagagggcagggcctggactgcgctgccctcacatgcatggtgcagctggctcagatcctggtcggaagtggcctgggccttctcgtcaacacagccggcagcgtcgtcgtcgtggtgatcacagcctctgcggtggcactgattggctgttgctttgtggctctctttgttagatatgtggattag

SEQ ID NO: 12 - protein, 576 aa, synthetic construct
MKEFEPRPQPDRLCGPCSQAPCQIHLGARTPGPRRRWWACRQVPRPVAMGDKSEQSALRTYKSLDEEGLFGSAELPKRPTGKLVMHSMAMFGREFCYAVEAAYVTPVLLSVGLPKSLYSMVWLLSPILGFLLQPVVGSASDHCRARLGRRRPYILTLCLLMLLGMAMYLNGDAIISALIADPRRKQIWAISVTMIGVVLFDFAADFIDGPIKAYLFDVCTHRDKERGLHYHALFTGLGGALGYLLGAIDWAHLELGRLLGTEFQVMFFFSSLVLTLCFIIHLCSIPEAPLTDVAKDIPSQQASQDLALSSDKMYEYGSIEKVKNGYVNQELVLQGGKTKNPAEQTQRTMTLRSLLRALRSMPPHYRCLCISHLIGWTAFLSNMLFFTDFMGQIVYHGDPYGAHNSTEFLIYQRGVEVGCWGLCINSMFSSLYSYFQKVLVPCVGLKGLYFMGYLLFGLGTGFIGLFPNVYSTLAMCTLFGVMSSTLYTVPFTLIAVYHREEQKQRALGGGPDGSGRGQGLDCAALTCMVQLAQILVGSGLGLLVNTAGSVVVVVITASAVALIGCCFVALFVRYVD

SEQ ID NO: 13 - DNA, 522 bp, synthetic construct
  source 1..522: mol_type = other DNA
atgtctcagagcaatcgggaactagtggttgactttctctcttacaagtttttccagaaaggatacagctggagtcagtttagtgatatggaagagaacagaactgagaccctagaagggagagaatcagatatggaaacccccagtgccatcagtggcagcccatcctggcacctggcagatagccctgcggtgaatggagccactggtcagagcagaagcttggacgccgggaaaatgatccccctggcagtggtgaagcaagccctgagggaggcaagcaatgagtttgaactgaggtaccaacagacattcagcgacctgatgtcccagctccacatcaccccagggacaacatatcagagctttgaacagaatggtgactgggacatttttgtggaactctacgaaaacaagacagcaactgagagccaaaagggtcaagagcacttcaaccgctggtccctgatggacatgactgtggctggtatggctctgctgggcttgctcttcaacgcataa

SEQ ID NO: 14 - protein, 173 aa, synthetic construct
MSQSNRELVVDFLSYKFFQKGYSWSQFSDMEENRTETLEGRESDMETPSAISGSPSWHLADSPAVNGATGQSRSLDAGKMIPLAVVKQALREASNEFELRYQQTFSDLMSQLHITPGTTYQSFEQNGDWDIFVELYENNTATESQKGQEHFNRWSLMDMTVAGMALLGLLFNA

SEQ ID NO: 15 - DNA, 1575 bp, synthetic construct
  source 1..1575: mol_type = other DNA
atgagcccccttgggtgggggcttctgctcggctgtctgggctgtgcgctcccgtctggggcctgggcgcagtttccccgggtctgcatgacggtgggcagcctgcgggccaaggaatgctgcccgccgctgggcgccgaccccgccaatgtctgcggctcccaggagggccggggccagtgcgcggaggtgcagaccgacaccaggccctggagcggtccttacgtcctgcgcaaccaggacgaccgcgagcgatggccccggaagttcttcgaccggacctgcaggtgcacaggaaacttcgccggctataactgtggagactgcaggtttggctggaccggccccaaatgcgatcagaagaaaccattggttgtccggcgagatgtccattccttgacccctcaagagagggagcaattcttgggcgccttagacctcgcaaagtacactccgcaccctgactacgtgatcaccacgcaacactggctgggcctcctggggcccaatgggacccaaccacagattgccaactgcagcatttacgatttctttgtgtggctccattactattccgtcagagatacattattaggaccagggcgcccatacaaggctatagatttctcacaccaaggacctgcctttgttacctggcaccggtaccacttgttatggctggaaagggatctccagcgccttactggcaacgagtccttggctttgccctactggaactttgccactggcaggaacgagtgtgatgtgtgcacagaccagctgcttggggcagcaaggcaagacgatccgactctgattagtcagaactcacgattctccagctgggagattgtctgtgatagcttgaatgactacaaccgccgggtcaccttgtgcaatggaacctatgaaggcttgctgaaaagaaaccaaatgggaagaaacagtgagaaattgccaactttaaaagacatacaaaattgcctgtctctcaataagtttgacagtcctccgttcttccagaactctaccctcagcttcaggaatgccctggaaggatttggcaaagcagatgggaccctggactctcaagtgatgagtcttcataacctggttcattccttcctgaatgggacaagtgctttgccacattctgctgccaatgatcctgtttttgtggtccttcattccttcaccgatgccatttttgacgagtggatgaaaagattcaatccccctgtggatgcctggcctcaggagctggcacccattggtcacaatcggatgtataacatggttcctttcttccctccagtgactaatgaggaactctttttaaccgcagaccaacttggctacagttatgccattgatctgccagactcttctgctttaatttcagttgaagaaactccagactggaccacagtgctctcagtggttacggggatgctcgtggttttggttgtcctttttgcattgatgcttttccttcaatatagaagacttcgaaaagggtatacacccttaacggagacacagctaagcaacaaaagatacaccgaagaggcctag

SEQ ID NO: 16 - protein, 524 aa, synthetic construct
MSPLGWGLLLGCLGCALPSGAWAQFPRVCMTVGSLRAKECCPPLGADPANVCGSQEGRGQCAEVQTDTRPWSGPYVLRNQDDRERWPRKFFDRTCRCTGNFAGYNCGDCRFGWTGPKCDQKKPLVVRRDVHSLTPQEREQFLGALDLAKYTPHPDYVITTQHWLGLLGPNGTQPQIANCSIYDFFVWLHYYSVRDTLLGPGRPYKAIDFSHQGPAFVTWHRYHLLWLERDLQRLTGNESLALPYWNFATGRNECDVCTDQLLGAARQDDPTLISQNSRFSSWEIVCDSLNDYNRRVTLCNGTYEGLLKRNQMGRNSEKLPTLKDIQNCLSLNKFDSPPFFQNSTLSFRNALEGFGKADGTLDSQVMSLHNLVHSFLNGTSALPHSAANDPVFVVLHSFTDAIFDEWMKRFNPPVDAWPQELAPIGHNRMYNMVPFFPPVTNEELFLTADQLGYSYAIDLPDSSALISVEETPDWTTVLSVVTGMLVVLVVLFALMLFLQYRRLRKGYTPLTETQLSNKRYTEEA

SEQ ID NO: 17 - DNA, 678 bp, synthetic construct
  source 1..678: mol_type = other DNA
atggcgcacgcggggggaacaggctacgataaccgagagatcgtgctcaagttcatccactacaagctgtcgcagcggggctacgagtgggatgccggggccgcccccgcgccgggcatcctgtcctcccagccgggccgcacgcccgcgccctccaggacctccccgccgccgcccccggccgccgccgccgccgccgccgccgggcctgcgcccagcccggtgccacctgtggtccacctgaccctgcgccaggccggcgatgacttctctcggcgctaccgccgcgacttcgccgagatgtccagccagctgcacctgacgcccttcaccgcgaggggacgcttcgccacggtggtggaggagctcttcagggacggggtgaactgggggcgcatcgtggccttctttgagttcggaggggtcatgtgtgtggagagcgtcaaccgggagatgtcgccgctggtggacagcatcgccctgtggatgaccgagtacctgaaccggcacctgcacacctggatccaggacaacggaggctgggacgcctttgtggagctgtatggccctagtatgcggcccctgtttgatttctcctggctgtctctgaaggcactgctcagtctggccctggtgggcgcttgcatcaccctgggtgcctatctgggccataagtga

SEQ ID NO: 18 - protein, 225 aa, synthetic construct
MAHAGGTGYDNREIVLKFIHYKLSQRGYEWDAGAAPAPGILSSQPGRTPAPSRTSPPPPPAAAAAAAAGPAPSPVPPVVHLTLRQAGDDFSRRYRRDFAEMSSQLHLTPFTARGRFATVVEELFRDGVNWGRIVAFFEFGGVMCVESVNREMSPLVDSIALWMTEYLNRHLHTWIQDNGGWDAFVELYGPSMRPLFDFSWLSLKALLSLALVGACITLGAYLGHK

SEQ ID NO: 19 - DNA, 5643 bp, synthetic construct
  source 1..5643: mol_type = other DNA
atggccgcgtccgagctctacacaaagtttgccagggtttggatacctgatcctgaagaagtttggaagtcagcagagctgctcaaagattataagccaggagataaagttctcctgcttcaacttgaggatggaaaggatttggaatatcgtctagatccaaagaccaaggaactgcctcatttaagaaaccctgacatacttgtgggtgaaaatgacctcacagccctcagttatcttcacgagcctgctgtactccataatctcagagtccgctttattgattccaaacttatttatacatattgtggtatagtcctagtagctataaatccttatgaacagctgcctatttatggagaagatattattaatgcatatagtggtcaaaacatgggtgatatggatccacatatctttgcagtagctgaagaagcttacaagcaaatggccagagatgaacgaaatcagtccatcattgtaagtggagagtctggggcaggaaaaacagtctcagctaagtatgccatgagatactttgcaacagtcagtggttctgccagtgaagccaatgttgaggaaaaggtattggcttccaaccccatcatggagtcaattggaaatgctaaaacaaccaggaatgataatagtagccgttttgggaagtatattgagattggttttgataagagatatcgaatcatcggtgccaatatgagaacttaccttttagagaaatccagagtggtgttccaggcagaagaggagagaaactatcatatcttctatcaactttgtgcctcagcaaacctacctgaatttaaagtgctgcgattaggagatgcaaataactttcattacacgaatcaaggtggcagtcctgtgattgaaggagtagatgatgccaaggagatggcacataccaggcaggcctgcactttgctaggaattagtgaatcttatcagatgggaattttccgaatacttgctggcatcctacacttaggcaatgttgtgtttatgtctcgagattcagacagctgcacaatccctcccaagcatgaacccctcagcatcttctgtgacctcatgggtgtggactttgaggagatgaatcactggctctgccatcggaagctggccactgccacagagacgtacatcaagcccatctccaagctgcaggccacgaatgcccgtgatgcactggccaagcacatctatgccaagctctttaactggattgtagatcatgtcaatcaggcactccattctgctgtcaaacagcattcttttatcggtgtgctggatatttatggatttgaaacatttgagataaatagttttgaacagttttgcataaattatgcaaatgaaaaactacagcaacaattcaatatgcacgttttcaaattagaacaagaagaatatatgaaagaacaaattccatggacactcatagatttttatgataatcagccttgcattaatcttatagaatctaaactgggcattctagatttgctggatgaggaatgcaagatgcctaaaggtacagatgacacttgggcccaaaaactgtacaacacacatttgaacaaatgtgcactatttgagaagccccgcctatcaaacaaagctttcatcatccagcattttgctgacaaagtggaataccagtgtgaaggctttctggaaaagaataaagacactgtttttgaagaacaaattaaagttcttaaatcaagcaagtttaagatgctaccagaattatttcaagacgatgagaaggtcatcagcccaacctcagccacctcctcagggcgcacgcctctcacccgcaccccttcaaagcccaccaaaggcagaccaggccagacggccaaagagcacaagaaaacagtagggcaccagttccgaaactccctccacctacttatggagactctgaatgccactacacctcactatgtgcgctgtatcaagcctaacgacttcaagttcccattcacgtttgatgagaagagggcagtgcagcagctgagagcatgtggtgtcctggaaaccattcggatcagcgcagcaggtttcccctctcggtggacttaccaagaatttttcagccgctatcgggtcctaatgaagcaaaaagatgtgctaagtgacagaaagcaaacatgcaagaatgttttagagaaactgatagtggacaaggacaaataccagtttgggaagacaaagatctttttccgggctggtcaagtggcctacctagaaaaattgagggcagacaagctgagggctgcctgcatccggatccagaagacgatccgagggtggctgctgcggaagaagtacctgcgtatgcgcaaggctgccatcactgtgcagagatatgtgcgaggccaccaggcccgatgctatgctaagttcctgcgcagaaccaaggcagccactatcattcagaagtactggcgcatgtatgtggctcgccggagatacaagatcatgcgaactgccacaattgtccttcagtcttatttgcgaggctacttggccagaaataggtatcacaagatactccgtgagcacaaagcaatcatcattcagaagtgggtccgtggctggctggctcgcacctactatagcaggagcatccacgccatcatctaccttcagtgctgcttccgccggatgatggccaagcgcgagctgaagaaacttaagattgaggcccgctccgtggagcgctataagaagctccacatcggcatggagaacaagatcatgcagctgcagcgcaaagttgatgagcagaacaaagactacaaatgcctcatggagaaactgaccaatctagaaggaacatacaactcggagaccgagaaactacgaagtgatttagaacgtcttcagctaagtgaagaagaagctaagattgctactggacgggtcctcagtctgcaggaagaaattgccaagctacggaaagacctggaacaaactcagtctgagaaaaaatccattgaggaacatgctgatagatacaaacaagaaacggagcagctggtatcaaatctgaaggaagaaaatactttgctgaagcaggaaaaagaggccctcaatcaccgtatcgtggagcaggctaaggagatgacagagactatggagaagaagttagtagaagaaacaaaacaactggaactcgatcttaatgatgaaaggctgagatatcagaaccttctgaatgagtttagtcgcttggaagaacgctatgatgacctcaaggaagagatgactttgatggtgaatgtgcctaagcctggacacaagagaacagactctacccacagcagcaatgagtctgaatacacctttagctctgaaattgcagaaactgaagatattccatcaaggacagaggagccaagtgagaagaaagtgcctctggacatgtcattgttcctcaagctccagaagcgggtcacagagctggagcaggagaagcaggtgatgcaggatgagctggaccgcaaggaggagcaggtgctccgcagcaaggcaaaggaagaagaaagaccacagattagaggtgcagaactggaatatgagtcactcaagcgtcaagaactagagtcagaaaacaaaaaactgaaaaatgagctaaatgagttacgaaaggccctcagtgagaaaagtgcccctgaggtgactgccccaggcgcgccagcctaccgtgtcctcatggagcagctgacctctgtgagtgaggagctcgatgtccgcaaggaggaagtcctcatcctgaggtctcagctggtgagccagaaggaagccatccaacccaaggatgacaagaacacaatgacagattccacaatacttttagaagatgtacaaaaaatgaaagataaaggtgaaatagcacaagcatatattggcttgaaagaaaccaacagaccatctgctatggactgccatgagttgaatgaggatggagagctgttgctggtttatgaagggttaaaacaagccaacaggctcctggagtcccagctgcagtctcagaagaggagccatgagaatgaggctgaagctctccgtggggaaatccagagcctgaaggaggagaacaaccggcagcagcagctgctggcccagaacctacagctgcccccagaggcccgcattgaggccagcctgcagcacgagatcactcggctcaccaatgagaacctgtattttgaggaattatatgcagatgaccctaagaagtatcaatcatatcggatttcactttacaaacggatgattgatttgatggaacaacttgaaaaacaagataagactgtccggaaactgaagaaacaactgaaagtatttgccaaaaaaattggtgaactagaagtgggccagatggagaacatatcgccaggacagattattgatgaacccattcgtccagtcaacattcccaggaaggaaaaggatttccaaggaatgctggaatacaagaaggaggatgagcaaaaacttgtgaagaacctgattcttgagctgaagccacgtggtgtggcagtcaatttgattccagggttaccagcgtatatcctgtttatgtgtgttcggcatgctgactacctgaatgatgaccagaaagtaaggtcgttgctaacatcgacaattaacagcatcaagaaagtactgaagaaaagaggtgatgattttgaaaccgtctccttttggctttccaacacatgccgatttttgcactgtttaaagcagtacagtggagaagagggctttatgaaacacaacacctctcgccagaatgaacactgcctcaccaattttgacttggctgagtaccggcaggtgctcagtgacttagcaattcagatctaccagcagctcgtgcgggtgttagagaacatccttcagccaatgatcgtctccggaatgctggagcatgaaaccattcagggtgtctctggggtgaagcccacagggctaagaaagcgaacctccagcatcgctgacgagggcacctacacactggactccatcctgcggcagctcaactccttccactcggtcatgtgtcagcacggcatggaccccgaactgatcaagcaggtggtcaagcagatgttctacatcgtgggggccgtcaccctgaacaacctcctcttgcggaaggacatgtgctcctggagtaaaggcatgcagatcaggtacaatgtcagtcaactagaagaatggctgcgtgacaagaatttgatgaacagtggggctaaggaaaccctggagcctctcattcaggctgctcagcttttgcaagtgaaaaagaaaacagatgatgacgcagaagccatttgttccatgtgcaatgctttaactactgcccagattgtcaaagtgttgaatttgtatacaccggttaatgagtttgaagaaagagtttctgtgtcatttattcgtactatacagatgcgtttacgagacaggaaagactctcctcaactactcatggatgcaaaacacatctttcctgtcacctttccttttaacccctcttcccttgcgctagaaaccatccagattccagccagcctgggcctgggattcatatcacgggtctga

SEQ ID NO: 20 - protein, 1880 aa, synthetic construct
MAASELYTKFARVWIPDPEEVWKSAELLKDYKPGDKVLLLQLEDGKDLEYRLDPKTKELPHLRNPDILVGENDLTALSYLHEPAVLHNLRVRFIDSKLIYTYCGIVLVAINPYEQLPIYGEDIINAYSGQNMGDMDPHIFAVAEEAYKQMARDERNQSIIVSGESGAGKTVSAKYAMRYFATVSGSASEANVEEKVLASNPIMESIGNAKTTRNDNSSRFGKYIEIGFDKRYRIIGANMRTYLLEKSRVVFQAEEERNYHIFYQLCASANLPEFKVLRLGDANNFHYTNQGGSPVIEGVDDAKEMAHTRQACTLLGISESYQMGIFRILAGILHLGNVVFMSRDSDSCTIPPKHEPLSIFCDLMGVDFEEMNHWLCHRKLATATETYIKPISKLQATNARDALAKHIYAKLFNWIVDHVNQALHSAVKQHSFIGVLDIYGFETFEINSFEQFCINYANEKLQQQFNMHVFKLEQEEYMKEQIPWTLIDFYDNQPCINLIESKLGILDLLDEECKMPKGTDDTWAQKLYNTHLNKCALFEKPRLSNKAFIIQHFADKVEYQCEGFLEKNKDTVFEEQIKVLKSSKFKMLPELFQDDEKVISPTSATSSGRTPLTRTPSKPTKGRPGQTAKEHKKTVGHQFRNSLHLLMETLNATTPHYVRCIKPNDFKFPFTFDEKRAVQQLRACGVLETIRISAAGFPSRWTYQEFFSRYRVLMKQKDVLSDRKQTCKNVLEKLIVDKDKYQFGKTKIFFRAGQVAYLEKLRADKLRAACIRIQKTIRGWLLRKKYLRMRKAAITVQRYVRGHQARCYAKFLRRTKAATIIQKYWRMYVARRRYKIMRTATIVLQSYLRGYLARNRYHKILREHKAIIIQKWVRGWLARTYYSRSIHAIIYLQCCFRRMMAKRELKKLKIEARSVERYKKLHIGMENKIMQLQRKVDEQNKDYKCLMEKLTNLEGTYNSETEKLRSDLERLQLSEEEAKIATGRVLSLQEEIAKLRKDLEQTQSEKKSIEEHADRYKQETEQLVSNLKEENTLLKQEKEALNHRIVEQAKEMTETMEKKLVEETKQLELDLNDERLRYQNLLNEFSRLEERYDDLKEEMTLMVNVPKPGHKRTDSTHSSNESEYTFSSEIAETEDIPSRTEEPSEKKVPLDMSLFLKLQKRVTELEQEKQVMQDELDRKEEQVLRSKAKEEERPQIRGAELEYESLKRQELESENKKLKNELNELRKALSEKSAPEVTAPGAPAYRVLMEQLTSVSEELDVRKEEVLILRSQLVSQKEAIQPKDDKNTMTDSTILLEDVQKMKDKGEIAQAYIGLKETNRPSAMDCHELNEDGELLLVYEGLKQANRLLESQLQSQKRSHENEAEALRGEIQSLKEENNRQQQLLAQNLQLPPEARIEASLQHEITRLTNENLYFEELYADDPKKYQSYRISLYKRMIDLMEQLEKQDKTVRKLKKQLKVFAKKIGELEVGQMENISPGQIIDEPIRPVNIPRKEKDFQGMLEYKKEDEQKLVKNLILELKPRGVAVNLIPGLPAYILFMCVRHADYLNDDQKVRSLLTSTINSIKKVLKKRGDDFETVSFWLSNTCRFLHCLKQYSGEEGFMKHNTSRQNEHCLTNFDLAEYRQVLSDLAIQIYQQLVRVLENILQPMIVSGMLEHETIQGVSGVKPTGLRKRTSSIADEGTYTLDSILRQLNSFHSVMCQHGMDPELIKQVVKQMFYIVGAVTLNNLLLRKDMCSWSKGMQIRYNVSQLEEWLRDKNLMNSGAKETLEPLIQAAQLLQVKKKTDDDAEAICSMCNALTTAQIVKVLNLYTPVNEFEERVSVSFIRTIQMRLRDRKDSPQLLMDAKHIFPVTFPFNPSSLALETIQIPASLGLGFISRV

SEQ ID NO: 21 - DNA, 1563 bp, synthetic construct
  source 1..1563: mol_type = other DNA
atgcagtcggaatcggggatcgtgccggatttcgaagtcggggaggagtttcacgaagagcccaaaacctattacgaactcaaaagtcaacctttgaagagcagcagttccgaggagcatcctggggcctccaagcctccgataagctcctccagtatgacatcgcgcatcttgctacgccagcaactcatgcgtgagcagatgcaggagcaggaacgcagggagcagcagcagaagctgcaggcggcccagttcatgcaacagagagtgcctgtgagtcagactccagccataaacgtcagcgtgcccaccaccctcccctctgccacccaggtgccgatggaagtcctgaaggtgcagacccacctcgaaaaccccaccaagtaccacatacagcaagcccaaaggcagcaggtaaagcagtacctttctaccactttagcaaataaacatgccaaccaagtcctgagcttgccatgtccaaaccagcctggcgaccatgtcatgccaccagtgccggggagcagcgcacccaacagccccatggctatgcttacacttaactccaactgtgaaaaagagggattttataagttcgaagagcaaaacagggcggagagcgaatgcccaagtatgaacacacattcacgagcatcgtgcatgcagatggatgatgtaattgatgacatcattagcctagaatcaagttataatgaagagatcctgggcttgatggatcccgccttgcaaatggcaaatacgttacctgtctctggaaacttgattgacctttatggaaatcaaggcctgccacccccaggcctcaccatcagtaactcctgcccagccaaccttcccaacataaaaagggagctcacagagtctgaagcaagagcattggccaaagagagacaaaaaaaggacaatcacaacttgattgaacgaagaagaagatttaacataaatgaccgcattaaggaactaggtactttgattcccaagtcaaatgatccagacatgcgctggaacaagggaaccattttaaaagcttccgtggactatatccgaaagttgcaacgggaacagcaacgtgcgaaagagcttgaaaacagacagaagaagctggagcatgccaaccggcacttgttactcagaatacaggaacttgaaatgcaggctcgagctcatggactttcccttatcccatccacgggtctctgctctccagatctggtgagtcggatcatcaagcaggaacccgctcttgagaactgcaaccaagacctcctccagcatcatgcagacctcacgtgtacaacaaccctggatctcacagacggcaccatcaccttcaacaacagcctcggagctgggaccgagagcagccaggcctacagtgtccccgcaaaaatggggtcgaaactggaagacatcctcatggacgataccctttctcctgttggcataactgatccacttctttcctcggtgtcccccggagcatccaaaaccagcagccgaaggagcagtatgagcatggaagaaaccgaacacgcttgctag

SEQ ID NO: 22 - protein, 520 aa, synthetic construct
MQSESGIVPDFEVGEEFHEEPKTYYELKSQPLKSSSSEEHPGASKPPISSSSMTSRILLRQQLMREQMQEQERREQQQKLQAAQFMQQRVPVSQTPAINVSVPTTLPSATQVPMEVLKVQTHLENPTKYHIQQAQRQQVKQYLSTTLANKHANQVLSLPCPNQPGDHVMPPVPGSSAPNSPMAMLTLNSNCEKEGFYKFEEQNRAESECPSMNTHSRASCMQMDDVIDDIISLESSYNEEILGLMDPALQMANTLPVSGNLIDLYGNQGLPPPGLTISNSCPANLPNIKRELTESEARALAKERQKKDNHNLIERRRRFNINDRIKELGTLIPKSNDPDMRWNKGTILKASVDYIRKLQREQQRAKELENRQKKLEHANRHLLLRIQELEMQARAHGLSLIPSTGLCSPDLVSRIIKQEPALENCNQDLLQHHADLTCTTTLDLTDGTITFNNSLGAGTESSQAYSVPAKMGSKLEDILMDDTLSPVGITDPLLSSVSPGASKTSSRRSSMSMEETEHAC

SEQ ID NO: 23 - DNA, 2934 bp, synthetic construct
  source 1..2934: mol_type = other DNA
atgagaggcgctcgcggcgcctgggatttcctcttcgttctgctgctcctgctcctcgtccagacaggctcttctcaaccatctgtgagtccaggggaactgtctctaccatctatccatccagcaaaatcagagttaattgtcagtgttggcgacgagattaggctgttatgcactgatccaggatttgtcaagtggacttttgagatcctgggtcaattgagtgagaagacaaacccggaatggatcaccgagaaagcagaggccacaaatacaggcaattacacgtgcaccaataaaggcggcttgagcagttccatttatgtgtttgttagagaccctgagaagcttttcctgattgaccttcccttgtacgggaaagaagaaaacgacacgctggttcgctgtcctctgacagacccggaggtgaccaattactctctcacggggtgtgaggggaaacctctccccaaggatttgacgtttgtggccgaccccaaggcaggcatcacaatcagaaatgtgaagcgcgagtaccatcggctctgtctgcactgctcagcgaatcagaagggcaagtccatgctgtcgaagaaattcaccctgaaagtgcgggcagccatcaaagctgtgccagttgtgtctgtgtccaaaaccagctatcttctcagggaaggagaggaatttgcagtgacgtgcttgattaaagacgtgtctagttccgtggactctatgtggataaaggaaaacagccagcagagtaaagcacagacgaagaagaatagctggcatcagggtgacttcagttatctccgtcaggaaaggctgactatcagctcagcaagagtgaatgattccggtgtgttcatgtgttatgccaataatacttttggatcagcaaatgtcacaacaaccttagaagtagtagataaaggattcattaatatcttccctatgatgaacacaacaatatttgtaaatgatggagagaatgtggatctggttgttgagtatgaggcatatcccaaacctgaacaccgacagtggatatatatgaacagaacctccactgataagtgggacgattatcccaagtctgagaatgaaagtaacatcagatacgtaaatgaacttcatctaaccagattaaaagggactgaaggaggcacttacacatttcacgtgtccaattctgatgtcaattcttccgtgacatttaatgtttacgtgaacacaaaaccagaaatcctgacgcatgacaggctggtgaatggcatgctacagtgcgtggccgcagggttcccggagccaaccatcgattggtacttttgtccaggaactgagcagaggtgttctgttcctgttgggccagtggatgtacagatccaaaactcatctgtttcaccatttggaaaactagtggtttatagcaccattgatgacagcacattcaaacacaatgggacggtggaatgcagggcttacaacgatgtgggcaagagttctgcctcttttaactttgcatttaaaggtaacagcaaagaacaaatccatgctcacaccctgttcacgccgttgctgattggttttgtgatcgcagctggtttaatgtgtatcttcgtgatgattcttacatacaaatatttgcagaaaccaatgtatgaagtacagtggaaagttgtcgaggagataaatggaaacaattatgtttacatagacccaacacaacttccttatgatcacaaatgggagtttcccaggaacaggctgagttttgggaaaaccttgggtgctggcgcctttgggaaagtcgttgaggccaccgcttacggcttaattaaatcggatgcggccatgactgttgccgtcaagatgctcaaaccaagcgcccatttaacagaacgagaagccctaatgtctgaactcaaagtcttgagttacctcggtaatcatatgaatattgtgaatcttctgggagcgtgcaccattggagggcccaccctggtcattacagaatattgttgctatggtgatcttctgaattttttgagaagaaaacgtgattcatttatttgctcaaagcaggaagatcatgccgaagtggcactttataagaaccttcttcattcaaaggagtcttcctgcaacgatagtactaatgagtacatggacatgaaacctggagtttcttatgttgtaccaaccaaggcagacaagaggaaatctgcaagaataggttcatacatagaaagagacgtgactccggctatcatggaagatgatgagctggccctggacctggaggacttgctgagcttttcttaccaggtggcaaagggcatggcgttccttgcctcaaagaattgtattcatagagacttggcagccagaaatatcctccttactcatggtcgaatcacaaagatttgtgattttggtctagccagagacatcaagaatgattctaattatgtggtcaaaggaaacgctcgactccctgtgaagtggatggcaccggagagtattttcaactgtgtgtacacgtttgaaagtgatgtctggtcctatgggatttttctgtgggagctgttctctttaggaagcagcccctaccctggaatgccggtcgattctaagttctacaagatgatcaaggaaggtttccgaatgctcagccccgagcatgcacctgcggaaatgtatgacatcatgaagacctgctgggatgctgatcccttgaaaaggccaacatttaagcagattgtgcagctgattgagaagcagatctcagagagcaccaatcatatttattccaacttagcaaactgcagcccccaccgggagaaccccgcggtggaccattctgtgcgcatcaactctgtgggcagcagcgcctcctccacgcagcctctgcttgtccacgaagatgtctga

SEQ ID NO: 24 - protein, 977 aa, synthetic construct
MRGARGAWDFLFVLLLLLLVQTGSSQPSVSPGELSLPSIHPAKSELIVSVGDEIRLLCTDPGFVKWTFEILGQLSEKTNPEWITEKAEATNTGNYTCTNKGGLSSSIYVFVRDPEKLFLIDLPLYGKEENDTLVRCPLTDPEVTNYSLTGCEGKPLPKDLTFVADPKAGITIRNVKREYHRLCLHCSANQKGKSMLSKKFTLKVRAAIKAVPVVSVSKTSYLLREGEEFAVTCLIKDVSSSVDSMWIKENSQQSKAQTKKNSWHQGDFSYLRQERLTISSARVNDSGVFMCYANNTFGSANVTTTLEVVDKGFINIFPMMNTTIFVNDGENVDLVVEYEAYPKPEHRQWIYMNRTSTDKWDDYPKSENESNIRYVNELHLTRLKGTEGGTYTFHVSNSDVNSSVTFNVYVNTKPEILTHDRLVNGMLQCVAAGFPEPTIDWYFCPGTEQRCSVPVGPVDVQIQNSSVSPFGKLVVYSTIDDSTFKHNGTVECRAYNDVGKSSASFNFAFKGNSKEQIHAHTLFTPLLIGFVIAAGLMCIFVMILTYKYLQKPMYEVQWKVVEEINGNNYVYIDPTQLPYDHKWEFPRNRLSFGKTLGAGAFGKVVEATAYGLIKSDAAMTVAVKMLKPSAHLTEREALMSELKVLSYLGNHMNIVNLLGACTIGGPTLVITEYCCYGDLLNFLRRKRDSFICSKQEDHAEVALYKNLLHSKESSCNDSTNEYMDMKPGVSYVVPTKADKRKSARIGSYIERDVTPAIMEDDELALDLEDLLSFSYQVAKGMAFLASKNCIHRDLAARNILLTHGRITKICDFGLARDIKNDSNYVVKGNARLPVKWMAPESIFNCVYTFESDVWSYGIFLWELFSLGSSPYPGMPVDSKFYKMIKEGFRMLSPEHAPAEMYDIMKTCWDADPLKRPTFKQIVQLIEKQISESTNHIYSNLANCSPHRENPAVDHSVRINSVGSSASSTQPLLVHEDV

SEQ ID NO: 25 - DNA, 5095 bp, synthetic construct
  source 1..5095: mol_type = other DNA
ctttttagttcctcttcactttctgccataagggtggtgttatctgcatatctgaggttattgatatttctcctggcaatcttgattccagcttgtgcttcctccagcccagcgtttctcatgatgtactctgcatagaagttaaataagcagcgtgacaatatacagccttgacgtactccttttcctatttggaaccagtctgttggtccatgtccagttctaactgttgcttcctgacctgcatacagatttctcaagaggcaggtcgggtggtctggtattccgatctctttaagagtttttcagtttattatgatccatgcagtcaaaggctttggtatagtcaataaagcagaaatagatgtttttctggaactcccttgctttttcaatgatccagcagatgttggcaatttgatctctggttcctttgcctcttctaaaactagcttggacatctggaagttcacggtccatgtattgctgaagcctggcttggagaattttgagcattactttactagtgtgtgagatgagtcaattgtgcagtagtttgaacattctttggcattgtctttctttgggactggaatgaaaacggaccttttccagtcctacagccactgctgagtttgccaaagttgctggcatattgagtgtagcactttcatagcatcatcttttaggatttgaaataggtcaactggaattccatcacctccactagctttgttcgtagtgatgcttcttaaggcccagcttgacttcacattccaggatgtctggctctaagtgagtgatcacaccattgtgattatctgggtcgtgaagatcttttttgtacagttcttctgtgtattcttgccacctcttcttaatatcttctgcttctgttaggtccataccatttctgccgtttattgtgcccatctttcaacataccccactgcttttgaagagttggaatcgtacagagagaaaatagaatgtttcctcttgaaaagaatgttcatagcttgtagtcagaatcaagaataatagtatttccaaatggtcttaaatatttattagtatatgtactaataagtttttcacttactatatacacagtgcattacacacatagtaattatctatacttctaaagatttaattatctacatagataaatctcaagtaataatagcgaacacatagtgcttactatatgcactgtgtatatagtaagagctttacatattttaacttatttaattctcacagaaggcctatgaggtttgtacagttactgtccctattttacatatgggaaactgaggttcagagaggtcaagcaacctacccaacatcacagagatagcatggtagaaggataggagcccaggctatcggccctggaatcttagtgtttgaccatcaggttatactacttcgcaatagtatgatattgctgaaaatcaagatgtaggatacatatagtagaaaccatttatgtaaatgtttaaaaccctcaaaacatttttgtggttttttttgttgttgtcttttttacaaaatcgtgtatctagaagtttaaaaatattcatgagactggtactcaccaactcaggctggattgtgtttacctctgggagaagaaggagaaatgaatggggagccatattataacattctatttctttgtttaaaactctgaagcaaatgggggttaacacatggttgaatatgggtttcccaggtggctcagtggtaaagaatccgtgtttgatccctacattgggaatattccctggaggagggcatggcaacccactccagtattcttgcctgggaaatcccatggacagaggagcctggctgtctacagtccatggggtcacaaagaattggctacaacttagcaactgagcatgctcgtgggtgaatttaacagtttatgtgacttgtccaaagtcacataaaagtaacaaatttttttttttttggcttcactagaccaaccagtccattctaaaggagatcagtcctgagtgttctttggaaggaatgatgctaaaggtgaaactccagtactttggccacctcatgtgaagagttgactcattggaaaagactctgatgctgggagggattgggggcaggaggagaaggggatgacagaggatgagatggctggatggtatcaccaactcaatggacatgagtttgagtgaactctgggagttggtgatggacagggaggtctggcgcgctgcaattcatggggtcgcaaagagtcagacacaactgagcaactgaactgaactgaactgaggtctttgttgtggcccatgggctttctgtagctgtagcacactggggcttctctatctgtggcacatgggcttcttgttgctgtgccaatgttgttgttgttgtggagcatggactctagggcatgcaggctctccagttgaggcacgcaggctctccagttgaggcacgcaggcttcattgccctgctgtgggatcttagttccccgaccagggatctaacctgtattccctgcactggaaggcggattcttaaccaatggcccatacagtaagtcccaaggtggaatttttttaatagatcactgagtctcattctcccatttaggatttgagaacagtctgtatagattaggaaaccaaccagatagtaatctgttcaaggggctactgcaagtcagtggcagaaaacaagtccctagacttcagagcacttttcactctcaccaccaccctttcctacatcctgccattctttcctacatcctacattctgttttacctcctgatttacccccaaagttttgtgggtttttttttcctgctggacaacttgcatttgtcctgttggttaatttcttttaaagaaataatttttgattgctcacttatattccattgctccatattcaaataggattatattttagagtcaaagggcttctcttgtggctcagctggtaaagaatccgcctgcaatatgagagacctgggttcggaagatcccctggagaagggaacagctatccactccagtattctggcttggagaatttcatggttagtcaaggctatggtttttcctatggtcatgtatggatgtgagagttggactgtgaagaaggctgagcgccgaagaattgatgcgtttgaaccgtggtgttggagaagactcttgagagtcccttggactgcaaggagatccaaccagtccattctgaaggagatcaaccttgggatttctttggaaggaatgatgctaaagctgatgctccagtactttggacacctcatgcaaagagttgactcattggaaaagactctgatgctgggagagattgggggcaggaggagaaggggacgacccaggatgagatggctggatggcatcacggactcgatggatgtgagtctgagtgaactccgggagatggtgatggacagagaggcctggcgtgctgcaattcatggggttgcaaagagtcagacacgactgagcaactgaactgaactgatagtccatggcgttgcaaagagttgaacatgattgagctactttaacttttactttagagtcttaaggcccaatcagcaccagagtcaagcctttctctaggaattttatgtcttttctcctttttaactccttattcttattttttttcccttagctctatcttccatagccctcaagtcccatcatctagtatccatcagactcaagatgttgtctcctcctgattccgtatttgaactcttgatttatctgaagagcttacttggtgggtcatacaatgaatgaaaatttagaaaaccatcacatttgtggaatgccccacagttttcaaggcatctgcatggtttcatttgatctttttggcccacggtggggagcagatgagatagcaggttcagacagtttctatgacttacccaagatcgcagaaagaaagtaacaaaacctgaacagaatccacctcttctgactttgtattcacttctctttccaattgtccctgtatccataaaccacgaaaaagaagttgatccctataaataaggataaatcaatgaaggactagggatcatcactgcctatcacattctttcaccaccatcaccagcaaaacaaatacttgctgcatggccttatattaagctgctcttctctgcagaacttcaaaacttcacatcacccaggggtcataaattgtgaccttgtaaattctagtttgtttgaataaagctcaagtgagcaagaagaggaaaaccacagactaatcacttatcatgtcagcagaatttcaactgttgaaatttatgtagaagttttaaaaattacgagaccaaagagattttactaataaaataaagtaaaataaaataagtaaaactttactaataaagcaggctgctgctgctgctgctgctgctgctaagttgcttcagtcgtgtccgactctgtgcgaccccatagacggcagcctaccaggctcccccatgcctgggattctccaggcaagaacactggagtgggttgccatttccttctccagtgcatgaaagtgaaaagtgaaagtgaagtcgcttagtcgtgtccgactcttcaagaccccatggactgcagcctaccaggctcctccgcccatgggattttccaggcaagagtactggagtggggtgccattgccttctccgaataaagcaggctaggcctcagcaatatgcctacctagagtttaacttctctactgagtgctccttagcccacccagaatttctgaaagaagctaaattaaacccttctttggcaggatgtgtttttccaggttaacttattagggcaaaatttcattctctctcctggggttgattctgaattaaagtctcattaaatcctgcccatgggtatcctcggtgcagccacttcctttccaaccctttacaccctcagtgtcaacaccaattctaatcccaaagactggagagaacagaccacaaggcttgcggccatcagaatgagtatgaaggcagtcttcacttggctgaaggcagagat

SEQ ID NO: 26 - DNA, 5095 bp, synthetic construct
  source 1..5095: mol_type = other DNA
ctttttagttcctcttcactttctgccataagggtggtgttatctgcatatctgaggttattgatatttctcctggcaatcttgattccagcttgtgcttcctccagcccagcgtttctcatgatgtactctgcatagaagttaaataagcagcgtgacaatatacagccttgacgtactccttttcctatttggaaccagtctgttggtccatgtccagttctaactgttgcttcctgacctgcatacagatttctcaagaggcaggtcgggtggtctggtattccgatctctttaagagtttttcagtttattatgatccatgcagtcaaaggctttggtatagtcaataaagcagaaatagatgtttttctggaactcccttgctttttcaatgatccagcagatgttggcaatttgatctctggttcctttgcctcttctaaaactagcttggacatctggaagttcacggtccatgtattgctgaagcctggcttggagaattttgagcattactttactagtgtgtgagatgagtcaattgtgcagtagtttgaacattctttggcattgtctttctttgggactggaatgaaaacggaccttttccagtcctacagccactgctgagtttgccaaagttgctggcatattgagtgtagcactttcatagcatcatcttttaggatttgaaataggtcaactggaattccatcacctccactagctttgttcgtagtgatgcttcttaaggcccagcttgacttcacattccaggatgtctggctctaagtgagtgatcacaccattgtgattatctgggtcgtgaagatcttttttgtacagttcttctgtgtattcttgccacctcttcttaatatcttctgcttctgttaggtccataccatttctgccatttattgtgcccatctttcaacataccccactgcttttgaagagttggaatcgtacagagagaaaatagaatgtttcctcttgaaaagaatgttcatagcttgtagtcagaatcaagaataatagtatttccaaatggtcttaaatatttattagtatatgtactaataagtttttcacttactatatacacagtgcattacacacatagtaattatctatacttctaaagatttaattatctacatagataaatctcaagtaataatagcgaacacatagtgcttactatatgcactgtgtatatagtaagagctttacatattttaacttatttaattctcacagaaggcctatgaggtttgtacagttactgtccctattttacatatgggaaactgaggttcagagaggtcaagcaacctacccaacatcacagagatagcatggtagaaggataggagcccaggctatcggccctggaatcttagtgtttgaccatcaggttatactacttcgcaatagtatgatattgctgaaaatcaagatgtaggatacatatagtagaaaccatttatgtaaatgtttaaaaccctcaaaacatttttgtgtttttttttgttgttgtcttttttacaaaatcgtgtatctagaagttttaaaatattcatgagactggtactcaccaactcaggctggattgtgtttacctctgggagaagaaggagaaatgaatggggagccatattataacattctatttctttgtttaaaactctgaagcaaatgggggttaacacatggttgaatatgggtttcccaggtggctcagtggtaaagaatccgtgtttgatccctacattgggaatattccctggaggagggcatggcaacccactccagtattcttgcctgggaaatcccatggacagaggagcctggctgtctacagtccatggggtcacaaagaattggctacaacttagcaactgagcatgctcgtgggtgaatttaacagtttatgtgacttgtccaaagtcacataaaagtaacaaatttttttttttttggcttcactagaccaaccagtccattctaaaggagatcagtcctgagtgttctttggaaggaatgatgctaaaggtgaaactccagtactttggccacctcatgtgaagagttgactcattggaaaagactctgatgctgggagggattgggggcaggaggagaaggggatgacagaggatgagatggctggatggtatcaccaactcaatggacatgagtttgagtgaactctgggagttggtgatggacagggaggtctggcgcgctgcaattcatggggtcgcaaagagtcagacacaactgagcaactgaactgaactgaactgaggtctttgttgtggcccatgggctttctgtagctgtagcacactggggcttctctatctgtggcacatgggcttcttgttgctgtgccaatgttgttgttgttgtggagcatggactctagggcatgcaggctctccagttgaggcacgcaggctctccagttgaggcacgcaggcttcattgccctgctgtgggatcttagttccccgaccagggatctaacctgtattccctgcactggaaggcggattcttaaccaatggcccatacagtaagtcccaaggtggaatttttttaatagatcactgagtctcattctcccatttaggatttgagaacagtctgtatagattaggaaaccaaccagatagtaatctgttcaaggggctactgcaagtcagtggcagaaaacaagtccctagacttcagagcacttttcactctcaccaccaccctttcctacatcctgccattctttcctacatcctacattctgttttacctcctgatttacccccaaagttttgtgggtttttttttcctgctggacaacttgcatttgtcctgttggttaatttcttttaaagaaataatttttgattgctcacttatattccattgctccatattcaaataggattatattttagagtcaaagggcttctcttgtggctcagctggtaaagaatccgcctgcaatatgagagacctgggttcggaagatcccctggagaagggaacagctatccactccagtattctggcttggagaatttcatggttagtcaaggctatggtttttcctatggtcatgtatggatgtgagagttggactgtgaagaaggctgagcgccgaagaattgatgcgtttgaaccgtggtgttggagaagactcttgagagtcccttggactgcaaggagatccaaccagtccattctgaaggagatcaaccttgggatttctttggaaggaatgatgctaaagctgatgctccagtactttggacacctcatgcaaagagttgactcattggaaaagactctgatgctgggagagattgggggcaggaggagaaggggacgacccaggatgagatggctggatggcatcacggactcgatggatgtgagtctgagtgaactccgggagatggtgatggacagagaggcctggcgtgctgcaattcatggggttgcaaagagtcagacacgactgagcaactgaactgaactgatagtccatggcgttgcaaagagttgaacatgattgagctactttaacttttactttagagtcttaaggcccaatcagcaccagagtcaagcctttctctaggaattttatgtcttttctcctttttaactccttattcttattttttttcctttagctctatcttccatagccctcaagtcccatcatctagtatccatcagactcaagatgttgtctcctcctgattccgtatttgaactcttgatttatctgaagagcttacttggtgggtcatacaatgaatgaaaatttagaaaaccatcacatttgtggaatgccccacagttttcaaggcatctacatggtttcatttgatctttttggcccacggtggggagcagatgagatagcaggttcagacagtttctatgacttacccaagatcgcagaaagaaagtaacaaaacctgaacagaatccacctcttctgactttgtattcacttctctttccaattgtccctgtatccataaaccacgaaaaagaagttgatccctataaataaggataaatcaatgaaggactagggatcatcactgcctatcacattctttcaccaccatcaccagcaaaacaaatacttgctgcatggccttatattaagctgctcttctctgcagaacttcaaaacttcacatcacccaggggtcataaattgtgaccttgtaaattctagtttgttcgaataaagctcaagtgagcaagaagaggaaaaccacagactaatcacttatcatgtcagcagaatttcaactgttgaaatttatgtagaagtttttaaaattacgagaccaaagagattttactaataaaataaagtaaaataaaataagtaaaactttactaataaagcaggctgctgctgctgctgctgctgctgctaagttgcttcagtcgtgtccgactctgtgcgaccccatagacggcagcctaccaggctcccccatgcctgggattctccaggcaagaacactggagtgggttgccatttccttctccagtgcatgaaagtgaaaagtgaaagtgaagtcgcttagtcgtgtccgactcttcaagaccccatggactgcagcctaccaggctcctccgcccatgggattttccaggcaagagtactggagtggggtgccattgccttctccgaataaagcaggctaggcctcagcaatatgcctacctagagtttaacttctctactgagtgctccttagcccatccagaatttctgagagaagctaaattaaacccttctttggcaggatgtgtttttccaggttaacttattagggcaaaatttcattctctctcctgggattgattctgaattaaagtctcattaaatcctgcccatgggtatcctcggtgcagccacttcctttccaaccctttacaccctcagtgtcaacaccaattctaatcccaaagactggagagaacagaccacaaggcttgcggccatcagaatgagtatgaaggcagtcttcacttggctgaaggcagagat

SEQ ID NO: 27 - DNA, 5058 bp, synthetic construct
  source 1..5058: mol_type = other DNA
agtttgagcattctttggcattgcctttctttgggattggaatgaaaactgaccttttccagtcctgtgaccactgctgagttttccaaatttgctggcatattgagtgcagcactttcacagcatcatctttcaggatttgaaacagctccactggaattccatcacctccactagctttgttcgtagtgatgctttctaaggcccacttgacttcacattccaagatgtctggctctaggtgagtgatcacaccatcgtgattatctgggtcgtgaagatcttttttgtacagttcttctgtgtattcttgccatctcttcttaatatcttctgcttctgttaggtccataccatttctgtcctttattgagcccatctttgaatgaaatgttcccttggtatctctaattttcttgaaaagatctctagtctttcccattctgttgttttcctcgatttctttgcattgattgctgaagaagtctttcttatctcttcttgctattctttggaactctgcattcagatgcttatatctttcctttttctcctttgcttttcgcctctcttcttttcacagctatttgtaaggcctccccagacagccattttgcttttttgcatttcttttccatggggatggtcttgatcgctgtctcctgtacaatgtcatgaacctcattccatagttcatcaggcactctatctatcagatctaggcccttaaatctatttctcacttctactgtataatcataagggatatgatttaggtcatacctgaatggtctagcggttttccctactttcttcaatttcagtctgaatttggtaataaggagttcatgatctgagccacagtcagctcctggtcttgtttttgttgactgtatagagcttctccatctttggctgcatagaatataatcaatctgatttcagtgttgaccatctggtgatgtccatgtgtagagtcttctgttgtgtttttggaccattctcttgcgttgtctgcgaccattaaaaagaatgaatcgggtctatactaattgttgttcatcgctaagtcatgtctgactctttgcaaccccatggacttcggcacgccagccttccctgtccttcactatctcccctcctggagtttgttcaaattcatgtctgttgaattggtgatgccatccaagcatctcatcctctgttgtccccttctcctcctgccctcagtcttgccgagcatcagggtcttttccaaatagcagttaatattcaccaagcattcaccccgtggcaggtctaatccgagctctttgtgtacattgattcataacaatcctgctctgtagatcctattgctattccccaccatgtaaaagggagaattgagccaggggaggctaagcagcagcccagcaatgatgtactcagctggggtccaactcctgcagctggttccagagtccacatgcttaaccacacacagacaccactgctaatgattgctctggggaaatgggcttgggagggggaataaggttgagcttgacttgtcattttatactgtttatattctttatagtatatctttatcatatatcaccacatgtcagcttttcacatttaaaaaaacccactaatttaaataaataggcacaaaagcataaaaaaagcatttaaagactatggaaaacaatatggaagttactttaaaaagcaaaaatagagctaccacattatccagcaacccgaccattgggcatatatcaggaaaagatgaaaattctaattcaaaaagatacatgtgccccagtgttcatagtagcagagttcacagtagcaaagacttggaatcaacgtaagtgtccatcaccaaatgaatggataaagaagaagtggtattcaaaaggtctacaagcaatggatgctggagagggtgcagagaaaaaggaaccctcttacattgttggtgggaatgcaaactagtacagccactatggagaactgtgtggagattccttaaaaactggaaatagaactgccttatgacccagcaatcccactgctgggcatacacaccgaggaaaccagaattgaaagagacacgtgtaccccaatgttcattgcagcactatttacaatagctaggacatggaagcaacctagatgtccatcggcagatgaatggataagaaagctgtggtacatatacacaatggagtattactcagccattaaaaagaatacatttgaatcagttctggtgagatgaatgaagctagagcctattatacagagtgaagtaactcagaaagaaaaataccaatatagtatattaatgcatatatatggaatttagaaaaatggtaacgatgatcctatacgcgagatagtaaaagagacacagatataaagaacagacttctggattctgagggagaaggtgagggtgggatgatctgagagaatagcattgaaacatgtatattacgatatgtgaagtagatcaccagtccgggttcgatgcatgagacagggtgctcagggctggtgcactgggacgacccagagggtgggatgtatgcccatggttgatttatgtcaatgtatggtaaaaaccactacaatattgtaaagtattaaaagaaatacatttaccaaaaaaaaagaagaaatggtattatatggaacggaatattactcagccataaaaaagaatgaaatattgccacgcacagcaacatgaatggacctagagactatcataccaagtgaagcacgtcagacagagacaaatatcttatgatgtcacttacatgtggaatctaacaggaagatacagatgaacttagttttataagacagaaacagactcacagacatagagaacaaactcaagtttcccgaagagaagaggaggagagggataaagtagaagtttagggttaatacatacacactactatatacgaaataataaacaaggacctgctgtatagtatgtggaacatattcaaaatcttgtaataatctataatgcaaagggaatctgaaaagcaatatgtgtgtgtcaatcactttgctgtgaaactaacacctgaaactaacacaatgttgtaaaccagctatacttcaatttaaaaacaaaaaaataggtgaaagatacttttgccttaagcaatttacagttctgatagcaacttttaagggatctgttcattttataagcaattgtaaagtttatggtaaaggaaatgaaaaacataagaattgttcatagggtttctggaaactctgggttaagcgtaagtggtccccacacagtggacggtgtttggccagagctgctaccaccctgggggcctgaaatacccaaatgtgtttacagcgctccacacagcagacaagcaacactctaaacagagcagaattgtgtggcttttgaaaatgccttataaattatccaatgtgaggtcacaacaatcctgtaaggtttaatttcctcttctgcagaatggagatattagtgtccattcacctaataaccctgatcatttatgtatttatttatgttcgtatttccatttcacagatatggaaaagcagtttctgggggtaagaatgtacttcttgtttgatcttctttccgtaagtgagagggagaaggcaagcatggctctgatgcaccctagtctggaaggaagagagaaggtggtgatgcccttgatgtccaggggatttgggaaggacaagcgggcacggtgagctggagctgctagtggtgcttggggtcctgtggatttgaggtgctccagtccattctgaaggagatcagccctgggatttctttggaaggaatgatgctaaagctgaaactccagtactttggccacctcatgcgaagagttgactcattggaaaagcctctgatgctgggagggattgggggcaggaggagaaggggacgaccgaggatgagatggctggatggcatcaccgactcgatggatgtgagtttgagtgaactccgggagttggtgatggacaggaagccctggcgtgcggcgattcatggggtcgcaaagagtcggacacgactgagtggctgaactgaactgagctacctgatgcaaagaatcgactcattggaaaagcccctgatgctgggaaagattgaaggcaggaggagaaggggcgacagaagatgaaacggctggatggcatcaccgactcaatggacatgagtttgagcaaactccgggagttggtgatggacagggaggccttacgtgctacagtccatggggtcgcagagtcggacacgactgagcgactgaactgagctcgtagacaggcaagcggcggcaggctcggagaaggttcctcggcggctgccctccgctcaacccccgagggcatcctccggtctcttcccgccccgtctacgcgcggatgctgactccgccgactttttcttgactggcgaggtctcgggaccctccccgcggcgtcgatcctggcgctggggcttctcgctccaaagtcccccttacccgccggcgttcccacgcgttagtcggcggctttggggaaggcgccttcctgagcctccaggtcccttctgtgaagccggagtgaacagcagagtaaactgcagagctgggatgggaattaagtcagaaagcgtgcagtccgagggcgagaaatgcccccaggtccctccgcgccgagggcgcaccgcgggggcgcgttaccggcccgactccccaggtgcgggcccggcctgccctccccgccgccgccgccttcctccgccaagcgggctgtgggcgaggagcgatggtctctgcccggcactggcgcctcccgcgcgggcgcccgggtgcctgccccgcccgccgcccgcacccggaggtgctcgccgctcccggagctgggcggggcgggcgcggtcctcgtgatccccgcgggcgcccggacctcgccctcccgccgccctgcgccctgcccggcccgatcggcccgcctggcctcagagccccgagccccgacgcccgg

SEQ ID NO: 28 - DNA, 5058 bp, synthetic construct
  source 1..5058: mol_type = other DNA
agtttgagcattctttggcattgcctttctttgggattggaatgaaaactgaccttttccagtcctgtgaccactgctgagttttccaaatttgctggcatattgagtgcagcactttcacagcatcatctttcaggatttgaaacagctccactggaattccatcacctccactagctttgttcgtagtgatgctttctaaggcccacttgacttcacattccaagatgtctggctctaggtgagtgatcacaccatcgtgattatctgggtcgtgaagatcttttttgtacagttcttctgtgtattcttgccatctcttcttaatatcttctgcttctgttaggtccataccatttctgtcctttattgagcccatctttgaatgaaatgttcccttggtatctctaattttcttgaaaagatctctagtctttcccattctgttgttttcctcgatttctttgcattgattgctgaagaagtctttcttatctcttcttgctattctttggaactctgcattcagatgcttatatctttcctttttctcctttgcttttcgcctctcttcttttcacagctatttgtaaggcctccccagacagccattttgcttttttgcatttcttttccatggggatggtcttgatcgctgtctcctgtacaatgtcatgaacctcattccatagttcatcaggcactctatctatcagatctaggcccttaaatctatttctcacttctactgtataatcataagggatatgatttaggtcatacctgaatggtctagcggttttccctactttcttcaatttcagtctgaatttggtaataaggagttcatgatctgagccacagtcagctcctggtcttgtttttgttgactgtatagagcttctccatctttggctgcatagaatataatcaatctgatttcagtgttgaccatctggtgatgtccatgtgtagagtcttctgttgtgtttttggaccattctcttgcgttgtctgcgaccattaaaaagaatgaatcgggtctatactaattgttgttcatcgctaagtcatgtctgactctttgcaaccccatggacttcggcacgccagccttccctgtccttcactatctcccctcctggagtttgttcaaattcatgtctgttgaattggtgatgccatccaagcatctcatcctctgttgtccccttctcctcctgccctcagtcttgcccagcatcagggtcttttccaaatagcagttaatattcaccaagcattcaccccgtggcaggactaatccgagctctttgtgtacattgattcataacaatcctgctctgtagatcctattgctattccccaccatgtaaaagggagaattgagccaggggaggctaagcagcagcccagcaatgatgtactcagctggggtccaactcctgcagctggttccagagtccacatgcttaaccacacacagaaaccactgctaatgattgctctggggaaatgggcttggaagggggaataaggttgagcttgacttgtcattttatactgtttatattctttatagtatatctttatcatatatcaccacatgtcagctttgcacatttaaaaaaacccactaatttaaataaataagcacaaaagcataaaaaaaacatttaaagactatggaaaacaatatggaagttactttaaaaagtaaaaatagagctaccacattatccagcaacccgaccattgggcatatatcaggaaaagatgaaaattctaattcaaaaagatacatgtgccccagtgttcatagtagcagagttcacaatagcaaagacttggaatcaacgtaagtgtccatcaccaaatgaatggataaagaagaagtggtattcaaaaggtctacaagcaatggatgctggagagggtgcagagaaaagggaaccctcttacattgttggtgggaatgcaaactagtacagccactatggagaactgtgtggagattccttaaaaactggaaatagaactgccttatgacccagcaatcccactgctgggcatacacaccgaggaaaccagaattgaaagagacacgtgtaccccaatgttcattgcagcactatttacaatagctaggacatggaagcaacctagatgtccatcggcagatgaatggataagaaagctgtggtacatatacacaatggagtattactcagccattaaaaagaatacatttgaatcagttctggtgagatgaatgaagctagagcctattatacagagtgaagtaactcagaaagaaaaataccaatatagtatattaatgcatatatatggaatttagaaaaatggtaacgatgatcctatacgcgagatagtaaaagagacacagatataaagaacagacttctggattctgagggagaaggtgagggtgggatgatctgagagaatagaattgaaacatgtatattacgatatgtgaagtagatcaccagtccgggttcgatgcatgagacagggtgctcagggctggtgcactgggacgacccagagggtgggatgtatgcccatggttgatttatgtcaatgtatggtaaaaaccactacaatattgtaaagtattaaaagaaatacatttaccaaaaaaaaagaagaagtggtattatatggaatggaatattactcagccataaaaaagaatgaaatattgccacgcacagcaacatgaatggacctagagactatcataccaagtgaagcacgtcagacagagacaaatatcttatgatgtcacttacatgtggaatctaacaggaagatacagatgaacttagttttataagacagaaacagactcacagacatagagaacaaactcaaggttcccgaagagaagaggaggagagggataaagtagaagtttagggttaatacatacacactactatatacgaaataataaacaaggacctgctgtatagtatgtggaacatattcaaaatcttgtaatgatctataatgcaaagggaatctgaaaagcaatatgtgtgtgtcaatcactttgctgtgaagctaacacctgaaactaacacaatgttgtaaaccagctatacttcaatttaaaaacaaaaaaataggtgaaagatacttttgccttaagcaatttacagttctgatagcaacttttaagggatctgttcattttataagcaattgtaaagtttatggtaaaggaaatgaaaaacataagaatggttcatagggtttctggaaactctgggttaagcgtaagtggtccccacacagtggacggtgtttggccagagctgctaccaccctgggggcctgaaatacccaaatgcgtttacagcgctccacacagcagacaagcaacactctaaacagagcagaattgtgtggcttttgaaaacgccttataaattacccaatgtgaggtcacaacaatcctgtaaggtttaatttcctcttctgcaaaatggagatattagtgtccattcacctaataaccctgatcatttacgtatttatttatgttcgtattcccatttcacagatatggaaaagcagtttctgggggtaagaatgtacttcttgtttgatcttctttccgtaagtgagagggagaaggcaagcatggctctgatgcaccctagtctggaaggaagagagaaggtggtgatgcccttgatgtccaggggatttgggaaggacaagcgggcacggtgagctggagctgctagtggtgcttggggtcctgtggatttgaggtgctccagtccattctgaaggagatcagccctgggatttctttggaaggaatgatgctaaagctgaaactccagtactttggccacctcatgcgaagagttgactcattggaaaagcctctgatgctgggagggattgggggcaggaggagaaggggacgaccgaggatgagatggctggatggcatcaccgactcgatggatgtgagtttgagtgaactccgggagttggtgatggacaggaagccctggcgtgcggcgattcatggggtcgcaaagagtcggacacgactgagtggctgaactgaactgagctacctgatgcaaagaatcgactcattggaaaagcccctgatgctgggaaagattgaaggcaggaggagaaggggcgacagaagatgaaacggctggatggcatcaccgactcaatggacatgagtttgagcaaactccgggagttggtgatggacagggaggccttacgtgctacagtccatggggtcgcagagtcggacacgactgagcgactgaactgagctcgtagagagggaagcggcggcaggctcggagaaggttcctcggcggctgccctccgctcaacccccgagggcatcctccggtctcttcccgccccgtctacgcgcggatgctgactccgccgactttttcttgactggcgaggtctcgggaccctccccgcggcgtcgatcctggcgctggggcttctcgctccaaagtcccccttgcccgccggcgttcccacgcgttagtcggcggctttggggaaggcgccttcctgagcctccaggtcccttctgtgaagccggagtgaacagcagagtaaactgcagagctgggatgggaattaagtcagaaagcgtgcggtccgagggcgagaaatgcccccaggtccctccgcgccgagggcgcaccgcgggggcgcgttaccggcccgactccccaggtgcgggcccggcctgccctccccgccgccgccgccttcctccgccaagcgggctgtgggcgaggagcgatggtctctgcccggcgctggcgcctcccgcgcgggcgcccgggtgcccgccccgcccgccgcccgcacccggaggtgctcgccgctcccggagctgggcggggcgggcgcggtcctcgtgatccccgcgggcgcccggacctcgccctctcgccgccctgcgccctgcccggcccgatcggcccgcctggcctcagagccccgagccccgacgcccgg

SEQ ID NO: 29 - DNA, 4946 bp, synthetic construct
  source 1..4946: mol_type = other DNA
cgccgcaaattccccaccccccgccccctcaggtaacccaggaaaccgggtacaccaccccctcccaccccccgtccggccccagactcgctcctgcgcttgcgcacttgccagcctcgcgcgtcccgagccccgcccctcgccggtaaggcagcgccagcgtcgcaggcgtaacgcatgaaggccggagccaatgaggaagagaggaaggcgggccgagctcccggggtggggccggggctggggctttctcttcgcggcggggttgggtggctggtcccgcgtcctcgctgttccagggctttgcgaggcgggttgcgtcacaccctagggagagcctgctctgtttgaaaagcaccaagtccatgcgtagcgtcctctccctccgttcaacataatcatactgtgccccttctctgggtctggaggatgggagtagaagaaatatgggaaggggttgggagagggagaaagggttacccacgaggaactctgcccttcctctggggcctggaaaaaagaaacattttgcaaaggttactgtaggcttattaccaaaacctaaagaggtgtacgaagctactttagaattaagtgcaaaggtgtatgtttaaccctcttcacacacagtattaggcagtgtgcactgacaaagttgtgtgtcttacaatagcagtgcctccagagggtgggaaccataggttaaatataagaatattttagcttcatcactgactgtcaggtccagcatatggctgaccaggctactgatgccgtagtttggcatcaccacctagtcactgtggctggccttgcggtggaatgtctaagatactggaaaagaacctgagctttgaggcttgaaagtctggggttcaagtcctacctaatacaaggtacagctgatccttgaacaagagggaagctgttaggggcactggcccgctactagttgaaaatcctgcatatagctttataatcattatctatggattcaaccaacttcagatggtgtagcactgtattacagatttagtgaacaacttttgcatgtaagtggactggtgccctttcaaacccgttgttcaaaggtcatctgtataagcaatggtttactaattgaaatgaactggtttagaatcaacaactttacatgggactctagaaataattcaggatattgtatcccaaggctgtataccaaatgcaacttccatctgctccagtgactaaacaagtaaataggtgcccagtgatgtggtttgaaggagctcttggggaaatcccaaactttaaaatcttcccactgacttctgaagttcaaccattgacagttcacccacttcctcccacaatctttcaaaactggactactccagggaagggcaatacatgaaatctccagcaagttagtgaaagagatgctatttacttaacaaatatatagtgacacctacttgtgttggtactgtgtgctaagtgcctaagatactttggtgaatttccctgaattcagaggaagaggaagccaaatgacctatttcacagttttacctgtaacagaacctgctcttatttatacaccaactttcacacactaatctcaaaaacaccctttttttttctttaatggtcaaaagagatcagaagtgtcaattaagaagctagtttctgtttctcaaatgggaaataatagacagtcatgattttgttaaagacaaagagaacaaaacagactttacatgacaatggtacacagttggccctcaaagtattattttcttgtaaaaggcacaaagtaatgtcttttgtgactattattttctccttatatctgttataaagtattttaaccatagtattaattctgtataagagtatcttagaacatagatgttaaatatacatattagataaaacttatttaaaatatttcagatgaacacacaaaataatgtgtaatcaagcacacgcaatagaaggaagaataaagacaagtgatagatatctagaaggaagccctacttatgcatttatcacatgctggaaaacttcataagtgggcagttcgccagataatttgactctaaaattagtttctaaagggagattctaaaatcaaggttttaaaagatgcagttaatgtatatgtgcataatttcacatccaagtcaccagaatacggaaaaataatcattttgtggccacatgcatatgtaaatcagaccatgtcacatttctgcacagaaccctgtagtggctccccatttcactcaggtaaaaccaaagtccttacaatggcttgcagatttctgcaccatctggatccccacaacttcatctcttcctgctctgacatcttgcaggcacactggcctctttactgtttaccaaccactctagatacattcctatcctaaggccttggcactggctgttccctcttcttgaaatgctttttctccagagccacagagataactcccttaccgccttcctttctttgctcaaatttcatcatctcaatgaaatttacctcaacactgccattaagcctcaacaagaggggactctgcccatacttaagtctccctcatatcacaaataccactgattcccgctccctgtaccaaattcataggttggagccttaacgcatacgtgacttagtttggagacagaaccttaaaagaggtaattagggttaaattaggtcataagggtggagccctcatccagtggaactagtatccttatgagaaggggaagagtcaccagaattttccacacaggcatacaggaaaggctatatgagaatatagtggaactatggccatctgcaaaccaggaagagtggtctcacgaaatcaaagtctgctcgaaccttgatctggaacttctatccacacgaatgatgagaaaataaatttctgttgtttaagccacctaggttgcagtattttgttatggcaaccctagaacttatgaaatgttatcataagaaatccatgtttactatccatttgtattcaaaagtcaagagcgcagggaatcagcacagattaaaaattcacaagaaccctcatggtagctcattcagaagaccagaaaaacaaaggaagagttcaaggtatcagcaagttcacagaacagaatattacttgaccaattcaaaagttggaccagtcaggttcaatgtgaggaacaggtaaagatttacatgtgtttcactgcctactcaaaagaaccctgtgctgtctagttcagttcagttcagttcagttgctcagtcgtgtccaactctttgagaccccatgaatggcagcacgccaggcctccctgtccatcaccatctcctggagttcactcaaactcacgtccattgggttggtgatgccatcaagccatctcatcctctatcgtcccctcttcctcctgcccccaagccctcccagcaccagtgtcttttccaatgagtcaactcttcgcatgaggtggccaaagtactggagtttcagcttcagcatcattccttccaaagaacacctagggctgatctccttcagaatggactggttggatctccttgcaatccaagggactctcaagagtcttctccaacaccacagttcaaaagcatcaattcttcagcattcagctttcttcacagtccaactctcacatccatacatgaccactgggaaaaccatagccttgactagacggacctttgttgataaagtaatgtctctgcttttgaatatgctatctaggttgggcataactttccttccaaggagtaagtgtcttttaatttcatggctgcagtcaccatctgcagtgattttggagccccaaaaaataaagtctgccactgtttccccatctatttcccatgaagtgatgggaccagatgccatgatcttcattttctgaatgttgagctttaagccaactttttctctctcctctttaattttaatcaagagactttttagttcctcttcactttctgccataagggtggtgtcatctgcatatctgaggttattgatatttctcccagcaatcttgattccagcttgtgcttcttccagcccagcgtttctcatgatgtactctgcatataagttaaataagtagggtgacagtatacagccttgacgtcctccttttcctatttggaactagtctgttgttccatgtccagttctaactgttgcctcctgacctgcatatgctttgctacctaagaagattcttaatttacattctttcagtaatcttatacatgccattagtttggaccatcaaaaaatatccctaattctacctatcgccacaaacggaattcactagtaggactgtaattaacactgaggcattatttcaggccatcattcaattactgagtctttttggtgtacttgtgatgtctgaggctttgagatgcagagacagatgaaagacattctactatggagaacaatatggaagtttcttaaaaagcaaaaatagagttaccatattatccaagaatcccactcctggacatacatctggtgaaaactgtaatttgaaaagacacatgcatgccaatattcatagcatgatatggaagcaatctaaatgtctattgatagatgaatggataaagaagatacatgtatatatagatgtgtgtgtgtacacatacatacacacaatggaatgttactcagccataaaaagaatgaagtgctattaaatttttatcctaaggatccccagggatccctggggcactgtggagggacatccaaccccatccctgggatcagaaaagacttcccagaaacgctgactctagacttgagagttaaaagcctcagttgacttcaggaagggcaattttttctaactgattttactgctcctgtgtgcatgctaagtcgcttcagtcatgt

SEQ ID NO: 30 - DNA, 4946 bp, synthetic construct
  source 1..4946: mol_type = other DNA
cgccgcaaattccccaccccccgccccctcaggtaacccaggaaacccggtacaccaccccctcccccccgccgtccggccccagactcgctcctgcgcttgcgcacttgccagcctcgcgcgtcccgagccccgcccctcgccggtaaggcagcgccagcgtcgcaggcgtaacgcatgaaggccggagccaatgaggaagagaggaaggcgggccgagctcccggggtggggccggggctggggttttctcctcgcggcggggttgggtggctggtcccgcgtcctcgctgttccagggctttgcgaggcgggttgcgtcacaccctagggagagcctgctctgtttgaaaagcaccaagtccatgcgtagcgtcctctccctccgttcaacataatcatactgtgccccttctctgggtctggaggatgggagtagaagaaatatgggaaggggttgggagagggagaaagggttacccacggggaactctgcccttcctctggggcctggaaaaaagaaacattttgcaaaggttactgtaggcttattaccaaaacctaaagaggtgtacgaagctactttagaattaagtgcaaaggtgtatgtttaaccctcttcacacacagtattaggcagtgtgcactgacaaagttgtgtgtcttacaatagcagtgcctccagagggtgggaaccataggttaaatataagaatattttagcttcatcactgactgtcaggtccagcatatggctgaccaggctactgatgccgtagtttggcatcaccacctagtcactgtggctggccttgcggtggaatgtctaagatactggaaaagaacctgagctttgaggcttgaaagtctggggttcaagtcttacctaatacaaggtacagctgatccttgaacaagagggaagctgttaggggcactggcccgctactagttgaaaatcctgcatatagctttataatcattatctatggattcaaccaccttcagatggtgtagcactgtattacagatttagtgaacaacttttgcatgtaagtggactggtgccctttcaaacccgttgttcaaaggtcatctgtataaacaatggtttactaattgaaatgaactggtttagaatcaacaactttacatgggactctagaaataattcaggatattgtatcccaaggctgtataccaaatgcaacttccatctgctccagtgactaaacaagtaaataggtgcccagtgatgtggtttgaaggagctcttggggaaatcccaaactttaaaatcttcccactgacttctgaagttcaaccattgacagttcacccacttcctcccacaatctttcaaaactggactactccagggaagggcaatacatgaaatctccagcaagttagtgaaagagatgctatttacttaacaaatatatagtgacacctacttgtgttggtactgtgtgctaagtgcctaagatactttggtgaattttcctgaattcagaggaagaggaagccaaatgacctatttcacagttttacctgtaacagaacctgctcttatttatacaccaactttcacacactaatctcaaaaacaccctttttttttctttaatggtcaaaagagatcagaagtgtcaattaagaagctagtttctgtttctcaaatgggaaataatagacagtcatgattttgttaaagacaaagagaacaaaacagactttacatgacaatggtacacagttggccctcaaagtattattttcttgtaaaaggcacaaagtaatgtcttttgtgactattattttctccttatatctgttataaagtattttaaccatagtattaattctgtataagagtatcttagaacatagatgttaaatatacatattagataaaacttatttaaaatatttcagatgaacacacaaaataatgtgtaatcaagcacacgcaatagaaggaagaataaagacaagtgatagatatctagaaggaagccctacttatgcatttatcacatgctggaaaacttcataagtgggcagttcgccagataatttgactctaaaattagtttctaaagggagattctaaaatcaaggttttaaaagatgcagttaatgtatatgtgcataatttcacatccaagtcaccagaatacggaaaaataatcattttgtggccacatgcatatgtaaatcagaccatgtcacatttctgcacagaaccctgtagtggctccccatttcactcaggtaaaaccaaagtccttacaatggcttgcagatttctgcaccatctggatccccacaacttcatctcttcctactctgacatcttgcaggcacactggcctctttactgtttaccaaccactctagatacattcctatcctaaggccttggcactggctgttccctcttcttgaaatgctttttctccagagccacagagataactcccttaccgccttcctttctttgctcaaatttcatcatctcaatgaaatttacctcaacactgccattaagcctcaacaagaggggactctgcccatacttaagtctccctcatatcacaaataccattgattcccgctccctgtaccaaattcataggttggagccttaacgcatatgtgactcagtttggagacagaaccttaaaagaggtaattagggttaaattaggtcataagggtggagccctcatccagtggaactagtatccttatgagaaggggaagagtcaccagaattttccacacaggcatacaggaaaggctatatgagaacatagtggaactatggccatctgcaaaccaggaagagtggtctcacgaaatcaaactctgctcgaaccttgatctggaacttctatccacacgaatgatgagaaaataaatttctgttgtttaagccacctaggttgcagtattttgttatggcaaccctagaacttatgaaatgttatcataagaaatccatgtttactatccatttgtattcaaaagtcaagagcgcagggaatcagcacagattaaaaattcacaagaaccctcatggtagctcattcagaagaccagaaaaacaaaggaagagttcaaggtatcagcaagttcacagaacagaatattacttgaccaattcaaaagttggaccagtcaggttcaatgtgaggaacaggtaaagatttacatctgtttcactgcctactcaaaagaaccctgtgctatctagttcagttcagttcagttcagttgctcagtcgtgtccaactctttgagaccccatgaatggcagcacgccaggcctccctgtccatcaccatctcctggagttcactcaaactcacgtccattgggttggtgatgccatcaagccatctcatcctctatcgtcccctcttcctcctgcccccaagccctcccagcaccagtgtcttttccaatgagtcaactcttcgcatgaggtggccaaagtactggagtttcagcttcagcatcattccttccaaagaacacctagggctgatctccttcagaatggactggttggatctccttgcaatccaagggactctcaagagtcttctccaacaccacagttcaaaagcatcaattcttcagcattcagctttcttcacagtccaactctcacatccatacatgaccactgggaaaaccatagccttgactagacggacctttgttgataaagtaatgtctctgcttttgaatatgctatctaggttgggcataactttccttccaaggagtaagtgtcttttaatttcatggctgcagtcaccatctgcagtgattttggagccccaaaaaataaagtctgccactgtttccccatctatttcccatgaagtgatgggaccagatgccatgatcttcattttctgaatgttgagctttaagccaactttttctctctcctctttaattttaatcaagagactttttagttcctcttcactttctgccataagggtggtgtcatctgcatatctgaggttattgatatttctcccagcaatcttgattccagcttgtgcttcttccagcccagcgtttctcatgatgtactctgcatataagttaaataagtagggtgacagtatacagccttgacgtcctccttttcctatttggaactagtctgttgttccatgtccagttctaactgttgcctcctgacctgcatatgctttgctacctaagaagattcttaatttacattctttcagtaatcttatacatgccattagtttggaccatcaaaaaatatccctaattctacctatcgccacaaatggaattcactagtaggactgtaattaacactgaggcattatttcaggccatcattcaattactgagtcttttcggtgtacttgtgatgtctgaggctttgagatgcagagacagatgaaagacattctactatggagaacaatatggaagtttcttaaaaagcaaaaatagagttaccatattatccaagaatcccactcctggacatacatctggtgaaaactgtaatttgaaaagatacatgcatgccaatattcatagcatgatatggaagcaatctaaatgtctattgatagatgaatggataaagaagatacatgtatatatagatgtgtgtgtgtacacatacacacacacaatggaatgttacttagccataaaaagaatgaagtgctattaaatttttatcctaaggatccccagggatccctggggcactgtggagggacatccaaccccatccctgggatcagaaaagacttcccagaaacgctgactctagacttgagagttaaaagcctcagttgacttcaggaagggcaattttttctaactgattttactgctcctgtgtgcatgctaagtcgcttcagtcatgt

SEQ ID NO: 31 - DNA, 5333 bp, synthetic construct
  source 1..5333: mol_type = other DNA
ccgcgagcgccaagccgcggccgctcctcccagcgccctccccctgtgcgacggccacgccccttctgggcgcccctcctcgcctgggtctgggtctggctccttggcggcggtgtctgacccctgttctttcgaggcgctgatcccggcggactgagcccgcggggagtggttgagcacgtcggcccccgccccgcgctcacgaccccagagcccacacatctctccacctctcctccgcggtgatgttcccggacgagagtggtgctgcccgccgcgcgctttgtgaagctgggcaccacgcgcacatcaagggatcggcccgccacctggcagatgctccccagacaataaaggtccgccaccgcccctcgagcaagctcccgagggaggaggctggacgccgctggtggtggatgggtgcggggaacaggaatttggggggagcggaattgggccccgacattcttctgtattcctgttgttcgagggggaccaagcgtggcgccgggagctacggtagaaggctgagcccaggcgtaggtaatttttaatgctcagtttctgcacctgctcttcaacctgtaagagcacagttggtttctattggtcggcttggcctctgccgagacctttctggagactggggctttggggtagggaggggccttgtgaagtttactctgcgagctcgagtttttaaacccatttgcgccaaagttcttgtactaaaggccctctgagcgtctatttttttccccttgtactctttctgtgcctctctatcagaaggtagttacaagggtggggattcttgtgttcctcttagctgccctagcttgtaccaagagcagaacaatagtaaaatgatcctcttaagccaagtttttcacggcctaggaagtgctttacccaaggaaacaacagtatctgtgtagggttttatagttcctccttatgctgaatgttatttcatgctcacaataacagctttgtcaggtaggtagatttattatttcagttctaaaagtggcccaagatcacagttaaaagaggggagacctaggcattataagattgactccaggtatgatgagtcttccctctgcattctaataaatcagtaagacacctctccattctcttcagaatggaaaataaatgggaagtacccataagaaagagctgtggaataatttagatgcatttagactcttctctaaagtagcagccaaaatttatcattaaccagttctcctcctccccttatttcatactgaaagctccctcgttccatattggtagggcctaaactggtttaagaaatgtaactttcaaagttagctaatcacttaaatattatcactactcgatcagtatggatatatgatcacctctttttaaatatattcattcagtaagcacttaagtgtctatggagagcaaggaggacctaggcactaggaggaccattgtttttaggtgtgggcaccccgccacaatccttagagtcaagtgtgggaacccacagtccaatgtcctagcaaaaggttcaagtcacacagctatgggatgactgaaattcaaagggtactgtacccagggccatcagaccacatctttttctgaaaatgacagcgataaaaggtaccactcagagcaataagtttctgggatcttgatttatttctaaaatcatttcatagtagggagaaaaatcactgtgttaaaatatcagcattatgcctgagagagaaaatttacaattttcttctacaatcaactgatattggagaggataacaagtcttcagaagactggatgaaaagagaccatactgcaatttaattctaggcaggaaacttctatccagaaaaaaaaaaaaatagagaattatacaatgctggactatcattcatgttctccattcaaaaacacctatgaaaaaacaaacaacaaaaaaaaacacctatgagcatctaggtaaacatatgctacaaaaaccaataagatggagtctctgcctagaggattctcattccaggagggaaaacagataccccaataagaaactataatatcttttaacaggggccatgttggttgggagaatattgaaatctttctgtactcattgagaaaaacaaaaaactacttccctaaacaccttctcatcccaattccccttaagaacaccccaaatctccccagatatagcaattaaaggtttaataccaggcatggcagagaaccaccagtcctggtgcctttaggtttattaactatttttcataatatcctctgctagctctggcctaaaaggaggcatgtagaaggtgctatgagcgaaatgccagtggaatgcactgtgttttagattgtgtccagtagaaacatttacaataatggaaatattttatatctcaggtgataatgtgtgggaccagttctgtactattttgtgatagcccttgcaccctttcatgagttatactttatatatttttattgttttcataattgtattagtgagggctcttgattgcgagttgtagaaactcaactcaaactgacttatgcaaacaaagaaacataaaacctattagctcagataactggagagtccagggattatgatgttccagactttcctaggtctaagagctcagtcatcaggacttgaagatgtgtgtgtgtgtgtgtgtgtgtgtgtgtgtgtgtgtgtacatgcatgtgcacacacacatgcattcttcttcatctccaacctctagcaatgcttccctgtatggctttcctgacttcatatgtaggtctagacttacagctcattgtggatgcaagcagagcttttctgccctcaggaacatctcctacaaaagtgctgacttggcttgagtcacatgctcatctagaaccagtcactgaaaccagacagatggaacataaggatcagccaggcctgggtcacatgcccaggcctgggtcacatgcctatccctggagccagggttgggggcccacttcatccacatcgcaaggcttcagaatgtggaggactgtgttctcaaaggaaaactgaggaggaatgttgctgcacaaagagaagcagaaaggttcactatagcctcacacagcccaaatctgtaatttgaaattttttatatttctgattgtaaaagtaaagatgcttattgtagaaaatttagaaaataccccaaattataatgaataaaacaaaacaacaatcacccaaggtataattactgaagagttcattttgttatgtttcttttgaatctttcttctctgttctaacttttttttttcattatatgatttaagattttacaatatttggtagatttctatctagctttttcactaatcataacacaagcattgtcccaaatcattatcaattatttggaaacataccatataatggtaacataatgttcagtccaccctatatatgtaccataattctgggtgtttcatcattcctctcttttttccagtttttttcctaacataaattacttggtgatgatcttggtgaataaaatgtccttgcctctgatcacttatttaggatagattcctatagatggaattactacattgaggggacaatcattttcaaatttgctccttgatagtcactatttttccagtaatgatttgaaattccatccagtgggagaaatgagtatatgacctttattggtagactctgttttagtgataatgctcacagttagtgaggacaaaagaagatgatgtgtgctcttagtacaagctttcatgcagtatttgttgaacacctactatgtgccaagtgtgctctatttggtgctaggaatatggagttggacaagacacagatgctgtcctcatgggatttgcagagaaagaagagggacacatcagggggtcaaagataaaatcattatatgtgctctaacagaagtctgcacagggtgatgtttgaatgcagaggagacccttgatcatattgtacaatggcctcaagaagcttctgcaaagacttggcagattctgaggcatgcagaagagaggaggaccaagagggagagggagaaagcaggcatgcaaagggctagaggcaggaaccagcataaggcagatgaaccatgctatagttcatcacagcacagctagggaagggtgtgtagtgcagcacagctagggaatcagggcctcacaggaatgggagaccacagagataaacaagagtcattcctgccaaaaaccatgaacttcatcctctgatgaagaatgaagctatgaagagtcactacaggatgactctggggccagatgtgattaagatttacattctggaaagatagtgggaagactcagtgaagggtaaatgaaaaggagccaaaacttgataaaatagttgggagcctaatgtggtgatccataagaagagtggtgaactggattaagttaatggaggtgaaaatggtgagaaagggtgaaaaagagatactgagctgaccttagaccttgatccccaactgtgctgtgaaaggggagtggaaagagggacggatttctgatgtcagttccaacgtgcttcccttcagcaagacacaaaagcaggcttataatggaacgtgaaggatgtggagtcgggcctggtgggtgtgaggtgctcatggatgctgtgtaagctagacgggcagtcctggagctcagcaagggtcctggccatagggaagtggcggcggccaagggtttggataaggtcaccccgatggagtgtcccccgtgaggaaaacggggctgatgtcatacctagggaaacgcccacatttaagggatacgcaggaaaatggtctcacaaaggatcctgataagcaagggtcagagaagcaaacagagagctatggctcaaggagatttcaggggcatgggcgtgttcaggtgttgcctatctcttaagaagttcaaataagatagaaatgcattggttgccttgtaatcataatagaaaatggcaatacctagcaagttccaaattctttatgttgatagaaactaacccatttcaacctcacagtaactctaccaggtaggtactcttggtaccccccagtttatagatgaggaaactgaggctcaagaaagttaagtaacttacattaaatttacaccaggattcgaacccttggcaggctgattccataaccctggtacttaattcctgtgataagtcacctccctacttaacctcaaggttattggtaactaaatccatactctggcactcagacacacacctagacacacacatacac

SEQ ID NO: 32 - DNA, 5333 bp, synthetic construct
  source 1..5333: mol_type = other DNA
ccgcgagcgccaagccgcggccgctcctcccagcgccctccccctgtgcgacggccacgccccttctgggcgcccctcctcgcctgggtctgggtctggctccttggcggcggtgtctgacccctgttctttcgaggcgctgatcccggcggactgagcccgcggggagtggttgagcacgtcggcccccgccccgcgctcacgaccccagagcccacacatctctccacctctcctccgcggtgatgttcccggacgagagtggtgttgcccgccgcgcgctttgtgaagctgggcaccacgcgcacatcaagggatcggcccgccacctggcagatgctccccagacaataaaggtccgccaccgcccctcgagcaagctcccgagggaggaggctggacgccgctggtggtggatgggtgcggggaacaggaatttggggggagcggaattgggccccgacattcttctgtattcctgttgttcgagggggaccaagcgtggcgcccggagctgcggtagaaggctgagcccaggcgtaggtaatttttaatgctcagtttctgcacctgctcttcaacctgtaagagcacagttggtttctattggtcggcttggcctctgccgagacctttctggagactggggctttggggtagggaggggccttgtgaagtttactctgcgagctcgagtttttaaacccatttgcgccaaagttcttgtactaaaggccctctgagcgtctatttttttccccttgtactctttctgtgcctctctatcagaaggtagttacaagggtggggattcttgtgttcctcttagctgccctagcttgtaccaagagcagaacaatagtaaaatgatcctcttaagccaagtttttcacggcctaggaagtgctttacccaaggaaacaacagtatctgtgtagggttttatagttcctccttatgctgaatgttatttcatgctcacaataacagctttgtcaggtaggtagatttattatttcagttctaaaagtggcccaagatcacagttaaaagaggggagacctaggcattataagattgactccaggtatgatgagtcttccctctgcattctaataaatcagtaagacacctctccattctcttcagaatggaaaataaatgggaagtacccataagaaagagctgtggaataatttagatgcatttagactcttctctaaagtagcagccaaaatttatcattaaccagttctcctcctccccttatttcatactgaaagctccctcgttccatattggtagggcctaaactggtttaagaaatgtaactttcaaagttagctaatcacttaaatattatcactactcgatcagtatggatatatgatcacctctttttaaatatattcattcagtaagcacttaagtgtctatggagagcaaggaggacctaggcactaggaggaccattgtttttaggtgtgggcaccccgccacaatccttagagtcaagtgtgggaacccacagtccaatgtcctagcaaaaggttcaagtcacacagctatgggatgactgaaattcaaagggtactgtacccagggccatcagaccacatctttttctgaaaatgacagcgataaaaggtaccactcagagcaataagtttctgggatcttgatttatttctaaaatcatttcatagtagggagaaaaatcactgtgttaaaatatcagcattatgcctgagagagaaaatttacaattttcttctacaatcaactgatattggagaggataacaagtcttcagaagactggatgaaaagagaccatactgcaatttaattctaggcaggaaacttctatccagaaaaaaaaaaaaatagagaattatacaatgctggactatcattcatgttctccattcaaaaacacctatgaaaaaacaaacaacaaaaaaaaacacctatgagcatctaggtaaacatatgctacaaaaaccaataagatggagtctctgcctagaggattctcattccaggagggaaaacagataccccaataagaaactataatatcttttaacaggggccatgttggttggaagaatattgaaatctttctgtactcattgagaaaaacaaaaaactacttccctaaacaccttctcatcccaattccccttaagaacaccccaaatctccccagatatagcaattaaaggtttaataccaggcatggcagagaaccaccagtcctggtgcctttaggtttattaactatttttcataatatcctctgctagctctggcctaaaaggaggcatgtagaaggtgctatgagcgaaatgccagtggaatgcactgtgttttagattgtgtccagtagaaacatttataataatggaaatattttatatctcaggtgataatgtgtgggaccagttctgtactattttgtgatagcccttgcaccctttcatgagttatactttatatatatttattgttttcataattgtattagtgagggctcttgattgcgagttgtagaaactcaactcaaactgacttatgcaaacaaagaaacataaaacctattagctcagataactggagagtccagggattatgatgttccagactttcctaggtctaagagctcagtcatcaggacttgaagatgtgtgtgtgtgtgtgtgtgtgtgtgtgtgtgtgtgtgtacatgcatgtgcacacacacatgcattcttcttcatctccaacctctagcaatgcttccctgtatggctttcctgacttcatatgtaggtctagacttacagctcattgcggatgcaagcagagcttttctgccctcaggaacatctcctacaaaagtgctgacttggcttgagtcacatgctcatctagaaccagtcactgaaaccagacagatggaacataaggatcagccaggcctgggtcacatgcccaggcctgggtcacatgcctatccctggagccagggttgggggcccacttcatccacatcgcaaggcttcagaatgtggaggactgtgttctcaaaggaaaactgaggaggaatgttgctgcacaaagagaagcagaaaggttcactatagcctcacacagcccaaatctgtaatttgaaattttttatatttctgattgtaaaagtaaagatgcttattgtagaaaatttagaaaataccccaaattataatgaataaaacaaaacaacaatcacccaaggtataattactgaagagttcattttgttatgtttcttttgaatctttcttctctgttctaacttttttttttcattatatgatttaagattttacaatatttggtaggtttctatctagctttttcactaatcataacacaagcattgtcccaaatcattatcaattatttggaaacataccatataatggtaacataatgttcagtccaccctatatatgtaccataattctgggtgtttcatcattcctctcttttttccagtttttttcctaacataaattacttggtgatgatcttggtgaataaaatgtccttgcctctgatcacttatttaggatagattcctatagatggaattactacattgaggggacaatcattttcaaatttgctccttgatagtcactatttttccagtaatgatttgaaattccatccagtgggagaaatgagtatatgacctttattggtagactctgttttagtgataatgctcacagttagtgaggacaaaagaagatgatgtgtgctcttagtacaagctttcatgcagtatttgttgaacacctactatgtgccaagtgtgctctatttggtgctaggaatatggagttggacaagacacagatgctgtcctcatgggatttgcagagaaagaagagggacacatcagggggtcaaagataaaatcattatatgtgctctaacagaagtctgcacagggtgatgtttgaatgcagaggagacccttgatcatattgtacaatggcctcaagaagcttccgcaaagacttggcagattctgaggcatgcagaagagaggaggaccaagagggagagggagaaagcaggcatgcaaagggctagaggcaggaaccagcataaggcagatgaaccatgctataattcatcacagcacagctagggaagggtgtgtagtgcagcacagctagggaatcagggcctcacaggaatgggagaccacagagataaacaagagtcattcctgccaaaaaccatgaacttcatcctctgatgaagaatgaagctatgaagagtcactacaggatgactctggggccagatgtgattaagatttacattctggaaagatagtgggaagactcagtgaagggtaaatgaaaaggagccaaaacttgataaaatagttgggagcctaatgtggtgatccataagaagagtggtgaactggattaagttaatggaggtgaaaatggtgagaaagggtgaaaaagagatactgagctgaacttagaccttgatccccaactgtgctgtgaaaggggaatggaaagagggacggatttctgatgtcagttccaacgtgcttcccttcagcaagacacaaaagcaggcttataatggaacgtgaaggatgtggagtcgggcctggtgggtgtgaggtgctcatggatgctgtgtaagctagacgtgcagtcctggagctcagcaagggtcctggccatagggaagtggcggcggccaagggtttggataaggtcaccccgatggagtgtcccccgtgaggaaaacggggctgatgtcatacctagggaaacgcccacatttaagggataagcaggaaaatggtctcacaaaggatcctgataaacaagggtcagagaggcaaacagagagctatggctcaaggagatttcaggggcatgggcgtgttcaggtgttgcctatctcttaagaagttcaaataagatagaaatgcattggttgccttgtaatcataatagaaaatggcaatacctagcaagttccaaattctttatgttgatagaaactaacccatttcaacctcacagtaactctaccaggtaggtactcttggtaccccccagtttatagatgaggaaactgaggctcaagaaagttaagtaacttacattaaatttacaccaggattcgaacccttggcaggctgattccataaccctggtacttaattcctgtgataagtcacctccctacttaacctcaaggttattggtaactaaatccatactctggcactcagacacacacctagacacacacatacac

SEQ ID NO: 33 - DNA, 134480 bp, synthetic construct
  source 1..134480: mol_type = other DNA
acagcaaattaaaaagtagagacattactttgccaacaaaggtctgtctagtcaaaactatgtttttccagtagtcatctatggatgtgagagttagactgtaaagaaagcggagtgcagaagaattgatgcttttgaactgtgatgttggagaagacccttgagagtcccttggactgcaaggagatccaaccaatctatcctaaaggaaatcagtcctgaatattcattggaagaaccgatgctgaagctgaaactccagtactttggccacctgatgagaagaactgactcactaaaaaagaccctgatgctgggaaagattgaaggtgggaggagaaggggatgacagaggatgagatgtttggatggcatcactgactcaatggacataagcttgagtaagctccaggagctggtgatggacagggaaccctggcgtgctgcagtccatggggttgcagagtcggacatgactgaacgattgaactgagctgaactgaacctgaagtccttgatagcctttgaaggtcaacggactaaaattaggcacaagaatcttgttttcatccatattttctgtggagcagatcagtggctttcctcatattaaaaggtttccagtgaaccaaaagattaagaagattccagtgtttctcagtacaggtatggatgatatttagataagaaagtttgtcattgtgcaagacatagagagtctctagcccataccccttaaattcctttaacacctctatgttattatgatattcatccccttctagtggtagtaatgttagttgctcagtcatgttcaatgctttgagaccccatggactgtagctcaccagactcctctgtccatgggattttcccaggaaagaatactggagtggattgctattcccttctccagaggatcttctcaacccggggatcaaacgcaggtctcctgcattgcaggcagattctttaccatttgagctacagggaagtccatattccagtcacctatagctgagaaacaagatgagaccacaagtatagtctcagtgtttcttgcatgttttacgtttcctcttctttctggcagagaataacttttttcttttttttaactttaatgtctaatttccagtagtatctatcatggaatctgggatcctatttcacgagcacaaaaagactattttccacaggagtgttcaggttctgtaatattttactggtatggacctaatgtgatgtttcatccaaggcgaactagcaaacagccaactcctgggaggtaccggtcattagtctagcctccttagaattttcttgcaggatgatcatttattacttttgaaaggacaaactcacaaatgaagtgttagtctaagaaatatcttcaagatctggcaaataaaacaatgaccattgagcagcatttttatagattacagatcattctgttgcatttgacctcaaaacatcttcaaaaaacagattttgcaatctcctcttttatagttgaagaaattaaggcttctaggaatcaagtgacaagctcaccattacacagcactttagagaaggactcgggatttcaactgtgggtcttagaactttaaaagccaccctctaactctctacttcctccctgatacctccaaacacttttaaaagaaagaaaaataccctcctggaactaatcagagggaacgactggaagttcaaatgagccataacagtgtctgttaatctgttacctaacagtgccgggaagctgtggtgggggtggggggagttgacacttgtacattttatgtgccccacagcttcactcctgtaaagttaggacgatttcatttgaagtcccagccaactgagaaattaaaagcagacagtgacgacgctgttttgtaactttgtgccttttaaaattaactgcacctttcaagtgccgctttggattagaagtggctaattggataaaggagagagtcattcagctggatgaaaagtattgtaaaagccctgactgagttagttaaaggaaagggacgcacaagaacagtactattttacttacagagtgaaggaaagttcctccacgcagttccaaatcgaggacaggttgatttgtcgcagcagcgctgtaatacatgtagcctaatataaagtctgtttaagagagacttgaaggctgaaactttctagtgccaaaaccctttactattttttttttaaacaaggacttggcgtgccctcgcgaaatgtgtgagcttggaggagtgatggtaggagaacacagctgagtccattcttattaaatggtcaagtctgtacccttgaagctagtggagagagagaagggagaggagctgctgacattgacaatgaatccaaactggagttgcactagcggtgtctaccacgttgcctctgccctcgcttagccttctgggaattgtagttttgtggcgagcggctcccctggcaagtcgggtatactcggcccggctgtgactacagatcccagacggcgccgggcagccgcccctcccgtcccggttcgagtgtaaactcccggcgccggggcgggcggccgcgcgcgggccagcgggctgagctctgcaaggcttgggggcgcaccgctcgggggacccaggccccgccgcctcccctccgaccccgggctcggttctcacttcggagcagtgcgaggacgggaagctggagccatgcagtcggaatcggggatcgtgccggatttcgaagtcggggaggagtttcacgaagagcccaaaacctattacgaactcaaaagtcaacctttgaagagcaggtgagtggtgacagctggagggaggcgcggcccgcccctggaggacccgttgccgcccactctgaggcgaggaaagcagctggcccggactctgggacaaggaccccgtgcccttgccccggggcagagggcgaactgacccccgcagctgggggccgtgccggcccggacgggtgcacctatgagggtctcctcccgagcgcattttgggcgtgcggcgggcagccccggacagcccgcgagggcgaggggatccctcggttggggataccagctgcggagagcgggtgggggctggggagtgccccgacgcggaggtgggggagaaggagcgccgggccgggacgcggtctgggttagtttcgagtgaaccccttttctgaaaatcccagcgggctgagaacttgggggagggagagcttacggtggatcgagcgcgacgttagagacaagcaattagctcctgtgttgttggccgcttaggagtcggcccctctgggaaaaccgacctcgggccgcctccaggtgaggtttcccgagccccgcccctgaccttcccggccgcggcacccctgtgcgggaggggcggggtgcgaggtgggggggggcgtgtctccttgtccaggtggaactcccgggctttggggtctcattcaaatgcaggccttccctggagggggtggagcgaggggggggactttgagacggagatttggcgagtgaccgctgttgggccgcgacatgtctttaattctctgggcacttctaaaactgtttgggaggagagtgaagacacctgctggtctggcgtcccatcacccttagtgctcacttcttaggctgcctccactcccacttgtcccttggagcagtttgggtgtcttttttcctctctgtcctgtggccactcaggacatttccaacgtttactaagagagaggtggtcagttgaggcgctgagagtagagagggtttagttccgcccctcagttgtgaggtagcatgaggctgaaactcgaagcttcagcagtgcttctgcatccgtttcaaaccttctgccggccgctcactgtcgatagtgtttgggtgaagagggggacagggtccggaaatcatggtgaaggaaggactggatccggagtgaagggatgtgatcagagctgctggggcatgggggattggtacttgtgcagttaagttcgtttccttcagggctgtgtcagactctgaatccactttggagaaggaaatctgtggagagcacaccgactgactgggtggctgaagcagcctcttggcagatgcttcagggagattggaaggaaacctcctatgcagttagttgcctaaaaccagcctttagttggtggtttctcttcataatggctgttttgtgtgtgagcctagattgtgtgtgttgggggttgggggtgtggagtaatagtgtgtaaagggtattgttggttatgctcattggggctttatctgtattcggctgaagggaccagtgttttaccgagcagtctctgcttttgcttctataagcaaatgcttacatggccagaatgagggagggagtgtgtgtgtgtgtgtgtgtgtagtcctgaaagaaatgaattaaccggactgtttggaacatttttgatggtagctgatacataacattaaataaatttgagagagtgaggaaaataccatctggaaaaacccaaatgaatgccatgaaactcacgttggaggatttggggcctgttctttttcagagtcggcaaaaaaaaaaaaaaaagacttgcaagggttgagcatcctcaggagctagcttgcacgtgtaaagaaaattcgtggacgtgggaagcactggtttcacacgttgaagctggaaacaggtgcaggatggaaccggtgcacagagaaaggctaaatgaaaaaagttgtaaaacttgtctgtggagcagacacatgctctttgcaataaaccagtgaaataaaatctgtgaataaatatatggggttggcaaaatttccctatagtacagttttccacagttttctgatgtattgtcatcgacatctgttgtgtgactttgcaagggctgcatgttcagggcctcctcctcctggctttttgtcttaagtctgcctgggcacctcccttcttgtaatcttggttggaaaaagttgaaatcagaaggggaagatggctgcaactgccttgtctgtcagatgtattttctggattgtcttttggagttgaagataggtctagaatcctcctgaaaaagaagactgttaataacagaagactgttagttgtgtccaactctttgcgaccccatagactgtagcctgccaggctcctctgtccctgggattctccagacaagaatactggagtggattgccattcccttctccaggggctcttcccaacccagggatccaacgtgggtctcctgcattacagccagattctttaccatctgagccaccagggatgcccctagaatctgcctacttgtcaccaactcctctgctcccactttagttcagactgccacctggcctcactggctaattgtctcttacctgttctcctgcctttatccttgctgactctcagtggatttttcaacacaggagccacaatgtctatgttaaaatcggttttcaacctgaatggtggcttgccccactcaggggtaattcagcagtgtctggagacatttttggttgctacagtggatgagagttactactggcctctagtaagtagagagtggaaatgctgctgaacattctccagtgctcaagacagtctcacaatgaagaattatctgtacccagattgttactgctgaggttgagaaacctcatggtaaatgtatcacatcatgttctctcttcagaaccctccctggtatcagtaaaactcgagacccttaaagtggtccaaggcagaccacttaatgggcgggctccctgtcagcactgactgtgggtctcttgttgcccctggtccctctgctgcacccagcctcctcaccattcccggaacactccagacctctccacttctggccctttgtaagctacacttgctggggccagcaagtgtgctttctgtctttgtccagagagcagtagcgttcattccctccccagccgacttcatgtcttcccttaaatgtcattcctgccttgagcacactctgtgctgtggctctccgtctaaactctcagtgtcccttgccctgctcggttttccccacagtacttacattatgacctagtctatcattttctaatgggttccagttatgctatgtttctctgtactaaattgcagggtccaaggggatagggatttctgggtcttcctggtttactgtgatgcccccaggacctagaacagagtttcatcatcagtgctgttgacactttggactggataggtctttgctgtgggggctgtcctgggcattgcaggatgtttaacagcattccaggcttcttcctgctcaaggccatagcatccctcctcaagttgtgacatccaaaaatatgtccagatgccaccaaatgtccatgggacacagactcacccctgtggcagatgaacaggcctagaacaatgcctggcacaatagtgttttgttgtttgactatgtgttgttttctccctttgtatttcattctggatgggccatttgattctggtttttgcatttaaggctgccttccttttaaaataggtatccaccatgctgtctccaaagaggagtttatatattcttcatctggactaggcttagatgtgcaagtgtttgatgaggaaggacagtttcattcctaacccagacctcctagactttagcaatgtgaagccaatggatttaggtgatggaaccccactttggtcacaatgactggagaagctgtgtcatagagagacacacacaagagaaaagggtctcctgaagaaatgtttgcagtttggttcctccccaaaggtttttgaaaccttggtgtattctcctggaaatgagccatgaatggtgggtggcagaggaaaggtgccaaatatgagagggtgaacccagatatcacacatgggcacagtcaggtcagggtcagatgtggaaccattgaatgggtccctctcagggaagggactctctgtagggctttagatcccgaaaaaaaaattttttttaatatgttagcatctttcaggttcatagttcttttgttttgtttcagttcagttcagttcagtcgctcagtcgtgtccgactttgcaaccccatgaatcgcagcacgccaggcctccctgtccatcaccaactcccggagttcactcaaactcaggtccatcgagtctgtgatgccatccagccatctcatcctctgtcgtccccttttcctctgcccccaatccctcccagcatcagagtcttttccagtgagtcaactcttcacatgaggtggccaaagtactggagtttcagctttagcatcattccttccaaagaacacccagggctgatctcctttagaatggactggttggatctccttgcagtccaagggactctcaacttggtgctaaattttgtggctttgtagctgctaatgcccttttcctggacagacttcagaatttatttaatctaattccagtttctcctcttctcaaagttttaataatggtttagataatggttctttaacttcccacaaattagaaatgggaatgaaagtgagtattaggtttatattggcagggtgagataaagcaatggttcccagatgctgattcagagagacgtgtgtgaaatcgttgcagatttgtattcagatgagaaagaaaagatggttgtgtccaactcatgctcacatgcatgaatttccatgtaaagtcaccaccatttcttgaatttagtctgagatttttcctgggcttcccaggtgacactagtagtaaagaacctgcctgctgaagcaggagacataagagattcaatcctagggtcaggaagatcccctggaggagggcatgacaacccactctggtattcttccctggagaagcccatggacaaaggagcctggggggctacagttcatagggtcacaaagagtcggatacgactgaagcgaccttgcatgcacccacatcttcctattaaaaataccctttcaagatggaactgtccatcttgtattgattttggaaaattttcttgatttttctttctgtctaatctgtagagaattactttacatggagatttaagaggattgttctgtcatttctgtctgtccctaacaagctgagtgaccttggggaggctggatgacctctaaactcagtttcttcatctggcaactgaggggcctgcctcctaagggtcttaaggacattaactgtgacattgactatggaaaagtattagcatgatgctgggcacatatttagtgctcagtaaatgttagcagatgttcttgttatttctctattacttagcagtgagtcctgaccttccagaatgtgtttgcatttggttgactctggctttcttctctaaggccagcgttgttatgcaataaaattatcccaagtttagtaaaatctttttgcttccccctactaatgaggtgctgcagataaatcttttgtgttttataattttgatgcagtccttaacagtttctttatgctggttaaaaaaaaacccagaacatctgtggcatcatcacatacatacagtttcatattctacacatatatattgagtacctgcaaattcataccgatgaatgctgttaacatttactgaggccgcactgtgtgccagcccccgtcctaagtggttttacatgtgttaacttgcacaacctgcttgagatgataataataaataagagcaataatgttgtgggttataattttaaaaacaagtaacatgcagtgcttactacatgccaggaatgattctgggtattttacttctgttaactcagttaagtctcacttctaccttgggtacttgtatttttgctgttgacattttacagagaaggaaaccaaggcatcatggttagatgggcctggttctggctctggtcctgtgctccagtgcactagtctgggctgccctgtgaaaggcacggggcctgcctgtgctgcgccttctccaaaacttgcctctgtagtgggagggaagggaacacacagatccagccaaacatacaggacggagcgtgataatcaggcgcatgagccatgggaacgcaatagaggaaggggaactggggtgggcttttgtcagtaaataaggggattcgattttggcattgaatgtcaagcaatactcaaagcatagttctttataacattaaataaaatgttacatgccttaaggcatgatcttttttttttttttgatatgaaccatttttaaagtctttattgaatttgttataacactgcttccatcttggctccccgttcagggattaaactcgcaccctctgcattggaagcatggagtcttaaccactgcgcccccagatgcattcctgcctttatacttgccaccagagtcccagctcttcctcttgttctgtggtcacctggggtggcagagaatggatgcacatagacaggttcagaagtagccatgcttaattaaacacagtgcccatggctttgccacttaactgttgtgtctgtgttcacagctggactcttagcctcctagactctgaatttctttacctgtgaagtggaatctatagaagtgtcctcttaggattggtggaaattttaaaactgagataacacgtgtaaatgtgctttgtagcgtgcctagcacatgctagtaataccaattccttctcttctattttaccatgattgcaattttccccctccgcagcacaacactaaagcaagtgcagaattatgtatctgaagcaaaatggacaagattgaagtacgttaacctggcagatgttcagatcttattatgcaaatttgcttgtgtggtatgattagatggaaaacttgattaaagtgggattctaagtgttggttttgtgtgttattggagatttccttttcccgagtactgctatttatagaattatttaagtgtgtgtatgtgtgtgtgtgtttaattccctttgagttctgcagtgccgtttgcacaggctgatgtttatatctgctccagttgtgcaagaagtggaaaatatcctttttttagaacaggtcacatgtgcttactgtcaggaataggacctcagtgtaaaaaaatgtatcttgggacaaatcaaagttactaaatttccccttccaactgctttgtttcagaactggcagtattaggataaataataggagaaaattttggctaaattgtgggtttttttgtcatttttcaaggacggtaagcaagagtttcatttgttttgtgtgtgtgttttaagtataaaatgtactttgctgttaggtctgtctcatcaaagtaaattataaaaatatgtttgactcatctccaaatatgcattatttggagaaaacagtcaggaaggcgggtcagagatagtcagtgtagttgccccaagcttttcatattgtaaagacaaatgtagcatttataaggaggtttttgtgagtctgatgaacagtgtgtacttgagggcaaggaattatagcaagctatgaaggctgcatctttcctgagccaactgagggcgagaggaccagcgggcagatctgggatttctgttgaaacacccacaccctatttctgttcctaaggcctggggaccaggccccttgtgtctctaggtctggtcttaaacatggctaccttctttctttgctgcatcttccttcctgtggtgtttcatgcatgctgtgaaggttaaagacatacacctttggagtgtttgcacagaggtggaaccagggcaggctgagaggaatgcagtgcttcaggaagtggagacaatggtgagagaaagacccaccaggaaataaatgatacccaaaagtcatgagcccctgttgtcctccccaggtcatttctcaaatgtcactcagtcgctttcagcaaaggcagtataactttggggtcagagggacatggatttgtttgtttttttttttcttttctgtacctacctcatttctctccttccttacaacacttatttattaagtgcttatcgtatgacagctctttgctggcgtagggaatcaaaagtagaatcagatagactagatggtcctgtcatcttggaggtgggggatataagctaataatgaagcaaatagatgaataagacaagtgttcatgctaggaaaacgaaatagaatgttattgatagagagtgcctgggaaagaaggttctttattggatgggtctttagaaatgacctcatagaggaagtgatttttgaggcaccaaatgtctgggttaaaagtgcagatcttgctgctgccattcgctagctgtgtgactttggacaagctcaccaacctctctgagttccctcctctgtaagatggaatgataactactttgcaaggctgctgtgaagatgaaaggtaatgcatgaaaagagttactgtatgaacagtggagaaagacatgcaggcattaatcttcactgtaaataagtgtttataattagtcttaaatgtttttctaatgtccagggagtcagagatttatggttgtctttacaaatctacccccggactaaacgtggagatgggtcttggtatttttattatccttcctttcttccaggatcatcttacttgaatggtctccttgctcatttcacttttgttgcattgagatcattctggtctggccatacttcctttatgtttagtttaggaacagtttttggctgcatctttggtgcaaaggagagggccaagtcacctaggattaaaaagtaaagcctgagatcgatttcagcaaatacacatgcacaccacaaagaaatgacccatgtagaactcctgactcccagggctgttttcagcccctgggtcacacgcttcctgtctacactgatgtgaaaatgtcagtgttcctgcagaaagtaaaagaagaagcctctcctcccacacaccacttctagcttccatcagagttgacatccataggcaatggtgtgttttaattcactcctttacgaaagaaatcttcaaagcattcaaatgtcagtaactgtgttctttgattcaagtgtccacgggaaaagggtcttgggtgtgtgggagcaaatattttaaatccaaacgtggtaagttgaaattttagggaaggcactggtagaattgtgtctttctataagaaaattgtgggctattgagcaatttcaggaaggcttctgtggcctgcccccttggcacccccgcccctgagtgggagaacttgctgacacattgacacacattcccctactttccctcgaggtagagagccgatgggaagggtggtcgtccccactgatgggaccgtgtgtagcttttgtaggataggttttctttctgggaagcttaacttgcttccatgggaagaagatttgaggcagagaaaagttattgagtcccgtggttgaggttgtacatcagatcaggataaaatagataggaatgctgtacttacttcggtaccttttctgtgatatgttcctgaatattaactggtcctaaaaaagcatgcttttcaaaacatacattttatttttataactggagattggaaacttgatgaagggaaaagcacacagaaaacataaggatgattttcctgtttaacttggaacctagcgcaatccctataaagtcttacctgggcacctcagtgagatgtggccaccttgttcttcttgcctgaacctaaacagttggaggtggtattcacaggcactccaatattgtaacaatcccttctctgtcaagaggactgagtatacttctgtttaatttttttttgcatttgaaatctttaagcaaaaaatgaaaaggtattatttcagggtcagtttgctctgtgtaaactgcaagtaacttgagaaataactcaaactcaaataactcataagtctcaaataactgcataacttgagaaaattggcatctcagccaatagaaccctttgcaacaaatttataatacttggggcagagaatgactgtgaataagcataatgactgtgaataaacattaaaatagtattggccagttaggatcatttccttttaagggaaaaggatgacaccaactatgcattcttgaaaagtctgttcatttttcaaggtagagtttacaatagcttatgtaaaagagcctctaaaaatataaacagctggcacgattcctggtgacattccaaataaaagtttgcccatttgcttcaaagaagcatggttagagagtaacctctgagagaaactggcccctggcttgtggtgtatgggacaatcagtggtagactttttggaaccacgtcttgcatcaccttggcatggtcatttatccactggtgtttaggtagataaacactaatcacatcttatctagatgaaggctagaggtataaatgctaaatgacggggtcgtgaaatgcaactctgtcgatattgatagcatgtggatgctttatatcactgttgattcagaagtgaatgagagagaatttgatgccgttcgattgatcatagtatcgcagttgctaaaatgcatgctttaatggcaaggggctgaatggcaagagcaatgaattgggatttgtttctggagtcagtgatacacatgtcactctgctggccgaggtatccctctttctcactcttggtttcgtacacctgtcatctttctaatcagatttcactggcagccagctcccttgtcctcatgtgtttcccctaatgggcacctttattttgcctgcccatagtcacttttccaaattcttgtaacagccccttcccacgtgcttagcctgcatgcttgagtttcatggctttggggtggagaaatcgatacaggctcgccactcttctgtatcacagggatcagtttcagggagttacatgtagactaacagaatgaatcccaggatttgcttgggtgctcacagagagtctccttttgtttccattgatcttgaacttgggatggtggttgtgttttagaatgaagccctaacttggaggcagagaaaactaagtccttcttttgggttaatgttggttgctataacaaagtggcagatgataatcatgtaagtagtagttcctggtaggcagacagctttcctccatgtgacaaatcaagaacccaggctccttccatcttctggttctgtcattgcctagaaccctggcatcttttgtgtctggtggtggaaaggaagaggagaaggtgtaacttaagtcccaaagtgacaggcatcacttctgctcagattctctggcaaggtccagtttcatatctaggtctggatgctggggtgggaactgggaaagagagaccccagctgagcagcaaaacctcttaacttagaaaggagaacccacttttggtagatagctagccatcatcaccatggtcctagtaggagggttttggcttctgaatcgagttgtgcctatctttgcttaggtttatccttggtcttttctgttattttattttatatcttctttttctgattaaacgtggttaatttaaattttctgtcactccaatgggggccacccgagctgatccattgtctgagccccacctctctgtattgcttcctatttccagttcactgattaaaatcaccaccccatttccgaacaacaacagtacatccaccactaccaccatcaccttagtgcaatcattttcaaaatatggcctccagaccaacagtttcagtgtcccttagtaacttgattgaaatgcatatttgcagcccctacccatgaccttctgaatcagaaactgtggctggggagtcccagcagtctgtgtctttcagtaagtcccccaggacatgctgatatgcacacacttccctaatgcttttaccataagtcctgtgtctccatataggaaaaataccctggattggaatatattttgtaaaaaaaaaaaaaaaaaaagggtgttgcttgttatggtcaggctagagagggtcactgataataatcacatactgattttaaaaaaagaaaaaaggatcattccctctagaatgttagtgatcagatgtacatcagtgaaacctggtagggtgctgggttgtccagatgtgagctctgagtgacttggagttaacctggctgtgcttccgtaagaagccctctcccaggtctccgagggctgtagtttatcggagatttgcaaagtgtgaaacttgaagcacactgcagtcacttgactgaatgatttggttgagaaacagtgatggtggttttgagtgtgcccacatgaccaaattgttttccacagaacttctgctgaataaaatttgaaatacgactgtcagcctgttttcctgtcttaatgaattccagacagtttgtagaatgtgggagcttccaaaacagaggggcggggtgactgcgaccagccagcctctgtttagtcgcatgttagggtgtcccgacataacagattgtccccctcattctgaatctcaccaggccatccttctctctagaggagagggcatggcaaggccagtgttatgtcaaacaagcagggcctatagggtagatctggacttcttacttaccaagaaattcaacctcttcttatttttaatccacctaaacccaagcattttgattctttttttttttttttttgctgcatgctgaccttctccagacaaaaagccctgatgcttttttggcaaagaatcttttcttattgtaaactggttaagagctgtaaaccgtcgaagaagtctagagttctgggttcaaccttcagagtaagaaggatttttaacttaaatttcagtttgatcagctactagtttttttttcctctttgaacaagttattcctgtagcctctgtttcaacagaggactaagtggggtgagtggataatagtatgatctaagttgtaagataattgagtgaattacaaagaaatacttgacttaattccccagcccaaagcctgtgctcagtaaccaggctctcactgtgattccatctttgcccacagcaccagcagggtgcaatgcaatgaatttttgacttgaaatgaatttttactttgagacactgcactaagataaaatgactcaaaggcaatgagcaggaaaacaagagggttcacagaacagaaggggagtggggccagattatcttggttagatgatccagaaccatcattccgactcaggccaactctagccatattcttctgtagggttcttctgcctttttttgctcagtggagtcttatgttggcttgaccttgggcttctgaatctactaaccctgtgattctcaaaagtgaaaaattaaaaatgttagtctctcagtcatgtccaactctttgcgaccccatgaactttagcccaccaggctcctctgtccatgggattctctaggcaagaatactggagttgtagccatttcctgctccaggggatcttcctgactcggggatcgaaccctggtctcctgcattgcaggcagattctttcctgtctgagccaccagggattagcatgaggaactttgggagtagatgctggttgaacagtggtgaactccgggatgcctcacagggaggtatttaaagacagcacgtgctatttacgggtaagggattacttttgttgccacaatctttgcctttatcaacatgtttcctttcatcgtaatgataggccagcgaggtggaggaataaataatgaggtgcgctaacttaggtttcacaatgctgtgtagggcagcagccgaactccacggttgtgtccacacgggtgtctgtcattcccaactgtcacgtttcaacttggcctgtagtgagttcctgctttagcttttcacatttcacaagacagcctcgttatacagttacctttatccagtaaaagctgtaatacctcatgttctcaaatttcaatatctttgtatctttcaatcttgtagaattttttctgtcctagtagcaccgcgtagctattttagagactaaatatccacaccaccatgatagcttgcttttcttttctttttctccagctttattgcagtgtgattgacaaataagaattttatatatttcagttgtataacatgatgctttggtctgtttatacattgtggaacaatcaaccatggtcaaatgacacgctttgcttgagcctcacagagtttctcccccagacttgtggctaaaccaaccactgggaagcagaaagggagattagtttgaagaacctccatctttctcaggaggaaaattcccattatcttgtccacataagtggatgccttcatcagttatagcttagacttgttacctgggtaacgagggtcccggcttcattggctggctgggaaggtttggtgaggcagtgaatgcttacctgtagtaatggcgcagtggatgctggctgtacctgctgctgtacctgcattactcttgctctctgcctcctgctccacccaagtgctgctactggtgtcattgccattagaatttaggagtttacacaggaaacaaagaagtggttcatttgtacaggtgctgctgacactatcattgttttgttaccattaagcacatacagtcagttttcatgtgtttgggattcttccagtgagttttcaaacctagacttgcatttggttgtcacccaacagtcttttggaccccttaccccagctgttgcgtgtgtgcagaggaatgggaattagtttgattcccaatcagtgggagacatatcctaccagaaaccagacatatattcatacaaacacatatggaattctcaaggcagcattttttagggtatttgcagcctttttgtggtattgtctggactgtttgaaatttggttctctgctcaacagtccctttcctgaattttataaacagggaaaatgacagtttctctctttccatgtaattgaaatccaccccccctgcaccacatccatactcacacccccacagaagtgaaagaggtggtgagttggatacttgagggtgagatccagtgtgtttggggaattcctgagcatagcacaggatgaagcctgagaaggatggccagaaactgcccagcctgatggatttctgagctcctcattctagtgagcgaacaggatgaattggctgtttaggctggagtggaaaatgaagacacacataactaaagggaagaggaaatgggcaaggcagtttggggagttttcagagtacatttatgtcttgggtgtctcaacagatggacgtgaagagctctaactcttcctctattttcttagagtcatggtttgggaatgatttggaagatccttgggcaaattttcctttcccatgaggtaaaatgatattcagtaaatatttattgagtctactgtggagtctagagatgatggtgaacaaagagggtccaccttaaactgttgttgcttttggcacatgcgtggctgcccagggctaacacagaagccacagcagatcatcctgggccagaggaccccttcctgtggggggagaaaggcgtgtacttgggctcagttaccctgtgaaagaaatacgcttaagtgacatatttattaaaggagagtagtgtgtcatttggggcttctcaggtggctcagtggtaaagaatctgcctgccactgcaggagaggcaacagatgcaggtttgatccctaggtcgggaagagcccctggagaaggagatggcagcccactgcagtattcttgcctggaaaaatcccgtggacagagaagcctggcgggctacagtccatggggttgcaaggagttggatgtaactgagcaactgagaacacacacacacaatatgttatttaatccaatatatccaattattaccaagtcaaaatgtagtcaatataaatattattattttttgattgaggtgtaattgacttataacattatattagtttcaggcacacaatgtaatgattcaataattgtgtatattggaaaatgaccaacacaagaaatctagttaatatccatcactatacatagttagaaaatttttttttctaaaaatttttttattggaaaatgaccagcacaagaaatctagttaatatccatcactatacatagttacaaaatttttttttttctaaaaatttttttcttgtgattagaattttttaaagatttattctcttagcaacttataaatatacaatacagtattttttggttttttttttctaatttttatttaaaatttaattaaaattgaagtatagttgatttacaatattaaattagtttcaagtatacagcattatgatttattatttttgcaggttatactccattaaaagttattataagataatggctatagttccctgtggtatgcagtatagccttgttgcttattataatacagtattattaactatagtcaccatgttgtacattccattacatgacttacttatcttacaactggaattattttctctttgactaccttcactctttttgcccacccgcacaacccctgtgtctggcaatcaacattctgttttctgtatctgaagccactccccctttttttaaggttctgtatgtaagtgagatcatagataatgtaagagatcatgtatagtgtaagtgagaaacatattttaaactgatttcactgacgacagcctttagctgtcaccttgtttgaagcccttatttaaaaaaggacgtgtattttaagaaatcaagcatcttctacctataaatgtgttgataggaaatatttattttatttctgtcagtcacctgaaagaggccccaggaaacatgtaacttataaattccctgggcacctacaggatagtgaatgtccaataacaatttcttgaataaagaacgaccagtataaatgggcttccctggtggctcagatagtaaagaatctatgtgcaatataggagatccaggtttgatccctgggtcggcaagatcccctggagaagggagtggcagtccactccagagcatagccaaaaagaaaaaaaaaaaaagattgattcattaacagaggagcctgacacgctatagtctgtggggttgcaagggtccaacatgacttagtgactaaaccatagcattgaactaagggctaacagagtcatgtctgaaacgagattatctaatacctgtgctttctccataagatacctcacagtcttctcattctcagcaccactagaggacagctcggcactagcaggggcttccctggtggttcagacggtaaagaatctgcctgcagtgtgggagaccggggttcaatccctaggttgggaagatcccatggaataggaaatggaaaccccctccagtattcctgcctggaaaaatcccaggacagaggaacctggtgggcaacagtccatagggtcacaagagttagacacaactgagggactaaaccaccacgagacttgggggttgttggtaaagttaccaacagaaaacaaaagaatgcaaatagcatagtgctaaatgaaccccacccccaccccaagacacttgtgaaaactgaaacgaggaggccgagtgttgccttgtttgacctcagttggaaatgcatgtgtgcgtgactcagatttctcacttctctgtccacaaatgactgtaaaaatactgcaaatattaattttggggttacaagtaagttttagtgagtcggtaaatttgcaaatagggaatccgtgaatgatgaggagtggttgtattaaaaaacttctctagtggttctttctctgatctaaaaagcatctcactggggaacatatttttaaacaatgtctgctctgaaattgttgtggactaaacttgaagccacaataatgaaacttttccaagcatctgatcttctctttttatgagtttatttatcaataaaaatggtttatcacttccagatctttaaagttgggtggggctgttcagatatatattttgatatcattttttttgatataatttctgttgttctttagaagatgaagagtgagaatatggaccagggaaaagagtacagaacaatggtggcgaccactgctacagaatccagcagaagacaataagatggcttagaaattctgcaggcagtttttgaagttaccaagctcagtttagtcatggcctagaagataaaggtgatgcttttgacttcccagggtattgaaaattagcatattttaattataagcacagtcactattataaacattaattgagtgcttgttgagaatgcttggaattcttttaagaagggggaaagaaaagaattgttttcagtaggtccagtagtttcgagtggcacagcagatagatcatacagtttaataacaaagaaacacaaacaaaaacaataatagcagtagcacctagcattttcaaagtccttactacagactgtgtcttgtgtcagtgctgtaatctcatctgcattttggagactgaaacccactggggttaaagtaatgaaaattatagacaatagagttaaagtattgaacgttgccatctttttctgcgttccatctgtaccttttgcacttttataatgtatccttgtgtattataaaaagaatggcttccttattaatagtttgtgtgtgtgtgtgtgtgtgtgtgtgtgtctccctttgtctctctgtcttagtcctgggataaggaagttacctctgtaattttttttgtatttttcatgtattagaaaagtaagaagccaaactagctcagatctagctcagatctagtttacgtacaagtttattgagacatctactagctccatttccaatgctttgtataatttaattctgtgaggtaagtgtatgtgtgtttagttgctcagtcgtgtctcactctttgtgaccctatagactgtagcccactaggctcctctgtccatggaattctccaggcaagaatattggagtgagttgccattcccttctccagaggatcttcccaacccagggatcaaacccaggtctcctgcattgcaggcagattctttaccgtctgaaccaccaagggaagccccataagataggtaggataccattttatagataaacttaggcttggccattgtaagtcacttgcctgaagtcgttcaaataagggcagaaccaagacttaaactggaggactgtttgacttcaaagcttccccccttatctgccctgctacagtagttgctgttcagtggctatgtcctgcctgactctttgcaaccctacagactgcagcacaccaggtttccctatccttcactatctcccagagtttgctcaaactcatgtctgttgaactggtgatgccatccaagtgtctgttgtccccttctcctcctgccatcagtctttcccaacatcagtgtcttttccaataggtcagctctgctcaccctgctgcagtggttactgtgtatattgaggcatggaagggaaggctggataggaagagatcaggggcaacaactcatgttgactttggaagagaaacaggactaggtgtctgatgaagtaaagagagactctgggtgtggttgaacatcttaatccaagataaatagatctgtttattaaaggtgctcaccgaatgcttggctgccttgtcctttgttttcaaagctgtttctgatgattgaaaagaggtaggctgtgaaggcttcaagaaaggtagcaaaagatgggatggtgtgaacgtagtcattcacagggctgtggtgtgtaagttgtaaatttttatcattcccactaaagatcttctttgaatgaccttagctggtgacaggaaaaagtcttgtcttcatgcctatccttgtggtctcccactgaacacatatagttcctaacatcttggtattttctatttgtctctctctctcttttccccctctaacttgacttgttaattgctttttgtgtatgtctttatgaagttgtagccagtctattatgttctggagtgtttatctttgaatgccaaaggtcttgaaacatcgtaagattgtgtaatgaacataacttctgccttgacatgtgggtgttaagaacattagtcattgcaaagtattgagttaaatattttcaataaaaggatataacgatctaatagagaggaagaagttataaaaattctaattgatggctttaacgatgaaccatatacacagtgggttccagcagcaatgggttagagattctcagaatgaatgtaaaggcatttttactttttattagtgggagaggagaaaggccaacaataaaaggaaaaagcacttaattctcatgtatactaagaaaaatgaaaaccatttgagttttcagcgcttctgctcctgatttagtacctcacatgtatctttaactgccataaaaagtgttggagatttccatgagatgttatcaataaggacttctgggctgcgtcttgtcaggaagcccttattcttgcaatgatctgttttctggagagtgtcaggtcatccattgcaacaccatcagagagccagggttttcctgagcaaatgagctaggtaggtctttccttgttgagttaattttatgaagagttttggtcaacattagtcattatgaaactatgtgcctgctaccctggtttatctctgtagacatctctccatggcagaagatggaatccttgtctcttcatgtctctgagcatcagaagatgttagagttatatttgtctgtttcttgctagagagtgttgagtgggtactggtcttctctgaactaaacagggaacattgtttagttgagtgtttggttatcagcactctcttatttgggatctagtggtttaaattggagacactgtgtgctacctgtcctttgccttgccagaaatattcagtcattctggtaaaaaacttctaagctaaataccttttctttcctagagaagttacatccaagaccttgttttaatttcaaaatagagagcgtaaattatgtctgtggctgctgttaaaagtttctcaacagactggctgtcctcaaagggtgtccgagtcaactatagcacttaggggaaaaatgttcatctccaatgtgatatcatttacaagtcgataattgtcttcaagatcaatatatgatattttgggtgttggagagtgtgtggaagggaaatctcacatctgtggtaatatttctggaaggattattgatctctggtcctcctatatgtgatactcaatttatttgctgtcattattcattgaatgtgtagataaggaggttgttttgaatgggagccaagcaacctgttgatgtaaagtctttttttaccttttatgattcccattgttagcacctctctccttgctggctggattccctgtcattttaagtaggcagcaattactggtttgttcaagaagttggctcctgctgccaacgatcctattaattatcacttcatctctcatttagtcttcttagtgttgagagagggtgcatgtaagcgtgtggccaagcagctacagtcacatctccgtaatcgtctcctttttgcgacagttcagcagactcaatgttcagccaaagggctgaggcggccctggtgagtcttttcaactcttctgtaggttgttcggtcagttaaaacctcttggttggcatttgtgtggggagttcagacctgttccggatccatctgtgaactcagatgggacactgtgaaaatactgggatgattttctcagaagctgttttctctctctggggaaaaggcgaccatggaattgactctttgtcagtcttcaaagaaggtaatgtaaataataaccaaagtgacttagtttttacaagttcatgtcgttcatgaatgtttttttgaaaagtgacactctttgcgtaatgttgaatctttggttcttgtcactcatgaatagttaaattactttctgtttgtttccagaaatgtttactttacttgtttcagtgacttttttttttcagatattccactggatcctttgattagatttggagtgcttatgcttccttttccactttttctgttatttttggcagtgatggtgtttgaagctgttgaagtgattcactgcaaagtgaattaattttccacatcttcagatgtgttttccagttgcccccaagtttctttccccccaccctctcatatgattccccatccgcagttctgtcattcttgctggatccattataaatgctgatgtcactgaatttcttaaattacagctggtggggattaacagaaattgtaagcgaataccacttcctcattttgctattttcttaactaattattgtcctttcaagttctgtaggaagctggggatttggaagtaagttctctgtcttgatgttaaaatagcacttttctgttattgttatttttcaaagatagtttgatttttaggatgctccctacctaatgtactctttcttaatctcagatagactttccccacttaggattttgcacatcgagttgtcttctatcctgggtaaagggttttgaatacttcccttaagtttccttatatagaatatttttactcaacagtccttcaccatctacagactgttaatggtactaggtgaagggttgtgattcattgattttttttttttttcctccagagtcttttgtcctttaaggaattcctgcctctgtccccattgttttcttatttagaatctgaatgttcttggtgagcattcttggttgctctgtaccttcaaagatgaatttttctggctttgcagtacctgttctagcatttggagcctggagtccagaatgtcttgtcactctgtggcttgattgagggctccctgaaccttgtctaggagtctttgggacgggactttggaggccacctggatgtgtttgtaaatggtgctggagctctccaggcggcaatattgatcgaattgcagtccatggaaacagaaatagaaagggttcagcatttgcactttcctctggtggtgtttttgcttattttgtgtatttagaaaaggcagccgtatgcaaactgctgacttactattttccctggaatggaaaccatttggattatttcaatgagttttagctaagatttgtttgttcatagtagtagttttgatttctgatgtcctttttataataagacccaaatgtgtctttttactctatggaaataacgtgttccttggagccttgggattttgcaaaccatgaatttgaaaaatcatgtgtttccttcatagtcaaaatggaaactctttagtgaaaattatacgtagataatacttctttttgggtcagttactttttttgaagaaaaaagaaaatttttggctgaattatttaagatttcagagcagtcctttttcctgcttaactttcccactaattatttttttttctcatttttaaagagaaaaagattaaactgagaaattgcagacccaaagcacatttactccactatctgatgtaagatggtgactggtttttttgttgtctttgatgatacagtggatttagtttaacttttagtggtaagatttggactaggtttaaaaatagaacttccttactgtaagaactattatgcactggtttgagttcctgagtattaagataattgtttaacctctggaaaacatgaattatagggtctctgtaagcttaactaacacttccttctaacattgtgataagttctttgatgataagattcgggaatgatatagctatctgaaaaatatttcaaatatcactgtggggttgttggttaaatatgagcttttaaaagtttggataaatagaataaagagaaagaaagaatagttataatatgggtgaaatatttggaattaggtttttgttttttttttcggtgcacagcatgtgggaccttaattcctcaaccagggattgaacctgcacctcctgtgttgaaagtgtggagtcttaaacactggactgccaggaaagtacctggagttaggtattttttttaaaaaagagtttttaaattatcagggcaatgtcactacatataatgggagttttctagtggggaggtagaagttgaaaacattatgaagtggtaggaggagtcacagattaggcgtcaaggaaactgaatttcactaggttgatgactgtgaatatttttgttcatcattttatctcagcagatggcaccattcagaacctaacagtcgctcaataaatgttgactgaatgcctgtattaggaggcctggttccaggcccagctgtgccattcattaatcacgtgaccctcagctaaccattcatgaggagccatggcagatattctgcctactggtgcaggagacacaagagacgtgggtttgatccctgagtcaagaagatcccctggagtaggaaatggcattccactccagtattcttgcctgggaaatcccatggacagaggagcctggtgggctgcagtccatggagtgtgcaaagaatcagacacaacagagtgaccacacacacacacacacacacacacacacacacatagagtctcctcttatgtttaatcaaggggaagttctggacaatggtggctgtgtggtgctctgttgattccttcccccaactgcacctcagtagatgttacttatagtcacctctctttgttccatgaacctagaaggagccttgggcccttctgagttcattgctctaggtttccatgtctcactgtggacactagaggcaaaacttatttgctctctcagaagtatcttctgtctgaggtcccttactgtggctccttgatttggagttccttggtttgtttttgatacctcaatcccaagtacaagtaggcaacattctgtgaagtttcttggtcagcaggtgttcacttaaacaatgaaaacaacagtagcacacaccattgtccttcctttcaataactgttctggtagatttagcagataaatatagaacttaatgaatgagtctggacaatattcttccagtggaataagagatcaagaaatgattagcttaacagagttttccacgtttgttttctacaacccatttatcctttgaggaagggtttgttcagtaccgactgccttccaggcactgtgctagggttacaatggccagtccataagacatgggttctgccttcttgtaactcaccaaggtgaatgtgatgttaggtgtgtaattacagctttagggacaaaagatggaggggtcagttcctctgaggggagaagggaagagtgaaatctcatagaagaaaggaagtttaagtttgttatcgaaagatgatggccgagcaaatgagaggagagccttctagacaggacacttggaaatacagcccagcattttgccttttggacgtcgtaaacttttgagtgtggctggagcactagggagcatgggtggatttaagcagacggagagcactgtggctgccagatgaagagtaggctggagggtggccaaggtctggtgtcacggaggccagttaggatggttccagcttaatagcctttgtgagaaatggtgatgctcacacaccatttaactctgaagggaggtcatgactgtgagaggatacataccttggtcacagattttaagggcaatgaggacagaagtaagatttgtgtgtacactgtttactggtggcaacagtgactgctcattcattcatttatccatcacatcactgggtgcctgttttgtaccatatacccgggaagcaccatagcggataaagtagacatggtgtctgccctcaaaaagtcgatattctcatggaagacacagtctagtattcagatggttatagattattatgtatttataagttaagtgagaaaaattctgtgtcagttctttccatagacaccctctccttttcttgcagccaactcatattctgatcaacatgttttctgttccctatcggagaaggcaatggcagcccactctagtactcttgcctggaaaatcccatgggcggaggagcctggtagactgcagtccatggggtttcgaagagtcggacacgactgagcgacttcactttcacttttcacttttatgcactggagaaggaaatggcaacccactccagtgttcttgcctggagaatcccagggacgggggagcctggtaggctgacgtctatggggtcgcacagagtcggatacgactgaagcgacttagcagcagcagcataggaacttttgagggtaaagttagataaacattgtattatatataccttgtatctcacatgcttacacacacacacacacacacactcacacactccctctctctttctctgattaaagacatctgtcttcattccagaggcagacaaacacttcaaataaggcatatgagagttcccatagtcagtctgctacaggtaaagttctggatacgttctgatattttctgaactctaatgttttacatacagtaatcctgtttgtttagttccagatccaagcagaaaagtctttgctcttgtgatctctccacacataactggatcttgaagctggctctggtggctgcttcatgtctgtgttccaggttatagcctgtgttttggattcatgtacaggaggaagaatttgcctctaggcagcaagactagttgacatcagataagtggcttctttaaaagagatgttttggtacagaaatgacagtaacaacaaattcttctccaattagaactcttctctacattctccatctaactcaggataatgtttaagattataaggagtcaaaattcagctggatgggtctgataagaattccgaggaggccattctgggtttaagcactcactgttctttgaagatgaagcattctgacatgacagtggtaattgcaactggttttaagtggcaaagggattttctccattttgcatgagttggagaggtcgtgttttattagggctaagactgaatacagacgctgcgagcttcaaatcccagccacactgatgagcagctgtgtgagtttaggcaaaatgctaagattcttggtttcttcacctgtaaaatgtggcagctgttaagcaggtaagacctttcattaaacctgtctgtatttggactctatgtctactagtctgtgacactgagcaacttgtttaccctgtatcttgctttcattaatagtcataatagtaatagttactaactcttgaggaaggagtaagaattaaatgagataaggatttggcatagtacccaacacatagtactcagtataacttacttgttatttttcctgcatcgttatctcaagtgttctgaaatgttctgtaatgctatttgatgactaactgtattctttctgaaaattaagccatcaccaaacacattcattgctctgtgatttcttctttctttctctctctctttttttttaaattaaaaaaaaaatacagtttctgagtttggagtaggattgccagataaaataatggatgtccaggtaaatttgaattttgcacaaagaataatttttagtataaactttctgccaatatttcatgggatgcttatactaaaaaattattatttgatcacgaaatttacatttaactggacactctatatttttatctgtgagatcttgcaacccgagttttggggtaataccccttttatgctgtcatcctttttttaaattttaactcactgaaaagtatatgaatgcttatgcaaacatagtgagtttactcacttggaacatgagtttagaactagttacgcaaatttgatgggacatttcctgtctgtagtaaactctctcctcctaattctttaacagtagtgggaccatcacattgagattatggtgactcctgagtagtatgtagtgaggagttgcttgaaaattctgaagtgctgttgtgtcatttctccccagagggaactgggtcttaatcatgacacgctaatggggaggtgtgaattccagagaatcctgaagacctcatcattgaaggaaattacctcattagtcttagagttgccgacctagggatgatcgtacccaatggctggctggcttttacaaaataggaaaataaacacatggggtggttgggttaataacttagagtgatttcattatacttaaaactgaagttaatttttaagtaggtttggttcttaagctattagactagttggagatgttgagaaaattaaatccaagactaagatactttccgttcaaccagcatttatttatagtatctcttggttgtcaagcaactgcataggggtagagaggaattgaaaaagttcccccagatccttagtgttgagtggagcagtaaccattatgacacaagacagaataaataaagccagggtctgggctagtaacgccagatctcagatggttgaatgtaagcagtgattaaatctgaaaagcaaatggagtaggaatggatcctactgtattaagaagggcttcttggagggtcatactggagagaacttttcaaagatgagaatgatttcatttgggaaatgaagtgttctaggtgtagtcttagcatgcagcatgaaggcagccgcattttgaaaagaatgtgttatttagacctgacaaaaatatacctagcacctcttctcttttgtgagactgtttatggtctagaagttccagatcaggaacttgacttcatgtaggaggagctggacacagtccatgagggtttcctaaatatttttttgtgcacctgctgttgctgtgagtgaggtgacctgagagacccgggcagcgcttagcgactcttgtgagtcacttcaaacgcactgcaagtcactccagttaaatgtgggtttttcctgacaggaacatttccagcgatatctctggtttcaattgggcaaaaccaacagcagaagaattcaatgagaagctttttgtgaggccctctgacttgggggaatatttgcttatgtgactttggaggccagcttaactcatctcctgttgggatgacatttgtttactagacttggccatagtcagagttaatagccttaatggttttgaatggtcccaaatggttctccagcagtgcaccattagcaagtggggaggtttatacagatggcatgttataaacacacacctgcttcagcctttgtgggtttaagagaagagctatccccatcttagatttaactatggaaatatggggaactggaaagtaagagttaccatttcagtaaatgctaggatctttttcaacagttcttttctcacaattttgctttttttttttttctttctctgaaatgattctgtatgaaattaatgctattaaaaaatggccctccctcatttggtgattatagagatcacccctgattctccaggaaattaattaaagcataacaggggattcacattggtaaacagatcttaaaaaggcatatcatgaagagcattggattgggtagcttgtccagtgcacaggagggcccactgagactgggaatggaaaactttagttttcagttatctatttgttgggctctctagaaattagcaaggtgtttagtgatccctgggatttcatgtttgcgaattagggttagcctgtgtctttcaagttcagacaggtagttcttggtggatgtttttgctatttcaggttctagtgggtaaaatacagcctggatgcaaacctttgttggattcttaaacatgaaagaccataaactgcttatgttcgcttgagtctgtctgaatgttgtcattgttgctcctttcttgatgagtgggccaaatactatgcagttttaatatctcaccttgattcctattgccttgtttttggctgttcttagtatcttcctttatatatctgtcattaagttataattgaagcttgatgttttatatttagaatgatgcatggaggttcagctgtgccagccatttaggcttcatggcaaatgttggttcatgccagaaagtttttgaaatctggtctcttttttgggatatccaatctgagcaaaccatccccttctacttaagctgaggggcacagggaagcaattcaaaggtgatttcagcatctctccatgtaagaacgtcttgttgctgataaaaattctggcttgttagttgcctttctaaccaggagtcatgcagcctcacagggacttgctctgacaagtctttgtgtcacttcgttcgtttaccgtccttcacccacagtatcagcggatgccagttctggagtgggcacatagtgatggtagatgacacccaggccacaggctgttgcccaggggctgccagaccctgtgaggcatttcacagctcttgaattctctgaatttgagcttcttttgaactccatccatcaatccatataaccagttattcaacatatgtttatgaggtttttactgtgtgccaggcactcatctaggtttgaagaacagagcagtgagccaaattgttgaaaatccttgtattcaaggagcttacatgtcagggaggggagagctgtagaaacaaatacataagtaaaagacaaatgttaaatggcaatgcatgctatagagaagatacagcatgggtgggtttggggtgacttgtaatttagcattgtgtgggcaaggaaaggcctcactgagaaatggcattggaggaaagatctgaaggagatgagagagtggatcatgccagtatctgggggggaaagctcagccgacagagggaaggattaggacataggccctgggtaagagggtgcctgattccaggacagcatgactgtcatcttggctgagactggctgagcaaaggggtaagtggtagaaatggcactagaagaaatgagatccaaatggaggaagaccctgtagacatttgtacacactttgccacttaactcatgaaaaatggagggcctttgccaattccagctagaggagtaacatgatatgatttcattgaagtggcagcccagtgtgctagggaaaacaatgatctaagaactcagagatcatttaagtcatggttttgtcaccaggtaggggcattttcgttcagcattctgagcttcaaatttttttttctctccttatgaaaacaaggctggtggagtagataattgcaaatgaccttcctgggtggtttgatacagcttctctacgttcatcaattttctccccctccccatcatcttaatgtgtttgagtatttcctgtttgtggctgattacatttctgtatatgcagagcaggacctcagacatatgaagtctgatgctaccttttattcaattgtttgtaatttttctataaacatctcacactgaaaaccttgcaaactatgaagcagttttatttattgatgttaaagatggcttgcagacttcttagcctgaattaacacgggttataacactttatcatatagccttaatactagtttttggttacacagcatagagctgatttattaatacctcactgttacagtgacctatcgattgaagtagagtgattaaccggagacagtttctgtgctcactgagttgaggaggaggagacaggtctggttaagaaagtaccgtgcaaggcggtgtacatgaaagagggcaggaagtcatggtcagcctggggcccgtgggagtcctctgcagacttaccaggtgaactttcagactagtattctttcagtttgtttgcaccatccagttagactttgtgctatgcaaggtgggaggtgccagaggccggcagcctctcttctacagccccaagcaacttgtctctgccccaaacttgcatcacactgtttaagagtttcaaggtcttacagttaaccccctttaggaggcaatataggaaccatcttttatgactggagaatgtccttggggcatctcaacctcctcctttctaccagaatatctcttccacttcttttgatgttttagcaacttacatagacaggtggccctgcgaggtgcatggctggtcagttgctctgtctcccttatggggaaatattgccccagccttggcttatctcaggcctcccatttgaactctttgtcaagagtcagttggagccccaggcatttttacccactgatacaatgtattcctggtgttctattaattggctttgtcttggacagtctagggatattgtaagtttccaggttgaggattctggatgcaacttcccaggaggtagcagggccgctgcttggccagagcagtccttccattgagtctccttgtgcgtttttgggagtgggttgctggaggcgcttctgccgccaggagttagcatagttaccagtgccaggactctgagaagaatgaggccatctctttagcaactaagctgtccctatggtggtgcttaggaggccgctgactgtgccagtgaatgctgttggagcaactgaggcccagaaaggtgaaacaactttgccaggttagtggctgagctggaactagagccaggaggtcttgactcccacggcactgcttccttttcatcttttctacctggtgtctttgcacgtattctttctgccatcttgaacactttctgagcactcctttgcctactgtctgctccactgttcagtctcaattcaaaggttgcttcctgagccacttccttgccccctcatctgaattagcttgctgtgttattcttttatggcttcctgatcttttccttcatagtagttacttacatactcaattacttacataatgatactatattcatccatgtcttcaatgtcttgtcttcccaatccatgaagtcagtgagtgtggctcttttgttcatcactgtgtgcccagagattagcccatgaatagacattgtataaatatttgttgattaaatgagtccataaatgaaagaatgattaaaaggcagactgcattttctcttgtctattcatattaaatgtctgtgcctatcctggctaagggtaacaactgttattgactttgtatattgttgaggatgctgaggatgtgatttttgtctccagatgagtctgtggccttgtggaattttattaaagttgtctctgcaaaaaccaaaaacccagtgacacacacaaatcagctttctttaatttgtgtgggcctgacatgttaggccatgatttatcagtttattttgctgtagttgcattttttattacttaattctgtttccagaaatgaggtttaattttttttttagatactgctcctttctttattaaaaatgaataatgaaacaattgctttttcttaataagattcataatgtatttttggagagatttgtttgggtttaaatgatggaacttttaagtggataggaatggaacaccaagaggtactttctgtagaagaaggagtaaagtttcaaactgtacaaaaaaaaaaggcaacaacagtagactttctctgtttttaaaaccaaattattcctagtgttcatatcgaaaagatggtcttttcccaagctaggttgtgtgtgtaatttatagagaaagcatgcattgttctgaagtatggactatggttgtacaggctcctggtagattagctcaaaggtacctgtgaatagtcacgccctagactatacgaactgaatagtttttctaacagaggcggaaagtctgatgcatactgtttcccagccattcatgcctcaggaaaggaactggggaggtggggagcgaaacccagcctttgccctttgtatcctccaatgtggcacttggctccatgaccctggacagctgagttaacttctctgagccacagaacctccatctgaaaaggggataaaaataccacttacttcagaattatttgaggatttcatgagatcatatatggaaagtttcacaatgcctagcacgtgataaatgccctggagatgtcattacttgggggatagtacagcggacatggtgatggtttaaaggtttatacctgggaggtcctggcctgggtgtgaatcccgaatctctgcagcttatcctctggaccattttgacctaataacttgcctttcatgtcaaagtttcctcatacgtagaatgagaatataataatacctgctatttcgggtttgttgtgaagatgaactgtttgtcagctcctgctacatgataaatgctatgtggatgtttgcatttgtgatcaagaaatctggcttctgctgacggatggtctaggattataagtaaggttccattgtgtaccagatatgcgactgtgaagaaattactaacttctctgagcctctgtttcctctttttttttgtagtatatggatgattctaattgcagtgccaagttttgttagagatcagagataatgtatattcgtagtgcttaacatagggcctggaccatgggagttcagttcagttcagttggtcagtcgtgtccgactctttgcgaccccatgaattgcagcacgccaggcctccctgtccatcaccaactcccggagtttactcaaactcacgtccattgagttggtgattccatacaaccatctcatcctctgtagtccccttctcctcccaccttcagtctttcccagcatccaggtcttttcagatgagtcagttcttctcatcaggtggctgaagtattggcgtttcagcttcaacatcagtctttccagtgaatattcaggactctctttaggattgattggttggatctccttgcagcccaagggattctcaagagtctcttccaataccacagttcaaaagcatcagttcttcagtgctcagctttctttatagtccaactctcacatcagtacatgactactggaaaaaccatagctttgactagacagacctttgttggcaaggtaatgtctcagctttttaatatgttgtctaggttggtcataacttttcttccaaggagtaagcgtcttttaatttaatggctgcagtcaccatctgcagtgattttggagcccctcataaataaagtctctcactgcttccattgtttcctcatctatttgccatgaagtgatggtatctgatgccatgatcttagttttctgaatgttgagttttaagtcaaccttttctctctcctcttccacttttatcaaaagtctctttagttcttccctttctgccataagggtggtggcatctgcatatctgaggttattgatatttctcccggcaatcttgattccagcttgtgcttcctccagcctagcatttctcataatgtactctacatataagttaaataagcagggtgacaatatacagccttgacgtactcctttcccgattaggaaccagtctgttgttccatgtccagttctaactgttgcttcctgacctgcatacaaatttctcaggaggtgggtcaagtggtctggtattcccatctctttaagaattttccagtttgttgtgatctacgtagttactcttgagagtcccttgggctgcaaggagatccaaccagtccatcctgaaggagaccagtcctgggtgttcattggaaggactgatgttgaagctgaaactccaatactttggtcacatgatgtgaagagctgactcgtttgaaaagaccctgatgctgggaaagattgagggcaggaggagaaggggacgatagaggatgagatggttgtatggcatcaccaactaaatggacatgggtttgggtggactctggcagttggtgatggacagggaggcctggcgtgctgcggttcatggggtcgcaaagagtcggacatgactgagcgactgaacaactgaagtgaacatagtcaaaggcttaggcatagtcaataaagcagaattagatgtttttctgggaaaaaaaaaaaaaggcaaaatggttgtctgaggaggccttacaaatagctatgaaaagaagagaggtgaaaggcaaaggagaaaaggaccatgggaaatactcagtaaatgagaggcacagcaaagatttttgttatcattgttatcactgtcacttgattgtttccattaaaaagtttttatggctaatatgtttctgtcttatataaaatgtttattctaaagtgaattccacaaaccctctatggaaatcaacgtgattaatatgtggaaaatgacgttgaggtctcttgttgatatatttctataaatggagctgtttcagcaaattgaaaatactcagtaaaagcctcgtaatttcgtgtttacaattttctgggtcacgaagggtcaaagttagtcagggtcaatgttaggtggacagttttatattcatggaaaatgactcacaggaaacattaggaactaaaatttccgtaataaaaaaacaaaaaagccatctcttaaaccatgtttaaattgagtctgtgtctatttcatatcctaactggcattgtgttcataaagttttgacattgtttgaatttctgttgttaaatctcatttagggctgataatcatacattgtaacacacgtcaccggaaataattaagtactgattccagtgctggtaacattttccacttgagtcatctgggtcactgtgtctacagtatccatatttacacctttgtgttgttttgcaatagatctttaagttcaacttcctttttttaaaaagaaataaaaccttaaaaggtagggaagcaacaacatcatttgtaatccagaactataaatgggctttgagaaaagcagggtgttttcttatgtttgacctgggagtgcctggtgtttcagtggaaggtgagaacttgcagtgagcagtcagatgtggggagaaatgcagatggttgtacctaggttgtagatcctctcaagtcaaagtatggaggtgctaatagaattcctagattctggaaggatgagtaaagctattcaatcagaaatatgtgggagaacgtcttccagatgtgtgcggatatctgctgagagtgttagttggtttgaaggatgcaacctggagagaaagttaatttgagttcagtgtcaatggaggatcttttaagccataattaggagggtggtctttattcaatggccagtgaggaggcttgaaaaagttttttattttattttatttttttggaaaaattttaaataggagccaaaggatcctgtttgtgtttctgaaaaggctctgtggcagggccatagagaatggattgcagaaggtggtgacaaagaagaccaactgaggagttgtgtacgttggagatgatacagtccaggactagcgtggcggttgtagagatggttggggctgagacacactggggttgaagaagcacagccctgggtgatcagttggacataaagtggagagagtgaggaggaaaagatggcttttagatttctcacatgggcaggtgggtagaacactagtgctgtttacagagatgaagctcttggaagagaaagagtttggggagagtggatattcttctttgtgcatggggtatgagatagaatagctgacacttgagagagcacggagacaggcatgattctagggatagagtcggtatttcagacaggtttacattctcatgcatgaaacgcaatcgccagctaacagtcacctaaacagactgggatccatttgtctcccgtacaagaaacccaggcctctgtgacccctgccattctttcagtaattccgtgatgccaggaccatccttgtagtgatttatcttggcttttcttctgttgcttttcatcttgtgactgcaagatggctgcttctcctctgggcattcagaatgaatgccagagtgctcagttctgtcctactcttgtgaccctgtggactgtaccctgccaggctcctttgtctatgggattgtccaggcaagaatactggagtgggttgccatttcctcctccaagggatcttcccaacccggggatcaaactggggtctcctgcattagcaggcggattctttaccactcagccacctgggaatcccctggtggtttatgggcaagttcaagtgccagaaattatattttgtttggatgcttcttgtctttcttgcccatctgtacagtattaaattgcctacatcattagagtctgcaatagagtcatcgttttaaaaatcctggttatttttgactaaacagtttagtggtcaggtaggaaagatgagatgccctatttaactacagtatacctagtcaaatatgtacatagacacactcagagaagcccaccgtttcctattaacatgtagattatgaagtgtgtttcagctttaactatatttttgtttgttaccttcaaacacatataactctgaattgtctttaaaacataataaacataccttttccttatctgattaaaattcttaacctgtggaagacttttgttctcagatttattccatatcttcctaattccttaaagctctctctcagtggacccctttgggattagagccaatgaggaaaattctgtttggtattcacttactgatatgcattgcatgtaaaagcagggagtgtgtgatggaaaatgtcatcccctttactatgacttttgtatctgtgaaggatataattattctgtgtttaaaactagagagaggaaatgtttgttcactcttcctgaaggtaaggttattgagggtatcataagatgcaaatatttgtcctctattctcttccagtttaactcaagagagtctccccatctaatatatgcagaattctcctagtgactgctttagctcagagtggttctgagaataaggaagttttctgtccctgaagtagggtagaaggtgcagagattttggaaaaaggcttctcaggcttaccactatgccatgtgatgttgagaatagaatttaacctctctgaactgatagatgctatgaaatttgggatgagagcaggagatagttgtatggtccctaccacataagtatagaaaaaacagctgcaacaagaatggccgggtacactgaagatgcaagtaatatctagtggagagtaggataaggaaactgggagactgctgggagactttaagaaggccttttggaggagaggactggaagctcatgtatttaataggagaatgcagagggattacaggatggtggaggatggccccaggctgagcacatagacatggtgtgcagcgtgtgtttgatgctttcagagactttctgttttcaatgatggacaaattgagaagagccttggaagtctcgctgagtttggactttgctttctaggtgatggggaacaaccacagacacttgaaaaattcatacaagtttaattttgatagaagtggattttgtgggtcaaagaatctgtgcatttaagatgtccatagattttaaaaattaaatattttgagatcgtggtagattcctaaaatgtgtggttttaagaaataacacccagagatcctgggtacttgcccagttttccccagtggtaccatccaatacaatatcacagccagaaatccactgaagacttttgagaacagtccacaatctgcctgaatctgtgttttaaatgggtgatcatggtagtgatggcctggaatggattggaggtacaacgtggagactaggagatcctttggaggttaatgatctaaaagaggacatgaagaccatggtgataggattggatgggaagggacacctgaagtagtaataataggatttggcagtcatgtggggttgataagagcatttgatgccttgtgcaattgctcagcaagtaggtattgaggactaattgtgtaccagtctctgctaaacatcgggttgaaaggtgagctgacaagagaacaggcactgtgactgaggggaggtgggctggtgaagctgtgttgcttgggacaggacagtgagcactttgcagagggggtaaccgccactctgcttctcctggttatgaccatgtgggaatgtaggtccattgtgattgataattctggtttctcataagctagaaatctagatttttatatgagatctcccaatttttaaatattacctagtacaacttggaaaaaaaaaatagcattcacctgtgggcttgattgacttcattattgccagttcctagcctctcttttctcagtgggatgtttagagcttatgtcaggaatgtctagggtttatttcagttatccactgctgtgtaacaaaatcacccctgtgtgttagtaactctttgggaccccatggactgtagcatgccaggctttcctatcccccactatctcccagagtttgctcaaactcatgtccattgagtcagtgatgctcaaccatctcatcctctgctgcctccttcttctcctcctctcagtctttttcagcatcagagtcttttccactaagttggctcctcacgtcagatggccaaactattggagcttaaacatcagcatcagtccttccagtgattattcagggttgatttcctttaagattgactagtttgatctccttgcagtccaaggggctttcaagagtcttctccaacaccacagttcaaaagcatcaattctttggcacttagcctttatggtccaactctcatatctgtacatgactactggaaagatgatagatttgactatacaaatgtagtagtttaaaactatggctgttttatctctcacacttctaaggggtgactgggcttacctggccaatttttctgctggtcttgcttggggtccctcatagaggtactgtttagttgtagacatatgatggtcagggctggagcaatctggagatctgtcttgggccctgatacatttggaattttgtcttcctgcctgtagtttcacagcctctggtagcctttccctgtggaaaggtaactggatttcttacgtggtgactcagaagatcttcagagtaaacgttccagaattgaaaggaagctaacagtctcaccgaaattaggtccagaattgccaaagcatcactctttttcttagttaatgcaagtctcaggccagcccaggttttttgtgggaggaaactacacaggagcatgaacactcaggcctgtttgttcactgactacggtttttagagaccacctacaactgaagtctcaatacccagatactggggattgtgttgatcaagacaagttggcagatcagggcaaattctcctgcttgccagcccctattcctctgaagtttttgagaatttcctgatactaagtttcttttatggtatcggtgattctggagaaatttacttttcagtatgacatactttggaaccataactcatttgtagttatttgctttctagccctttaaaaatactgctactactaagtgatgagacagactgattctggttttggttgagcgtgtgcttttcagatatgcaaccagtttattaattaatgttgattttctgatcatgtatccttttaggaaggaggccctcaaataaagtccattgaataagaatcccaagtctttactgtccaccagtagggacagctgtccattattatgacacttctgagtattcctggaagcagcaatacaatttgcaggacctaatacaaaatgaaaatgtgagacccctggttttaaaagtaagaattttaagatggtgacagcagatcatgaaactaagcccaggcccaatgcactgcgtacctgtgcaccaggctggccttgtgtagccccttgaacatgtgtgcaaatgttgcattaaagtatgttttcccagaagagaaccattgactctaatcaaattctcatttgattttgacacgcagaaaagttttagaagcactgcttagacaaatcagaaaaagtggaagctttgtgtctgaacagccctctgctcccaagcaggcactataccttttggccacagcagccggtcttggctgacgttaggctgaacattctgccacgcagattcctgaattccagggacaccagcgtcgtggggatggtctatgtggctgagcgtttcacaggttgtctccctttttactgaactctatttctgaagcatacaaaatagattacctgtgcaagcgatgggcatttacgttcctttgaaacagatattagccccgtttgttaggctggggatttggggatcaagatttctgggaggcagccggtggactccagataaggctgccgcattgcccaacttcatagggtttatgcctttatgagagctgccgaaacacggtgccatggactgagtggcttgaaccagagaaatgtgttgtctcagttctggaggctggaaatctggagttgaggtgtcagcagggctgtgctctccccgaacgctccagggagggatctgttcccggcccctctcctgtcttccggtggctccttagcttgtggtgacataattgcagtcttcacctggcttctctctgttcacctttcccctcctgtggaaggacactggtcatattggattagggacccattctactcccgtctgtcttcatcataactaatggtatctgcagggatattatttccaaataaggtcacatttgaggtgttgggacttcaacataaaactttgaggggcacacagttcaacccaaggggtattttccaattgtgatttaggaatggcagctccaggcattctgtaccgctcagcccaagtggccctacatggagggcttgccctggaagaacctcaatagttaagagaggtgtttgtgaagctggcttttaataatacatgagccactttgaattacttgtttgggcccttgatcgggagcatcataaactcttaaattttttttttttttaatcatccctgtcaatcagtggatgcgaaggtcaaattactgtcatgcctacattcctgacccttataatagaataataataagctaacatttattgaatgcttattatgtgctaagaattgcatgtgttatctagttttatcttcacaacaactctattagatagttactgttattcttccagttaacaggtgaggacgctgagatcaggtgtggttgtgtgacatgcccatagtcacatagctaattaaatgacaagctgagatttcaatccagttctgtctgatttccaaatccaagcaacattgcagggggtgcaccctgtatttttagaggaatgtttgcatgtaacagttcaccatttaaagcctgttttatcatgggccttttcttttttctagatcatcctaatgaaatattctccatctatgtttatttgactcaggattcttaacctttttcagagtgaccatagggccttccataggttgtatttctatctacttcagtaagggtaggaattttccatttgaattaattgaaattacaaatggtaaacagtagaagagattatattttagctatgttttttaagagatccttaaaagaacataaaagttaactcatttccttgacattggtgagaatagagtcctaaacctcactagagaattccctagtactgataaggaaatttattctcatctcatttatgctgctttcagtataatgtgctatatggtgagagtggagacaagttctctcgaaaaacacatttttgctttcttccttctttcccaggtagcaactgaaattctctttctctgtcagagtgatagtccagttaaatccatgcatgtagatacatgggttctttcctccaagtgtgagaacagtgctgttttggaagcagagacttggtatcctctgatggtttattttattcttgtttagttgttaagctgtgtccaactcttttgcaacctcatggactatagcccaccaggctcctctgtccatggaatttcccgggcaaaaatacgggagtgggttgctatttccttctccaggggatatttccgacccatggatcgaacccatgtctcctgcattggcaggcagattctgtaccactgagtcacctgggaagcccctgttggtttttggcaagttcaagtgccaaaaattatattttgcttcgatgcttctcatctctcttgcccatctgtacagtattaaattgcagacagtatgatagtcatctttttttttttaatccctgttatccttgactgatagttcaagtcaggcaggtaggaaagaaagatgaggtgctttatttgcttgcagtatacctagtcacctgtttacatagaaacacatacatatatatgtattcacacatacatatacatacacacgtatccgcataaagtctttgttaaaatggcatgtcagctagtgttgctttcagaccgtaaaggtaaggtaagtaaagtcactcagtcgtgtctgactctttgcgaccgaatggactgtagcctaccaggctcctccctccatgggattctccaggcaagagtactggagtgggttgctatttccttctccaggggattttcccaacccagggatcaaacccgggtctcctgcattccaggcagacactttaagtttcagaccataagaactgaatattttccgactctagttgaattatttatcagggtctgtgggataacttattatacttatttgcaaggtttggataaaggctgtcttgaataatccagaatgtgtttcaccccatgtgtctaaaagcaacatttcacacagtgtagtcccaggatcacctgtttcaaaatctttgggggcatggtcaaaatatgaattcctgggccctggtactgcagcctcactggtcctggtacnnnnnnnnnncactggtcctggcaccccagcctcactggtcctggcaccgcagcctcgctggccctggcaccgcagcctcgctggccctggcaccgcagcctcgctggtcctggcaccccagcctcgctggtcctggcaccccagcctcgctggtcctggcaccgcagcctcgctggccctggcaccgcagcctcactggccctggcaccccagcctcactggtcctggcaccccnnnnnnnnnnccccagcctcactggtcctggcaccccagcctcactggccctggcaccccagcctcactcattccgggtttccagggaaccattttgtccggctcctttgtgactcttcaccacaccgtcgtttgagatccatgatgtgaaatgtattaacaggagaataaagagtaaatttatttttctctgtcctggttcattttcctcttttgtcatcctctttcctgtcttttgtcttccaccccctccgtcaaatatattaaaagtatttcaagagctattctaatggtgtactttaaaaaaattgttcataaatgtcttttgtttattttagcaatatcacgattccatctttccttttgtggtgtgtataaaaggagccattggggaagagtgtttgttttcttttaaatgccctctattctccacagtaaatctccaggaaggaacaacatgctgtttgttcttttctcaggatgaaccgtggctttctttgatagtggatattgtcatcaatggtttcagcaacttatgactcgtcctttttataaatcccagaatttagtgcgtgcgtgtatgctaagtctcttcagttctgtccgactctgtgcaatcccatggaccgtagcccgccaggctcctctgtatgtgggattctccaggcaagattactggagtgggttgccatttccttctcaaggggatcttcctgacccagggatggaacccgtgtctcttaagtctcctgcatcagcaagcagttctttaccactagagccacctggaaaacccgagtttctagagcctgctttttggggtgagtgtaaggaatcaggattctctgagaaatccttttgtggattttctgggatctcagaataggccgtcacaactccctcagtgtatggtgtcaagaacttaagcctctaagtatatgaaagagtcgtaaaactagaggttttaatggattgttagtaataggacatttttaaccaaaagtattcctgacaggtgaattccctcccttcctctcccgtattagagaaatccctttgttgtgaagctgaacaagcaagattgtctccactttaatccgtagtaaataacttgttggattccaagagagtagaaattttccaggtgactcagatggatgcttctaaaggtatccagacagtggattatccactttctaatccagacagtgatgttagaagcagattcttctataatattcttctttattataaaaggaaaatcatcacttatgtgttacaaagtggagaaactgtgtggtgtttccttctgaagtgtcagattcaaggtctgtttcctcttagagaccctcaggttaatctccagcattttgtattccagcctgggaaagactggcctggactgtgggctctagcacctcactggttttgtatgtttggactggttaatacaagtgaccacctgttatttttttgtccaagtgctgtggttggatttttctcctccactaatggtacaaatctcttatctccctgctgtgtctctctgatgaaagctttgtactggcagagaacccttggtggcagagctgggctgatgaatgtggccctgactataatttgagttgtcccgggaggggtttgagcgtttctcatgaggactcaatggcagtgagtcaccgtgtgctggggtactggtgtcgtgaaataacagctgtggcagcagcaacaatttagtagcagtcgctggttgagcatttattgatgctcccaccttgcccgtcacgtgtgttaaatagcacttaaattggcagtagtcccatgaactcagctccatctatcatctccattttacacataatcgtctcaaagacaggagactagtaagaagaagaagtggaacttgaactctgatctcttgggtggccacacgtgtccatttaacagccacactacattctttctgactgaagtacacattgttgccagcttccctacccgctcttaaatcacatcatagtcagtttttacttagcagttttttttactgagtaatccagggaccgatgactccctttccttatttttcatttattttaagtgagagagaaagttcaaccttgggaaactgagcatgaccttcagcctgagaccatgtccatttactgaatcctcgagggataaaaggaatcttgtcagggggagggttgggtaagagaggaagaggtagacaggtagacacatccagggagatttgtatctccttagaggagcaggagggacattaagtataatttaagattatagttcagaggtcagccaggtaataatgctaagggacactttatgcaaaaaaaaaaaaaaagttctctggtcaagtaaatttagtaaactaccttctaacatccagttaaaaggcaccaacaaccaaaacaccaagagcacctcacacttactaaatgcttcgtgtgtgcacttttaagcacttggttgtaccagtactataaggtattattttgatcccaattttactgatggagaaaggtcatcctgctattgggtggcgggggtgggagcctaaccaaagcagcctggcctcaggcactggactcctcctcctagtacctcttctggtgacatctcctgagcatgaatatatgtgccagcccccagccttagttgctgtgtgtgtttttgtttacctgtttaaccttctcaagcatcataatgtgcatcagcatattaaaggttctgacgtgtccagcagtcaacacacttgttagtctgtgtccagtgtttctgagttacttcactacaggattcatctgcctttgtcgagcaggaggaatgaagggaaaatacctgcgtgtgtgcacttggggaaaagacaaccaagagaatgattttattctgactttgcttcctccccagtgcagttttgagacatgatttattttcaaaacagagcagactccctgagaatgtggctttattatctaactgcccagtgtttggtgaccttcatcagggtgccgtcttgcttcccctgggggcatggatacctgcttctgtctactttatgggaatcttgacagtaaatgaccgtaaaactctttgagctgctttaaagaaagacactattgaagtccaaggtcttcatgatgtcgtatcaaatatccagacttccttcattttggttaactttgaaaaataaatgtgtgtcctagcaggacagattaactagtttagctcatcagagggagggaagaagatagagctgcaaaatgtttattgctccccagagtcaaatcttcaggcccttatagcctggcacagagatgcttggttacaacaggagcaatgttgatgttgagttccccataagactgtgggagccttatgtttgtgtgactgactttgtccttccgagctccaaatatctgaggccagagacccaaatgcatatgtctgggcatgcatccttggtagtgtatgcttttttaaaagttttgttttagctgtatgattgtaccagtaaaaatccgtttttatcagtgtactaggtaaaaatccatttagctgtaaatgacaaaatccagctcaagcaagaaaggagatttactggttccttgaggtgaagagtgcaggtccttttagggttggtttgaacttaaggatggttttgacccataggcctggtgttagtatcatgggcttgatttctgtgcatctactgtgccttcatggtgacatgtcacctttagtctttttttggttctatctcatgtccagatgtctaccagatattcctgaggctactaattccctttagtttatttttggttctacttcatgtccagatgtctgccagatattcctgaggcagtttattccttccacatccagagatgagagagattgagagattaggtatatttctggaggctgtttctgaatagcaagaaagaagatcaaaccttttttattacccagacttagatcatgttcccatgtatcagccaatgcctctgatgaaggaatggctttagactgattctgccatgttctactcctgcgttctgaggtggcatgtaactttgcaaaggaggtatggaaaatcagatggtttccacataagtgagaatggatgcagggttaaactttgagactcatgacacactttacctgacagttttctcttatacactcatgttagcagttacatgtgaaactggccagttaatgaataaaagacctaggtcaagatttaacttacaggggatttagtttcaagctctctctctcttagtaatacaggctacaccagatcaaattgagggattctcttctttttagcttgttgaacagtgtggtgttttggcttttaatttgtaaagcattaaattgagtctctgtctgccagtggtttttaataccaagtgcgttttgggtgagtgaatctgaggtttcattaaggcaatataaatgaccctagctttattattctcttcttcctattgagctcagtgtgactgctccttgcttttgacattgaacttcaagctttactaaataaaggatatttgtttccacattggtctcctggatgcctgacattacattttatttcataaaaattatgccaccattaaaaataaaatcattaatattgagaggcataaattccaagattgatagtagtagccggaagtgtactgagtgctgactgtgtgacaggaaggcactgcgctcagtgctttatctgcagtgttctgttttttcatctcagtagccctgggagatgctatcattacttgcattttatagttggagaaactgagattaaataacatgtacaagttcacatagagaggaaactgtggagataaaatatagatcttttgactctgagtcctgttctcttgatcactattccctccactattttcaaagccaggatattacatccaatgttaatttggaatgttgggaaagttgcattatgtgtatgtctttctgaagttagtgcttctatagactagttgtggtagaggattgaaaaagagcatttcctagcatggatcttggaaaaacaccaaagagtttttcataaaaaatgtgcattttccctgatagccaaaacaattttgaaaaagaaaacatttggaggactcacacttcctgatttctaagtctgctacaaagctacagtaatttaaacagcatggtaatggcattaagacacacagattgagcagtggaatagaataaagagctcagaaacaaaccctcacatttatggtcagatgatctttaacaggggtgccaagattataaaatggggaaagtctttaaccagttgggttgggagatgtccatatacaaaaacatgaagttgtgttttgccatatgcaaaaatcaactcaaaaattaagatctaaatataagatacagcactataaaagtcctaaagcagaatatggaggaaaatcttgatgacattggactatacgatgatttcttgagtatgacaccaaaagcacagacaagaaaaggaatgataaactagtgggactgcatcaaacctaaacccttttatgcatcaaaggacataatcaatagattataaagagaagctgtggaattatagaagatatcagcaaatcatatatctagtagaggttaatccagaatgtataaagaatgtctcgactcaacaacaaaaataatcaacccaattaaaaaatacgtgaaggacttgaatagagatttctctaaagatgacatacaaatgaccaacaagtatggaaacagctgtttaacatcattagtcattaagagaaatgcaaataagtcacagtgagctatcacatatcacctgttaggatgacttttactaaaaacaatagcaaacaagcagctacccctcaccccttaaaaaaaaaaaaaaactcagaaaataacaagtgttggtaaggatgtgaaaaaatttagatatcgtgtacactattagagggggttgtgagacggtgcagatgctgtggaaaacagtatggtggttcctcaaaaaattaaaaatagaactgccatatgattcagcagttccacttctggtatatatccaaagtaattgaaagcaaagtcttaaagagagattttcacacccaggtgctattcacaatagccaagaggtagaaacaactcacatgtctattaatggatgaatggataaacaaagtttggcatatacgtagaatggaagactatttaaccttaaaaatgaaggagttctgttacatgctacaaccttgatggccactggtatgtgaagtgagccagttacaaaaagagaaatagtatatggtttcacttatatgtgataactaaaatagtcaaattcctggaaacagaaagtagaagggtagtaaccaggggttggaggaaaaaggggagttttttagtgggtattaagtttcagttttgcaaaatgaaaaaactttggagattggttgcatagcaatgtgaacataattaacaccactgaacacttaaaagatggtaaattttatgatgtgtgttttttaaatcagaattgaaaaaaattgtatttgtcttctggtactgatttaagtacttaattgagttatttgaacatcttaaaagttataaaccctgagcctacaggctgaatatggatcacaggtatattcatatagactcataatcttttttttttttggaggggataaaatgtgaaccagtggtcatcattttaaagaattaggaaatttcatgttaaaatctctgcttctaagcttctcttggagaactggaaaatctgaactttgggccttgtctagtcaacaaatgactggaactaaggagcagccaacctctttatagacagggcatgaaacagactacattttttctcattcccttttttttccccttatatcaagtccaagggctcatgtacagttgatccttgaacagtccagaggttaggagagcccacactatggaaaacccatatataacttaaaattgcccctctgcacctgcagattcattcaaccgcatatagtgtagtattccagtatttactattgaaaaaaagttcaggtggacacatgcagttcaaacccatgttgttcaagggtcaactgctaacttcctggtctgtttgtcggttttaaattaaactccttaatccctaatgccctattactactggtgttgtaccgtgcatgctgtgcatgtcctccactaatcagtgtctgccttccctaagtagcctcttctgttttaggtctgagagttctgatctcttgtctttaagaacaatatagactcggtgctttttttttttttccccttttttcctttagctgttttgcttgcagcaaatgtcctaccagtcatgttctaaatatagatgtgttaaatttcaaatgtgaaagtttttgatgggtctgaagccagtttgctaatcagggcaaatgctatgattggcgccagtgtttacagaccctgggggtattgtgaaatccgccttcgccactgtgattcagctcgggggtggaatgaagctccctgacccctggaaagttctccaagttgtttttcttctcaatagtggggtgattcgttgaatgtcataacttagaaaagtacgtgttccttagttcattttactagtgctggattactatcaatagtatggtcataaataatttttgcaagcaaaaacaaatcatatttttttctgatcttttcatgtacaatcagtaaggaaatgtctatttattgaaagaaatctagagacccaagggcctgcctcttcatatgaaattaaaaatagttacttgtgcaaagtgtaaaaattttggttattggaaagttcagactgatccaatttttaaaatcttgtatcttttaagtctaattatttactctttaaagatagggctagtagtgtccattgtaaggaggggcaaaatactcaagaggcatcagttgccaaaattttcaaagctactccctgcctaatattcgtgtgtgtctgtgtgagtgtatatgcagggagcactattagaaatgcctgtatgtttcatgctgggtctgttttgtttgtgtcatagaacttgaaagattcattttcgtgtgttgaataatagtgagcagcagtggaggaaccttagtctccagtaccagtagagtggaggtattcggagaactttctgataatgagaattaaagtaattaagttgctgtgccctgagactctgaatccttatctccccttgccagaagtgaggctgtcatttagagaagtgggtgtctctgttactgaaatgagatatgactgtagttgatcccatcactctctggtgcagaatttttcaccccgagcagcagatcagagaaatcaaacagaacaagccagttaaaccacactgctttgctggctgaagggacccaaaagtaaacaaagtgacagacttttggagttcctttcccaaatttgatttccctgtttttatccattaaattggtcaacagcagcactcactggtaaaaaacaggaacaacagattcaagttttgccgtcagctacactgtagtgttgttctctctcttttttccttcccctcttttctcttcctcctccctttctttgatctttctctccctccctcccttcctcagttcaattttctgtatatatatatatttaaattccaaaggaataataacataaagaaaaacatgttaattttcttcctcaccatcttgaatccagccctgctagagaaataatattaataatttgttgtgtatcatcagtcatttccttgctcaggcaaataagatccgtagatagaaaagtttgtttgaatttttagaaactacttaatctgtttatttttggctgcgctaggtctttgggactttgtgcaagctgtctctagctgtggcgagcaggggctgctcttccttgtggtgtgcaggctactcttgctgcagagcacaggctgtaggtgcatgcatgggcttcagtagttgcaggataagggccctagagcgtgggttcagtagttggggcgcagggacttagtagctgcgggcaagtgggatcttcccggaccagggatctgaactgatgtcccctccgttggcagtgggattcttatccactgtaccaacagggaagtcctatttgtttgaattttcacagaaatggactcatgttgtgtgctgtaactttactcacctgacgctactttgtggctatctctccaaatcagtacctttacctaaaaatcgttactttcagtgtggtatatttcatagtatgattttatcattcttcatataaatcccccattgattaattcagtttacagattcctcctcacccccgactaaacaaatagcgttgcttattttaactgcatatatatatatatatattttttttttttttgaaaaacctttaccctgtgtgatatttgaagagggaagttatagggctttttatttttgttatttgtttttcttggggctagtagttactttatagtgttgtgttaatttctgctgtacagcaaagtgaatcagttataggtatacatatatctactctttttttaaaaaaaagtatatatatatctactccttcccacttagatcactgcagatcattgagtagtgttctctgctatacagtaggtctttattagttatgtattttatacatagtagtgtatatatgtcaatcctagtctcccagttctcctccaccattgcttggtaaccataagtttgttctgtacatcttgactctgtttctgctttgcaaataagttgatttgtaacatttgtctagattccacatataagtaatatcatatggcatttgtttttctctttctgacttatttcactctgtatggcagtctctaggtctatccatgttgctgtaaatggcattatttcattctttttatgactgagtaatattccattgtatatatgtaccacatcttctttatccattcctgtgttgatagacattttattttgcttccatgttttggctactgaaaataatgctgcaatgaacatcagggtgcatgtatctttttgaattatgtttttttctccaatatatgccgaggagtgaaattgatggatcgaatagtagctgtatttttggttttttaaggaacttccatactgttctccatagtggcttatcaatttatattcccaccaacagtgtaggagggttccctttttctctacaccctcttcagcggtcattgtagactttttggtgatggccattctgaccgtatgaggtgatacctcattgtagttttgctttgtgtttctctaataacttgtggtgtggagcatcttttcctgtgcttttggccatctgtatgtcttctttggtgatgtgatttctctttatttttgctcatatgtataccataccatattatatagaacagggttgccttacatcataaatcacatacatttcatcacctttgtttatgaaataattttaattatcttgttattttcaaaggttgaatttagttggtattcctttgaagagtatggcagttgttcttttcaatggaaaaaggagatacgatctgacaggattttttctttcagtgccttgaggaatcttttgaaatgattttccaggtagtaaaacctttaatgtcctttggattcactgtagtttgtgaagctgacaaacaacagctctttgggatggttgtgaaacaaggcctgggacagactgacttgttacttagtctgcatctgttgccttgacaacaaactaaacatttaaaaatacttcggcaaatgccataaacaagtgatgcttgggggttacactattaaagcagaagcaccaagaccacatttagacaataaaggttgcaggaaaaatacccactttttaggagatttttattgtaggtttttctgtctctgataaacactagatgcattagcaaagagaaagtcttctgctctaagttgagaaattactttcaattgcagtatgcagcagtttgcactgtattttggcccaaaggataatgcacacctcttttatttggctttcctcaaagcagtttagtgccatgtgaatgaaaactggattagatctgtcacagcagctgaaggttagggtgacacagggagagataaaacgccaatctttgtgcctaagtattttttgtttaacctgtgctctcacattcttcgtattcacagaggtacttgttgtctgggtggtgatatctacaaatcctgtaaatgaatatttgttatagcatctactattatactaagaatcattcattaaataatttgggggagtgagtaatttataggaaaaaaagggattcttttggccaaacaggaagagtattcaattttgctggactcagtgggagggaaaaacaatcctgttgcagatttctgtattttaagggatgcagttcatgatagttgaataattaggaattcaggaatcctcgctcacgcttttctgttttcttaaattctcatgatctaacattgttctgtttggctataagtaacatttattttcagtttgattttgaaatgctgatactttcagtgtaagtgaaagtcgcttagttgtgtctcactctttgtgactccatggactatacagtccatggaattctctaggccagaatactggagtggatagtctttcccttctccaggggatcttcccaacccagggatccgagcccaggtctcctgcattgcaggtggattctttaccagctgagccacaagggaagccctaaaatactgaagtgggtagcctatcccttctccagcggatcttcccgacccaagaatcaaaccgggatctcctgcattgcaggcagactctttactttcagtatacaaatagtgaaaaataatacaattccacatatggctttcattgtcaagatcatttcttctgcctatcttggtggaaatattcagtattttttcatctaaaaccaaggttatctttatgagctgtcagggctgtggtggcatatgtaatgatacaaatctgggactcccagtgctgtgggtcagagattacaataaaaatacaagtgtaaatttctgaaacaacgtgtactctagattttccagaggcctttaaacagattatagatacagcagtgactcacagttttaatcagtctctatcttgattgaaagaccctctcaaactttgctgtcttcactgcattcagatcccacttctgtggcttactgagctggaagctgttaatgggtctcgtttatgcccacagctgacctgcctcagcctcagtttctccatgtgtaaagtggtgatgctgctgcccatattgacaaaattgttggaaagattcaaaacccaactgctttttaacatactagccctgtttctggcttcttaataatggatatttttacattatttttatggtaaataaactgtgttgtgtttgttaatctgcctgtggaagccaggcagatttattcagttcctcttgtatcacatatcagaggcatggaatctcatcgaggtcagtgaactccctctgagtctcagtttcctcaattgtaaaataagaatactaatatttaccattcagagttgtgaagaaaaaagaccatgtttttatagtatatagcacaggtctggccatgtcataaccatttaccaaatgatagcttctgttgtcactatcattgttattatcatttttattattatttgacaatatgtatatatcgcagaatttctgccgccatttctatagcctagctactgttatctctccctgggttgctctcatagccctttaacccttctcctgatgctgggatgcagaccctccatcataatctggccttgcccttcccctcccacctcagatccccacattgctttgcaacagatctttctgtgctttggcctccacagactttatttcttttcacatgttatactactttcttgcacagggcccttgcatatgctattttttccttcttgaactagtcctctcctcttttcccattcccttatacttctttacttccctcctcatccccttattaaataccttcataggtacttatacttaattctttaagtcacttgtcatgtcacatttttttgtgctcacttagtgaattccatccctcaccctcatcctcaactacaggttctgagagagtagatactgtcagactgggatcaccactggctcttggtttagttccccttcatacgcatttgttgtgggaggcagtggatgactggatgcatgactgagatgggaatagaaaataactgggcaatatttgaggaagcagaggcagtcgtagggtgtgaggttcacccctggggaattcaggttagttcatggtctggcgcgccaccgaggaagcgcagtgtgtttgtgcagggaggaaaaaccgtgcaaatgaagaagtgcagagaggaaggaagaagcttagcaggaaatagctgtggaggattggaaagaggaaataactgagaagtgacttgatagaaaattgtgcatgtatttcctctgctgtagttctcatttttctggtttatgcctttggtcttgttttctgagtctgatttgtagcgttctcttttctttcccccttaggatgccatatcagtttatttacacagacaaaccgatacaccagaaatgagcacacagacagtggcaagtgcagacttgtcgttttcccttcggacgatgaactcttcctcctctttgtcagtttctttctctatctttgtatttcttctgtcaaaagtgcacttttgtgtgtgtgtgtgtgtgtgtgtgtgtgtgtgtgtgtgtgtgtgtgtttgtggttctctactctgaaatggatttaaatcccctcctttggctccccttacccatttctaatgtttaaagattcagcactgacttctcatttcagctgttcatgtcactaatgacagagcgatttttcagagcagaaagctctgctgagaccgctgtcaggtattgagtggttgcagggatgaagaactaactgcttatttttgagtgtttttcttttttagtctccaacctttttttctagtgttaggttaaattaacatataattcacagaagatcaaatttactattttaaagtctacacttcagtggtttttagtttgacagcttgtgcactagttaccattatctaattccagaatatttccattatctccctaagaagccctgtacctttcagcagttaattccaactttcctttcccctgccccctggcaaccattaatctactttctatggatttgcctactagatgtttcatatcaatggcattaggcaacgttcggcctcttatatccagtttctttcactcagcatgaagttgtcaaggttcatctttaagtatgtgtcaggacttcattcctttctatggccaagtaatactccttcataggactgttccacattttttttttttttttcagttgatggacatttgagtggcttccactttttagctgttatgagtaatgaggctctgagcatttgtgtataaatttttgtgttggaacttatttttcatttttctcaggtagttacttaggagtggaattgctgtgtcatattgtaagtctgtgttaaaccttttgatggactcttagactgttttccacagcagctataccattttacattcccactagcaatgtactaagtttccagttcccagtttttccatattcttgccaatgcttcttattttcatttttttaaaaaaattacagtcattttagggtgtgtgaaggggtctttggacttccctggtggctcagatagtgaggagtctgtctgctatgcaagagacctgggttcgatgcctgagttgggaagatcccctggaaaagggaatggctacacactctagtattcttgcttgaagaattccatggacagaggaacttgttgggctacagttgatggtattgcaaagagttggacacgactgagtgaatgtctgactttttaaatgatagtttctggtgggactcccctgacccccacactgtctctttcatttaaaaaaaaaaaaggttattgttcttgtcatttttattagaattagattttgaaatgaacctttgctagaactgagggaatcatgaatagtatttgaaatactactttataattgggaaacagcatgcttacagaaggtaactgaactggaaaatagcaattatggcctacaaattaggatttttttctactaaagtaagcctcaagtaaatattctcatgtataaattatagaaacctattattatacagaaaagtcaaaaaaagaaatttggtaataaaactgtgtgtgtcttctggtttggtttcttttctttgtataactatttttttaaactttaaattcttattcttcatatgctcttactatggtgatttttcatgtacagactaatcttctaagatcttttaaatcctgcagaaaaagctctgctaatattagccaacccgattttttttctattgtttcaaatggaagtatcatggccaagggcccagcattgagaagcttaaacaattatagattctttttccttccattcattagatgtaatttagtatttgaaaaaataaaatcgctcaatttcagttgaagttcagctgtcttaaccctttctcatgttctctatttggcttttcattgtaaaccttgacagtgtcaaatcaatagaaatatatttttgttattctctagtataagatcaaaaccatcacccataaacatgtaatgagacttcttttatgtgtggaaaccaatctctgatctttaggaacttacagctgagtacagagcattgatgccagtaggtgctacagacacgaagtgtttgcaccatatatcaggcaggaggcactcagtaattttaaggatggaagaggcaactatgatataattgatatggaagatataacttacacaggattttaagacatcatttccagatttcgtgcagtagggaaacacaccgaactctgattattctggggaaagaaaattaggaaaacattggaagcgtacagatcttgttaatggcctactgaatgacaagctgtgtttggagcttgattccagagtatggtaggtgagagcttgggttcgggcagtcagatagcttcagtttgtttcttggatgtgacagctttcatttgtgtgattatggtgaaaatgagtgtccacagtccatatgggtgttgtgaggattgaaggggattaatttaaatgactccctctatttggtttctgacacataatgggcactctaataatatttatagtcttcttgtcagatttttttgtaattacagttattttacatttaattattacaaccgttacttaagaaaagtggtattaacacattaaaaaaatattgatttatttatttttggctctataacatctgcattgctttgcatggctttctctagttgcagtgagcagaggctactctctagttgccatgcacgggcttctcttgtttttggagcacaggcttgaggcatgcaggctttagtagttgtagcatgcaggctcaggagttgaggctcgaagactctagagtgtgggctcagtagttgtggcacatgggctttgttgctacgtggcatgtggaacttcccaaaccagggattgaacccatgtccactgcattggtaggcagattcttatccattacaccatcagggaagtccaacacacattttcaaatgagaaaaatgaggcttaaatcatcaagaatttgcctacaacagtggttcttacctggggatgatttttgacagcatctagagacgtgactttggttgtcaccactggggtacagcgtgatattgacatctggtgagtagaggctgaggacagcctctgtgacaaagttatgcagcccaaaacgttgatagtgccaagatgaagaaaccctggccaagagtcacagagcttttaggaagagaagtaggatttgaaccaacttttctcaaccatatgtttctgttttcccccgaaacttctcttcatgagaatacagggagtgacataaagtgagttttgacaagtccctttaagatggggtagtggcttgagactcaaatacagcttcatgagaaggtgacaaaccaagtccagagaaagtgaggtgatgtgggagggaaccaccatctgtttattctttcactgttcattcattcaagtattgatttgctagtcatgttttaattcatgtgtcagtcattaattctccacacgcttactgagcaccgactctgtgggctgtattctcatgcaacttctattcctctagccagacagcttggaaatggaagagaacatttctgaaatgtagtataagaagtggaaaaaaaaaaggttcagtattagaaaatccagtttatgaacttgtctcacttgaacccttacattaatctatttgtttgttcatggactgctcaaataaatgcatgtatccatggtatcttcttgctaggaactgtgttaggtcctggtacttatgctcaagaaagtgtgtcttctgttgtgtgtgtgttagttgctcagttgtgtccgattctttgtgaccctatggactgtagcccttcagggtcttctgtccatggaattccccaggcaagaatactggaatgggttgccattcccttctctgggggatcttcctgacccaggtatcaaacttgagtctcctgcattggaggcagattctttaccatctgagccaccagggtgacctttccataaatctttatatagccttcagaaagaaactgcagttttatcattcttattaccagtaaacatctttttagaaacagaagatgtattggtctgtgtttcagaccgcttttgaattgaggtttttgctgggggaaggaagaatctttcttggatatcaaatgagccttgtggtttactcttaataattattttagtatgaaagagtttgctgggctttatgggaagtatcataaaatacctaatttccctcaaaaaaaaaaaaaaaagcttcctgacttataaaaaagattggaataaaacaaatgtgtcttttaaaaactgcctgtattctgatggaaattcctttaatgacaaaatgaatgtacacacgtgtacacacacacactcttaaagggatacatcaaaagccttgattcttgtttttttttttttaagttataaaataataatatacttacaggagacttggaaaacacagagcaaagttacacatagttctactacatattacatactatttttagtagataagaattttttggagtttcaatatcaagctctcaaaaatcaatagaaagaataggaaagtagaaggatatagtagacctgaaaagcactatgaaccaattcaacataattaagatttatacagttttttttcacaacagcagggtacaaattctgttcacgttcccatagactataaacgaggagacattgaaacatatccagggaaataaagcaaggtgcaaaagtttcatggtcttaaaggtattgaaatcatacacagtctgttctctcattactgtggcattatgttagaaatcagtatcaaaagatatttgaaaataacccatatattttcaagtataatgtgacaaatttaccaagagaaatctttgacttagccattgaaagcctcaataaaacaaacaaacaagcaaaccttgattcttaacagtttgtacttttataccatgaaaaagcaagaattactgcttgcattattattaagaatttcattgactgaatagctcatttttttttttttttaagtaaccacaaattttcccatagtgatgaagaggcggacagtttctggatactgggaagtcccttcttagaagtgtatatttatcatggatgagctaggctaatatatatatatatatatatatatatatatatatatatatatatatatataggtttgtttctgttctaatttatatagaagaaagagtctgtgaggcagatgtaccctgtcccatccagaaggaaggactgagtcagcaccacggagcagtttcattggtcactcctgggtagtctgagctgtttaaacagtttaaaagtacatgcactgaacggcttaattcttcactatgagatggccaactctacgatttttctggaattctaaaaatacgttaccatttgtcgtgactacggtattttattttgcttcttgatcaatttttgccagtttggtttgttcctcctgcccctcatgtcaacagttaatctctctgaactctctgcacatttttggggttaagcccccacccaccacccccctttttattttgagtcccctcagacctttccccattatttactacttacctttttttccttctgtggttcttccattgtctaacattgaaaaagttgttgttgttgtgtgtgtgttttttaatgtttaagtctcttaataaaaaaatacacattagcatttgatatttttgtgtatattttttacctggaattttgaaaagtttatatacacatgtgtagttaacagctgatcgtttcaaaacgtggtttgcacttgtagcctatgagggcaaggtttaatggtacaatgacatataatgtgtctccttgcaaattctttttcttctgcttttctagagcccctgaaagctctcacaggggctgcaggcgcagagaccatccttggggaggaagtccagagtccacggaagactctggggtgttggctgtcttgtggagggatggaatggtgttctcctaagacttcaccatgcaaatcttattccttgaatttgaaaacttgtgaagcaactttgttctacttattagaacagggaaagcacagtggggtatacatggaggcctcagagctgtagtacatgtgtactcctgatgattctaaatctagttttcaattaaagcttgccagtttctaggtatattgtagagacagatgttaccggaatcactctccgacttttcaagcttgtttcatttaagctaccaagaaactgagtctataaaatgacataattttatcttatacctttttctgacctgataattttccttttgccttcttagctcaccagttcaaactaaaaaaatcattctattgccacacatgtaacatcctctggatttcttccccatgtgggatctttttttgttcttgtttagaaactagaagtaatattttaacaaatattcatgattttacctatagtttttgaagatctgacttagtattttattttattttttaaaaaaatttatttatttatttttaattttttactttacaattctgtattggttttggcatagattgacatgaatccaccacaggtgtacatgtgttcccaaacatgaacccccctcccaccccctgacttagtattttaaaagtacttcaactaagaacaagaagctctctatagtccccaggaacgctgatgatttacaaatttattctccttttctggggtgaagggaaaaagaatgaggcctttccttgactccctgatgctgtactaaatcacagcttcctgatggtttctttcaaagtgattaagaatatctgcgatcatgtattttcatcatttacttattagcttgtgtattgtcatctcttccacttgacagtacatgctatgctggcaagaagaatgttaattttattcactgtacagtaagtcccttacaaatgaatgcgttcatgtaatataagttagttatgtgaaaaactaccttgcagaagcaaattttgggtatagattatctgcttgtagtactaaacatttttttcttaaactgagggatttagattttatatttttaactgagaggctttttcttttttttaatgttgaattcatttgatagtaaaatgttctttacattgagggtcaagaggcagtttataatttaaagctaaagattctatcttgagaaaatgtatttagtttgctataaatttatgcatgtaacaataagattaaatggacctttatatgtaggtccttgaactcatatgcagaaaattcaggcttttctctctgaagctttgtataaataacaaacctctgagagtttgaagatggaactcttttaaaattctgtgagcctatggacttgtaattaaaatcacaattattgttagattggttctatgtgtaattaaggcaggaagaaaatacaagccagtaaaatgagtaatgcaaggaaattctgatgtcctgcttccttttgaagagggttttacacattcatccctgtctcgttctctgttgaagattcttatcttggctacatggattgttcagaattttcagcgtaaagaaaaactattgaagtggcctgccttttcttgaggaagctcctcccaaaattatttctagccgggccagattctgtctcttaacatatatgatttcccccagtgtgttgattggtttcttatttcctgacttctcttttatataaaattcctgtggtgcactggagctctctggagctgtgttagggatgccataacacacctcagacctgaggaatgcttggatgttattttattgcctttggcagtctgtggatctcttacttctttcagtctgattagtggggaattcagagctatagtcaggagatagttcacctaaactgttactgctttgatggatttaatgatcaaatgctggctagtgcccaaagcagatatttacatgccctatgcttaattctacatttcccttgtcaaagatggttattcaacaaaggccttttatattggttaaagccaattaatacatggagatgtaatttaatttcttcctcactatggttgaatgtgaggagtcttgattgcctacaatgacatatatacagacaacaccttcgtttactaagtgtaataattaaggcagaacattttttttactgcagttctgtggtagaaaaaccactttgatacctttatttgggtcaaagtgttctttatacagtctttgaggtacggacctcatcaaagcagttgatcttccagtgacccattttggaataatatggacacaatggtgcttctctagagttgatctgaagtattgtgtgtttagtaactaagcaaaaatattctcagtgccaaaggctattaagacttggctatatctttgacagttgtctctgtttagcagtttggtatgttggaaagctacttagtagatcttttttttcttgatatatctcaagattacattagattttatactcagtagtagttcaatcagtattcattgattactttatatagctgttgtagcagtagttactgggagttcagtgatgatcataacagacaacaatatttgttttagtataacagggtttttttggaaggtaaaggtggtacacttaataattattctgcagcagcaagaactgggaatattcctcgaaaattgggactaatgggttaccttagttgacacaggcatggtctctgtcctcatgtggctggtaatcaagaagatgatagttaatccaataatcagatattaagtaccaattgatagttgtgaaaaaattatagaaggccatagagtaagggaatttgacctggtcatggggttagggaaggccttcctaaagaggtaaaatttatgctgagttctggtagaagttctagtagactatttcagaaggaaaaagcatgtgcaaaaagctttagggtgggaagagagtgtggtgtgtttcaggaacagtaagacaggagggatgcaagcatggggctccatgtagagtacgtgcaggatgaagctaggaagcttggtagaagccacaccacctggggccttgactgccctggaaggatttagatctttaccccaaccaaaatggaaagctgttatagaatttaaaatgggggggtgtgtgagtggggtcaagtaggtagaaggatcatatgatcaggtttggattttgaaaagatccttcgggctgcagtgtgaagaagagattgagcagggattgccggggtaaagcaaggctaggggcaagaggaaaatctggggacagtggtgaaatagtttctgtgttagtccagctgagagataatggggactttaaagtgaatctgagaggtatctaggagcaaaactcagaaggacttggaaacagagtcttacgggcactgaagggtgtttggaattgttttgtgcccacctgtgatgatacacagttctcttgtgtccactcagcctgttttataaattaaaatcagcagcactgagcagaaaccacagaagagaaagagctagcttcaccgacttctgagaagtgactggagatagtccctgagaagtcagagactcagaaaatatcttaactatttggcatcatcagcgtactctgtagtgtgtggtggaatgagctgtgtgtaggggagagtacagttccttacattcttatgcaagagttgagctatagaatgatcccaaccagtaatgctgtgtcattgacttcttatccggatctctcttcaattagcctgtagggcagcatgactaaggtatcatttagggtactagaacaataattttctaaataataccctggtgcattgaaggggttaaagtaaggatgcctagatgcttcatctatgatcagggtgctggatcagattagaccctggacccaactggtttatcacgtggttcttttacaaggctgttgctcatcttaaagtgtgatgtaacagagcttatgaattaaaaataaaaacccacagggtcatgtgaatgtgtataaataccagggaactaagtatatctttctctgtagaacataatgtgggtagaagacttttgcttttgcatgtggcataacaccaggctcaagtcattatttatgtatttgcctgatgacgaaatagtagttgttaagtagcagtttgctcttttgtacactctggattatgtctcattcattctgcctttattgctgatatgtgggcatatttttcttagcaacagcagaaccaagccagtttctggggccatcttgcaaaatcttagttcagatactgtactgccaaaatcagcaataatattaatataagaaacattatgaaaattttaagatggtgtcttgaatattcttccaaaaatattgtttcaattagtcaaaaagcacaggttcttgcatgggtttccctttagtttttagctctttaatctcagcaaattatgagattttgctccattttatgcaagagatcaagtttctattagaagttgttttttttttttttctgaaaagggccactatgagagataaatagcatcattcattcatttgtttgatcaaatgattagagatgaggaaatatgttaggaattttcatttcttctactgttacctcctttttggttttcttttatttttagagctgtgtatattaagcaacttcatttacctttggtccttcatcctgagcctggtgttggctagccaggagaattttatgttgtttttcaaaagcttagtccagattttgacagcttcttgcagggtttgatattgaaaacaaccagtgtttaggaataatttaggtgtctactaaattattgactactgctcaccaacttattcttttactaagctttgagtcatattttagattaaacatggttaattttttccattcagttcttaaaactttacacactgagttagatacgtggcttgagtttaaactatgtttgccataagtggagttcctggattactgtccagagtgaatttggactgtcgaaagatttatttggtggcagtatgctcagattttgaaattaaataatagagctagtattcaaaatgactttttttaatgtatcagttttttcaaaagaattattgaaatataattgatttacaatgttgtattcatttctggtatatagcaaagtgattcagttatacatatataatttttcatattctttccataatggtattttaggatattgaatatagttctctgtactgtacatcatgtccttattgtttgtctgttttatatgtagtgatttgtatctgctaatccccaactcctgatttatgccccccaccgtctttcctcttgggaaccataagtttggtttctatgtctgtgagtttgtttctgccttattcataagttcatttgtatcatactttagattccacatttaagtgatatcacatggtatttgcctttctctttctgacttatttcacttagtatggtaatctctcggtccatccacgttgttgcaaatggcatcatttcattctttttatggttgagtacatttattatgtgtaggtttttaatcatggtcattcagaccattttgaactgatacctcattatagttttgtttgcattttctaatgtgcctattggccatctgtataaaataacagttttgatgtttgttcaaaagatcagtgttgattaattctctgaaaagacatgtaattttcacattttctgtatgataagtggagcacatgtgtcactctgactgtattagagtcttttcttagcttaaaaatcctcattaatgacaaggaaataataatgcccaccttcaagggccactatgagagataaataagatcattcatttatttgtatgatcaacaatcatttgttaagcatcaacagtgcaaagtgctgtatgggatatgacagagaatggcaatggagcttataatctacttcatatttgttaagaatatagatgaatactacatggtaactaattgttgatatctaacttttgtctaaaacttgtgatctaaagtgtgttgttaaattactatttgtctgattttgaatttggattagagatgttgaagaatttctgtagatatatttgcacattaattttaggattgtaaagcagtgattctgaactctgcatattagaatgacctggggagctttttagtagctacagaaccagtgtcaggaggttgccctcagagattctgatataattgatttagggcaggacatggggactggcatttcttaggaagctcctcagatgattttaatgggcagctatggttgaggtgtactgctttaaaggtaggtatatttcatgagtgtttatacattgtggttaatgatagatttgctattgacttatcaggatatttagcttgatgtgagcgagagctctgtcattaactatggattgaccagttttgatgataggtttcagagtaaaatatgtggcttcaaagaatcagatatgtggactgtaggcatgactgccacggtgcatctctgtggccttaggtgagtcactttaccatgcagacctctgtattttcatctttaaaatgaggaatttggttaaatgtccgtactatcattcaacaattgttataatgtagtactttaatgccccagtctacgaactacctgttgccagaatggttccctggcctgccatattgttctttccctttcccatagctaatcaaaccagtggtggacacccaatcaaagtcggccgggccataatctgacgaaagacagctaactcactcttgagagagtctgagtaaagatatgaatgttattacagtctgtgaagcatggaaagatgaggaaggggtaggggagcttggtgattaccttgggccatgtgtagactgaggctgactgtgtaaagtgagacgaactggggtgggtgtgtgcagcgaagcacagatgtcctgagaatgcagtgagacgattcatgaaagacacagcaaagagagctttgtctttgacctcatcccagttccagtccccagggacctagctgtaaaattgctgttctcaggtatctgtgatgtggcctgctgtgtccttattctttctccttccttttactcccctcagtgggtttctgtccctggtaaccccatatgcttctgctgctgttaagtcacttcagtcgtgtccaactctgtacgaccccatagccggcagcccaccaggctcccccgttcctgggattctccaggcaagaacattggagtgggttgccatttctttctccagtgcatgaaagtgacaagtgaaagtgaagtcgctcagttgtgtccgactcttagcgaccccatggactacagcctatcaggctcctccgtccatggggttttccaggcaagagtacgggagtggggtgccattgccttctccatttggttagtagaaactttggagaaacaaatggggcaaggataaaaatagaaatggggtaaggagaataagcaaaatagtgcaatattgtagaaagaatgaggatagtaagttagagtaaattagagctctgtcccaaaatagctcggtgaccttatccaaggtacttgacactagcaggttggtctaaaatgggaatggtgcagtcccataggcatggtgtaatgaaagttagattacacttacagaaatgctttgaaaggtaaaggggcatgtcagtgaggggctagcaagttttgagatgtttgccctcagagacaagaggtaggacagaagagaggccgagttataaaatatgcctgaacgaccgagctttttggtatttgacttaactctcaatagactatttcttgggcctcccatgtggcggtagcagtaaagaacccacctgccaataaaagagacataagagacgcgggttcaatccctgagtaaggaagatcccctagaggagggcatggtaacctactccatggagatatgggtcacagaggagcctggaaggctacagtccataggattgcagagtcggacacactgaagtgaccgagcactcacacacgcaaactatttcttcccttctgtcaatttttaattttcacagcttaatttttcttttgctagttattacttcgttcttagaacttctaaatttttgttgcctaaattgtctgatagggttttttgatacacatttttaggtatagttcattttttttcccattaatttctgtagcgaatatgggtaaccattctgtgtattatgagttaatgataaagttactgtttttctttgggttcagtgaggagcaaggattgggtcatgcgtgcaaaggatttagcttgttggtttccttcttatcctcagttggcacatcctaaaatcgttttgttgtctcccactcagtgggcttgccagacagtgggaaaggtttacgattggaatcggaagggtgtccagagttcatgactgaggaaaattggccctgcagtgaacatacttagcctggcacagacaggattttcccatccttccttattactctataagataactttccattgacacagttgggtaattaagaaagagtaaaataaaaggatgattgggttggtagtaggtagaaggtgtacaaagtctttcctgtcatttatatacatatttacacttagtgtgataatttttcccatctggaagtactgttacctttcctaatatatttgggcatgaatatcattcctttcttggagccacataaattcagtttatatcagaagcaacattgggatttttgatagatttttttccctatgccattttcccttgcattccagattgttttctgttgctttagcagaaaaggaagatcaccaactgctgttcctggatctgacattggaccacaagtttcttgagtcattagcagcttttatggagttttctcattgccaagtatttaaaatttctttaagaggtattaagtttattatgtccagtgaagtatgagtggactatgcacacagcttctttttaaagactttctggcaagttgattagagtttatagaatgaagtgtagtggaaaatcagttattttcagagggtgcctttttttggttagtgttatgagcaaaaagtgaaaatacttaaggatcatagataaagttctgtaatagggcactggaagaggatcgctgactcgttcttttttcagaacgcattaactacagtaacttgatggagggctattaagtatttaactgctgctggaagatattagatgcttatcaacattgtgactgagtattgtttcatttaaccgtctgtccatgggttaatatagtatatgattggctcctataaacaaggaaaaaaaactactgaccatttgtcatcattgtgtaacagggcagcttcctaatttccctctcaaagaatcaattctccatagacttccaatcatcttcccagtgtgatgcttttgaaggcaatggcagcccaccccagtgttcttgcctggagaatcccagggatgggggagcctggtgggctgctgtctgtggggtcgcacagagttggacacgactgaagtgacttaacagcagcagcagccttgtggtatgtttttataaagtatcacttaagtactgattcattgatttattcagtaagtcttttcccttttctctgtagtctaaaatgttggtatctttatatccaaatgtgccagctattaacttactagttcgtgtggaaacaagtgcaagggactttcagtgcaagggacacactttcaggtgtcccttcccatattgaaattcagttaattttccagcaacagtatgtaataacacatacaaagtgttgccaactgaagatatttacctgagccttggtgtactggaattttttggggggtcatgttgtgcccctgtgactggtctcagttgctctgactttaccctactcctcccaaagctccaccttccccctcccccagcaaaaacaagtattcaccctaaatcacaaaagttagggaaaaaagtttaaaaaggtaacaaaagttaggaaacctcttctagggtaaagttttctggtaaactgtgtagcatagcccatggctgcaggcatacagagagagatgatcatgccaagacagtgtggcttaagacctcagacagacagttcagttcagttcagtccctcagtcgtgttcgactttttgtgaccctgtggactgcagcatgccaggccttcctgtccatcaccagctcccggagtttactcaaactcatgtccattgagtcgatgatgccatccaaccatctcatcctctgtcgtccccttctcctgccctcaatctttcccagcatcagggtcttttcaaatgagtcagttcttcgtgtcaggtggccaaagtattagagtttcagcttcaacatcagtcattccaatgaatacccaggactgatctcctttaggacagactggttgggtctccttgcagtccaaaggactctcaagagtcttctccaacaccacagttcaaaagcatcaattcttcagtgctcagctttcttcacagtccaactctcacatccatacatgactactggaaaagccatagccttgactagacggacttttgttggcaaagtaatgtctctgctttttaagatactgtctaggttagtcataactttcctcccaaggagtaagtgtcttttaatttcatggctgcaagcatgatctgcagtgattttggagcctcccaaaataaagtctgtcactgtttccctatctatttgccatgaagtgatgggactggatgccatgatcttagttttctgaatgttgagctttaagccaactttttcactctcctctttcactttcatcaagaggctctttagttcttcactttctgccataagggtggtatcatctgcattaagcacactgtgccaagggctcagaggttatctcctagaagccagtgaaaatcaatccagcagacagacctgcctttgaaatgtgcagggtttgagcaacccaggcctgctgagttaagtctctcctgcctgcaggtctagtaatattttatttgatgatcaccattgtgagtattacactattgtatctttggattttgttaccttaatttactcagggatcagattgattcttttgatgttgttttaatttttttgtgagagtagatcttgagtagtcttcctgtaggccttgtttattctccagaatgaagtctctactgaataaagcaggtgttggatgaagtttttccgctcgggcaggttggatcttgattgtttcccagtcttttgtgagctctgaaagctgttttgcttatagcttcctagtagatgttttttttccttgtagtcatactttggtagctagtctttgctcagcccaacagagtttgattctctgcatttgtgtattaactaaagactcaaggagatctataaggacattttctgggtttattattattattgcatagctccttcctttcctttactctgtcctacatattctacccacctgattatccccatattccaaactttccttctcagctcattgaggctctactctgcctagggtgcccctctctgtctcacagtctggaagatacttctaggcagaactcttaggtggttatatttctcatctcatttgatcctcttccttcaggaatcacagtcccaaattgcttattgtttattgactgaaaactgttgtttcatatattttgtctaattttctagttaattacaatgggagagataatgtagtacctgttcctctgcatgattgaaaatgaacttttttctaatgttcagttcagttcagtcacacagttgtgtccgactctttgcgaccccatgaatcgcagcacaccaggcctccctgtccatcaccaactcctggagttcactcagactcatgtccatcaagtctgtgatgccatccagccatctcatcccctgtcatccccttctcctcctgcccccaatccctcccagcatcacagtcttttccaatgaaccgactcttcacatgaggtggccaaagtactggagtttcagctttagcatcattccttccaaagaaatcccagggctgatctccttcagaatggactggttggatctccttgcagtccaagggactctcaagagtcttctccaacaccacagttcaaaagcatcaattctttggcgctcagccttcttcacagtccaactctcacatccatacatgaccacaggaaaaagcatagccttgactagatggaccttagtcggcaaagtaatgtctctgcttttgaatatactctctaggttggtcataacttttcttccaaggagtaagcgtcttttaatttcatggctgcagtcaccatctgcagtgattttggagccccaaaaaataaagtctgacactgtttccactgtttccccatctatttgccatgaagtgatgggaccggatgccatgattttcattttctgaatgttgagctttaagccaactttttccctctcctctttcactttcatcaagaggctttttaactcctcttcactttctgccataagggtggtgtcatctgcatatctgaggttattgatatttctcccggcaatcttgattccagcttgtgtttcttccagtccagcgtttctcatgatgtactctgcatagaagttaaataagcagggtgacaatatacagccttgacgtactccttttcctatttggacccagtctgttgttccatgtccagttctaactgttgtttcctgacttgcacacagatttctcaagaggcaggtcaggtggtctggtattcccatctctttcagaattgtccacagtttattgtgatccacacagtcaaaggctttggcatagtcagtaaagcagaagtagatgtttttctggaactctcttgctttttccatgatccagcggctgttggcaatttgatctctggttcctctgccttttctaaaaccagcttgaacatcagggagttcatggttcacgtattgctgaagcctggcttggagaattttgagcattactttttctaatgtagtgtttatgtaatagttaagatcaggagttgatgcagatgtcaagtttagtctccagcttttactatcttttgatctttggcaacttgttaacatctctctgacttggttgtcttatctgcagaatagacatagtcgtatctaagtcacagggttttatgagcattatttttgatagtgcaagtaaaatgcttagtatagctcctgacacatgttaaagctcattctatgatgatgatgatagtgatggtagtggtattcagctgtatttgcgccattaagtgagggtgttacatgggaagaaaatgctgttaggttagaaattcaagatgttgagtttcttgtggcagttaattgtccctgaagtgcgataggatcaaggagaacatggacattttccatccctctgcttgcagaactgtcgagaagttacagaaaaatgcattaatgatttgtaggtatggtagtcacatgagttgatgcttgttctgaaactgctcgtatagggatgcagaattcctgaagaaaattaacctgattacatctttttctaagctgattatatctttaatgttttatttcttaggctgtgtgataaggtgtgtttattatatttgtcttcatttggtacaactgatatgattcataattataaaaacttgtcttaccccttcacataatcttgacatgcttttttaaaaagctatagaattaaacacacaaagtgcagtatgatgggtaagataggtctcacttaggtcaagttttaaaatatgggcagaacattaccatgtatttataatgaatgtgggtttgtgtgtgtgtgtgtgtttcactgtgtgtgtgtgtgtgtgtgtgtgtgcatgaaaacactgaaagaaaacagcggtttcaagaaagcactttctttctaaggagagaattgggtgtgagggagaacaggtaggggtagaaaaaagccttgaattgaatccctgatgctttgtttctgacaagaattgaatcagatattggaatgacatctaaagatctgaatggtgcttacaccagaatttgttacagtctttgttcgatatttatcttaaaaacaaatataataacaacagtgttcaagttggaactaaaactctgcttcagtgtcttagtttatgttttatcaagactttggggaatgtttccaggaatatgattacaaaactagatatcgtcttactgcgggacaattgcagaatataaggttaggctttgaggccagaaatattgctccatctgtgtatatacttgcagaagttattgttaggataaaatttgttaggtaagtgtacctcagtgtgaattttcggtattggagtacagggactcagtcctgggccggtccatgcgctccatctaatctcctctcctctgagcggttagaatcttcagactccgagttggtgtctcactcctaggatgtagtctgtacaacttaaagggacatatgaaaccccccaactccctgcgtgcttgtgtggttcggtcatgtctgactctttgcaaccccatggactgtagcctgccaggcttatctgtccatggaattctccaggcaagaatactggagtgggttgccattcccttctccatccaattccattgcttctcctaaacatcatctactgttttttttttttttttttgccatccagccacactttgcttgttttcttcttcttctttttttggttatctcttagatttcctgttcattccctggcttgacatgtgactacttcatctatttccacttaatttcccccttcatctgtaatttcttctctgtttctctcagttttcttggctgactcccttatacatgcctcaggtctttatgtatgtatgtgtgtatgtacctatgtatctatccatttgggtttccctgatggctcaatggtaaagaatgtgcctgcaattcaggagactcaggagatgcaggtttgatccctcggtcgggaagatcccctggaagagggtgtggcaacccattccagtattcttgcctggagaatcccatggacagaggagcctggtgggttacagtctgtgaggttgcaaagagtcagacatgacttagcgattgagcatgaacacacgtctatctgctatctgtctgtctaccttctttaatttcttgcctccctccctccctccttccatctctctctcatctgtctgctttctataattccccaagattaatgctcaccttctgactgttattactttcttattcatcttccagcttagattttaaactccactaaggagagaccatgtttgttttccttttccagcacctctgtagtatgtatgtagcgtctggtgtaacgtagccactaaataaatatttgttgaatgaatacatcaatgaagtacagtttgagcttttggctttcatattctcactagatatttaaagttctttaatggaaagtactgcattttaataaagtatttgtgaatattttatgactattttcataaaatattaagagcatttggagtcaaaggtatattttaaagtcagagcagtaatattagaatctgtgggcattaaaataggttaattttcttttaaaaattgatttttaaattttctaacaactagcacatggtttggaaaaaaaaatcaaagaagagtgagtgtttcaaatgaaaatcagcattcatcagctttgtgttgtttctaatcctgtgatattaatagattaaaatttcagtaagattcaccttcaagaagaaatagatatatatgtatgtacatcagaagactgcagtgttctcagaaatgtgactacagttgttcagttgaaggtatgatgggaataaacagttcatactgaagggactttttaagccttgatttgtttttttttttttttaaatggcatatgaagggcacagtgcctcttccagtgttagcttgtgtttcctttaaccttcttcttcaaaggcccatcctaaaaaagattcagccctggttttttttgccctcctctctttcaaagacagtatctcaaaaatggtactaatttaagccctgctaaatgtccagatgcagcacctgggaaaaatgaagttcagaagttcaggatttggaacttgcttaagctaggagaatcttcttgctgtggttgcatgtctggttctagaagctggtaacctctttctcgtgggcatcgttccattgtaacagatggccccaagtgtggacgtgtcagagagtgaagcccaggtgtgaacttgtccaagaagttgaaacactgctcagaatatctctcctcccaatgatagctttgttgttgcaattagaactttctggattggaagagtgaacttaatgaaacataagagaagcctttagagctctgttgtccaatatggtagcccaggccacacatgactcttgagcacttgacatgtgactatttcaagctgaggtgttctccgagtataaaatccacacctgtttttgtaaacaaaaacataaaaacatgtaaaatatcacagtagtaatttatatttttgattgatgttgaagtactctttggggcacactaggtgaaataagataaaattaatttcacctgctttttttttaaatatggtgactagaaaattttaatttacatatgtggctcactttatatttctgtttggcagtactgtttgggctagactcttaaccagggatgtacatgaaacttgattccatttatactttgacatgactgtttagtttgatatatgtcagttcagatctggaatgaaaatcttggactttctacatttgtttcttcataacttgcagtttaaatggagcagtaaaagcaggagtaggatttttttttcagttgtacaagaaatttctagagactaagagctttgcagagctaaaaattcattcccattgttttatttttaagctctattttaagttcctgccaggacgaaaatgttcattcccttttgggttctgatggcctggtaaaaacttctttgtaaacccaagggatgtgatggaattggcacaggagaaaattaatttggttgggatccatgagtggaatggaggtaatgtgcacggcttgcggagtccatcgtcatcaatcactgcagagcccctgcagcaacgccgggctgcctagcacccggccccttggacagcagcagggcaagatacccgctttcccgaagagccctactcttgtgccgtagagaaaagtgttaacgtagagtatgtgcacaatgatgagccacacatatacacattcaataaagttgcttggcatctattcctgtgtgggtgcatttttctggaaaaatgttaaatggagttttccataacttttttttttctctcctaaagtgtgcattgtaggatattttccaaccccacatgtttccagtaacttaagctcaaagctcatagcaatgaggcactttcttgtcaaaagtgagtcaaaaacaggaaccttttaattctgtcacatgatgccggatgttataaaacagtaagagcaaggagttcacttttcccccttctcaatcctcagagttttagctgcttgccttcttcaccattgaggaagccaggaattcagaagtgtgggtcggatattctccgtagaaaatgcatttaggagcgtacactttaactggattataaatagtatctgccctgacaatgctgggattttctcagcttctggagacattgaagtctttgtttcatgggtcactgctctctcccccaccccctaagcttgagtcataaagcttgacaaattaatgaggttgctgaaacttcaaatctagtgggtaggacgtatgggaaacaaggagagacggcagcaaccatacacttggcctcaagatggcttctctcttgctgtcctgaacttgctcgctttgccttttattgcttcaggcccttgaatttattgtttcccttcaacaggatcaacttagattgaaaaaattagaaaaaaagtgtcaataggtagcagcaagactaatattagctcctgaattctctatttagaatagaaaagaaaaaaaaaatctatccatgaaagaagtacaagccagattgctttgatcttgtgtgtgtgtttgtattagctatggaactaagaatggtttttacagtgagtacttgttctcaaccacttaagggaaaacaaaacaaaaaaataggcaacacgaagtctaaaattactagtgactcttggtttagaatgtgtttgctgtgtaacacttgatactggatatataatcaatcaaattatatatatataatcaatcaaaagccaatataaaaattcctttcttgggttgtgtcagttcaccgaaaagatatttcttgagtatttgtttcattcctagcactgtcctagatactggggaaataaagtttaaaaaaagagagacattgctaccttcacagagcttaccttcctatggagaaaaaaaaaagactaaacactaaccaaatctaatggaaataagaaactggacaacggagtctcaggaagagaaaacagctaagtgaggtggagagtaacagagcagcttctatgcgtctcagcctctgttcttccttccccagactgtgctgcaaaacggtgacaaagttatttcccagattttgaattcacccccgacccactgacataaaacattctttgcttgtccctgtgatttccttactagtctgttttatttcttttcaaaagtctctttttgccccagatgaaattgattattcagctcaggcgtattgagtcctaaattaggttgatgttcacaggaagtacttacgttcattctgctttttcagtcagcttttctgcaccctcctacttaagggtagttgcttgtatgctccatacagttctgttttgaaccttagtcttagatgcttttttctcccctcttctggagaggtttatgattattttatttctgttagcatcagggtctttctccagatctgatgttccctcaaaagcctgcatgttgtgatctgtaccaaagtgagttattggccagtgtttgctcatatcctttattttgaatctttcctgttgttggaatcattcataacactacctgatcattaatcctctgctctgaggatatgagtatgatttttttttctggttccaaagatgcactccagctttgcattttggttggcaaaatgaccagagcttggacaaaaggccatgagtgacacacaaacacaggcctgaaatgatcatattacagaacagttaccacgttcgtgtgaatggctaagcaaaggtcaaaaatatgagcaacattatttatggctcagagagtgatttgatattcaaagtctgtcatcatttttcagaagaatggtattagcaaaactgtgccaggctaaggactctctaaaaaatgatttgagacaagctcagtatacagtaaaaaagaaaaaaaaaaaaaaaagacagtttaggtgtatcccaggagacaagaactctgcacctgatgtggaagtagttctgttatcctgctgttgttgtcaggtttgtttgcctcttgacaaagaatttttccttcttccagatcagttttgtcacctttagccagggcagttcttacaggatgaagttagcacctgtggcttgcatggacagtgctgggttatgagaacttactgcagttgcttgctgtaagatgtgttctagttatcagtttattgtctctgaggtcgactttcaccctttattgcctgctgtgtgaaaatggatctggactctgcagatgtttttcttttgccagttggcatgatgttcagctttgtcaggagagggcgctggagagacgttgcaaggtgaaggagttttcctttctgcagcaggtgtgtctgctcatcacagtgtctctggtgggccacctctctgtgaatagtcttcccaggcactccagaggatggagttcaataagttctgtaagtgtaggaccacagtgaattccttcccatgctgagagctcctggatctcatccctggggaggaggaccctgagccctaagggtcgtgacggctccttatgtctgctattcctatattagagtttacttcttattagctaattctctgtgatagttaataattcctttcttcattcaaatttctctggtttgtctcctgattggatcctggctaatacagtgttctatcatcagaattaggtttcattcttgcactgcatgaagcaggtaggtaggagagtctaatgaatttgtacaaaggagcatgaaatctgaatgttataagctattgttactttctctgtgttcttctgattgaatgaccaaatcttaggaaaaactgaaagtctgcaattatctgtggtcaaagtggaggctgctggtgccaatgtgtgctctcagtcgtgtccaactctttgcgaccctgtgaactgtagggtgctgatgatcctagagttaaaaatccacacaaggctttgttggacctgttggccattccgctttgtgtgggagcttcaggatatgtgaacaaggctgctgtgggacccagtggtgagtggtttaattcagtgcctggggattgtctaccgagctgtaatatctacatggataatcagaggtctgcttccttctacccttgtatcatgtgatagggttgcaagcggttcccattttctgagtgaatgctgcatcagtgtgatatgagcaagagtacagctcagggggaaaaaaaggactagaatgaggtgccattgaggattattgggtctgatttcttccatttttggatgaggaagctgaccacaggtgaggttaaatgccttcctgtcaagagtgtgcactgagacagcaggggaatacaccaagacagatttttttttttaacttctagtcagttgttttcccccaactccaatttatttactttcagatctctaatgatttttctttttttaaataattactttataattgaagtacagttaatttacaatgttgtgttcaagtgtactgcaaagtgattcagttatttatatatatatacatatgcattcaggttattttccactaatgggttagtaaaatatttaatatagttccctgtgctatatagtaggtccttgttgtttatctgtttcatatatatagtagtgtgtatatgttaatcccacattccagatttatcttctcctctccctcctctattccctttggtaaccatcagtttgtgttctgtgtctgtgagtctatttcttttttgtaaataaattcatttgtagcatttatttttagattctacatctgagtgatatgtgatatttttctttgatttatttcacttaatatgttaatcgctagcttcatccatgttgctatagatggtattatatcattcttcaaattatttattttcttatatttgaacttaagatttctaaagcatgggaaaatatagagtgcttcattaaagaatatttgagtctaaatacattaaaaggataaagtagaagatgccttaaggaggtgcatcttcttttgataaaaaatattttattgaagtgtaatgtatgtagagaaaagcatacttactttaagtgtatagaatgatggcttttttttggtaaattgaactcctgttatccaggtctcaggtcaattaatcagatgatatctgcaccccagatgctcccttcttgtaccctttagtcatcaccccgccctatagtagccaccaccctgattcataactgcacagattaattttgcagttttgtgctttatagaaatggattcagtcatatttaggcacttgcctgtgcctggcctttattcatcatgattatgtttgagaaattcatctgggctactgtgcatagttagagttggtttttttcatgattatatggtattccttcaaatacatttttttttttttttgaggtttacccattctcccgttaatgggcatttagggagttttttagtttggggcatttacaagtatgaacgtttgtcttcattattatcttttaatgttttgacataagaagatagagaagtgtgaggtttagggcaaaagcttgaaattagacaaacatactaactttgatcctagtcaagttatttacatccttaagtctgtctccttatttgtaatgaccatcgtgactagtgtttcagaattttggaaaaaaaattgtgtgaaatgatggatgctctacacagtgcttggtatataataagctctcaaagaatagaagttgttagtatttttcaagttaatgttttttaaattgtaacaaagcatcaagataattcactgtctgcattctgttgcttgtgcatcatgtttttcagagcttgcgcttgtttgtttgcatcttctttatcttctctcttcctttctccacgctatatgcattgcctgcctgttataatccaggtgtaggggcagggattgaagaagagtttttagcagatttcattcttgagttatcgtctcagtttttgccattgtaggctcaccattagaataacatttgcttttttttttttttttttttgctctgcccaaagatgcaaaatccttgcaataagaggtttgtatgcctgagcctcagtgacctggaggaaatgagaaatcaacagtttccttctgtagttcaataaccatttactcttcctgccagatgatatgatagaaacgctgtggatcttgaaggcaactgtcttgaatcccacctctagaaaattcctgttaggagtaccgtcaggattgttctcgccttcatttataattggcccaaaggtagagtctacttgcctggatgcctcgtcagtgagtactgactttgggtttagcctcaaataggctttcctctggaatgtactaatccaatgtttagttggacttgggggacaatcattaactcatcctgatttaaggaagctttgtgaatgactagaaatttcaggattatgtttatatagtttcaaaggtcatatttttagacaaaggataatttaagaagattggctagtatccctcatcagtcttaagctattttaatgaaaacaggaaaggacagcctgtttacttcttaggagtgtcatacatctgttttgtttataaattatatttaatcctattttatttagattatatgtatgtatatatgataattttcaaataggtaatgttaacaaacttaaaataggttaaggaaaatatttgtggcccaatgtttttttggctaaatgttttgtttatcattttagtagcatttttaaaacctctttatactagtttggacaataaatatgtttctgtaaagctgcagatacaaatatagaagataaatatataaagacaatattttataaatggatttaatgtaaaatcaccatcttatttaaatacacgaaatacatctcattataatcattctacataatataggatctgttataaagtgaacaatctgtttctaatttttgtgcttaaatcttgggataattttaagtgaggtgtagtcagcgttttaatgtattcttggagttagatattatgagcaacatggacttgttaattttatttctagatagttgaaataagtatctgacagaaatgtattaagaagcagaacagttatttttctctatcagctgaaaagcaaatgcattattagcatctgaattgaatgctggaatctccaacatacatgtatgtctatctgtgtgttttgtgatctgagtcttgctactgaaagtataatccatggattagagtggttcatgaactgcatgtcagacatcagtgaactgtgaacaggtattgagtgttcaaaaacctttatagcaattggagagagtgattttaggtctcttgcttctcatacggatttgggcttgtgtatttgtgtgtgtgtgttttgtttttcatttgtcttagaattcaattttattgtagtttacaaaagtattggtctgtgttggatttgaaataaaaaaaaacaaaacagataaagtgatgcaaaccacaaattgcaaatggtttgagaaacattggtgagaaacctccatgagaggtttctaccaaggcagaaaggtggtacaatttctaatctttaaaaaattaattaattaattttaattggaggctgatttcaatattatggtggtttttgccatacattgacatgaatcagccacaggtatacctatgtcccccatctcaagccccctttccaccaccctacccaccccatccctctgggttgcccagtatactggctttcagtgccctgtttcatgcattgaacttggactggtcatctatttcacatatggtaatatacatgtttcaatgctattctctcaaatcatcccaccctcgccttctcccacagagtccaaaagtctgttctttatatctgtgtcttttttgctgtcttgcatatagcgtcatcgttaccatctttctaaattccatatatatgtgttaatatactgtattggtgtttttctttctgacttacttcactctgtataataggctccagtttcatccaccttattagaactgattcaaatgtgttctttttaatagctgagtaatattacattgtgtatgtgccacagctttcatatccattagtcttccagtgtacatctaggttgcttccatgtcctagctattgtaagcagtgctgtgatgaacattggagtacacgtgtctctttcagttctggtttccttgttgtgtatgcccagcagtgggattactgggtcatatggcagttttatttccagttttttaaggaatctccacactgttctccatagtggctgtactagtttgtgtttccaccaacagtgtacgagggttcccttttctccacaccctctccagcatttattatttgtagactttttgatagtagccattctcactggcgtgagatggtacctcactgtagttttgatttgcatttctctgataatgagtgatgttgagcatcttttcatatgtttgttagctctctgtatgtcttctttggagaaatgtctgtttatgtcttttccccactttttgattgggtagtttatttttctggtattgagctgcgtgaattgcttgtatatttttgttattaatactttgtcagttgcttcatttgctattattttttcccattctgaaggctgtcttttcaccttgcttatagtttccttcgttgtgcaaaagctaagtttacttaggtcccatttgtttatttttgcttttatttccattactctgggaggtgggtcatagaggatcttgctgtgatttatgtcagagtgttttgcctatgttttcctctaggagtattatagtttctggtcttacatttagatctttaatccattttgagtttatttttgtgtaaggagttagaaagtgttcattcttttacaggtgattgaccagtttccccagcaccacttgttaaagagactgtcttttctccattgtatattttcttacataggcatgatttaggacatggaatgctgagctcttgttgcatcaagcttttctaatccctagttaaccatatcccctaacatttccaatgtagctgttctgtctgtttaattgtaatgttttgagcctctgattttttagagtgatttgcaaagaagtatttatttctttgcaaataaattcaataaatttatttgcaagtaaattctttggacttagttgcaaattatttgcaactaagtccgaaaaatttaatcattcattcagacattttttatttattgaacatttaactgtggaccagatactgttctaagcattgggaattcatcagtaacaaaacaaaatggaacaaaacaaaaaacaatttctgttctcttctagcttatatgaaaagaattggaatatatcaatatatgtgtacacatttgtatacacacacagacacgtatgaactgcaaggcggttgattgtgtccaagtgcacccagttccccttgggctatgactgcatgcattcctctactctatggatattaaggtcactattgatgtagttttgtgtttgaaccctgtgactaccagaaagtccccaggggacacatgtatttggcttctctcagggctcttggtgcttgagcatgacctccccaaattggtgaggataatgaagcaagcaaagcctcagagcctggaggaaccttggtgcccattgtcctgaaatgctgtccgcctttgggatgtcattaaatatagagtttttccaagctgtttctttgtttcagctggaggaactacgatctcctgtaaaatgttgttcagatccttggagtctaagacagagatgtcagctttctgaaattaggacaggtgtctagggtatatgtactttttgggatgaggtcttctagctttcttcagcttatacaagtaattcatgaccctcaaagctgaagaatcatggatatccagtggccaagagccttttgcagtttggatcctgttatttcatctggttgtgtctcttcttttctcccttagtcttttcctgcagtgactagacctgcttcctcactgtggctccagtgtggcctggccccacctgagatgcttgacctccaaccatccacagagctcatctcctctcctcctttaagcttttgccctattgttacactctgggtttaccctgactactgttcaaaataacatccctctcctgtccctatcttggtccttagtgctttatttttatcctggcagttgctgtctttaacagatgttgctgtctttagtgtcttagatgacttggttatttactagctttattgtccctatgccctttctcacccaaatgttgcatagaagtagaaacttttgtctccttgttcacggttgtatagtgacttccctgggggctcggacggtaaaacatctgtgtacaatgcaggagacccaggttcgatacctgggtcgggaagatcccctggagaaggaaacagcaacccactctagtactcttgcctggaaaatcccatggatggaagagcctagtaggctacagttcagttcagttcagttcagtcgctcagttgtgtctgactctttgcaaccccatgaactgcagcatgccaggcctccctgtccatcaccaacttccggattttacccaaactcatgtccattgagtcggtgatgccatccaaccatctcatcctctgtcgtccccttctcttcctgccctcaaactttcccagcatcagggtcttatcaaatgagtcagctctttgcatcaggaggccaaagtattggaatttcagcttcaacagcagtccttccaatgaacacccaggactgatctcctttattatgggctggttggatctccttgcagtccaagggactctcaagagtcttctccaacactacagttcagaagcatcaattcttcagtgctcagctttctttatagtccaactcacatccatgcagttcatggggtcccaaagagtcggacacaactgagcaacttcactttctttctttcactgttgtatccctggtgcttcaaacagtatctaacacatagtgtgtgttcagtgtatatttggtatacattgaataatatgatgaataaatatggaatctgattcttcctttcaaagtatacaacatggagtttcagttcttccagtttagctgagattccttgtgttgctctatgtgtatttcagtcctgttggttgtggtttcatgaatctcagttcttacgttgccatatattaactttcagtgttttcaatattttatttttctttccatgtgtcagttattcccatgaggcagttttgtctttttcttactgattttcactgtttgttgaatcttattttatgctggaccctccaagtgttcatggttaagaccttagacaagctagagaggccagcaatctctgtctctcagtttcttcatccgtataatgggaataacaataatatctaaccttttaagattgctgtgaggatgaaataagatgatccttgtaaaatggaaaacactgtgtctggcataactattgattgcattaattctgataacagtgtaagtatattatggctcagcataatgtctgcatgtggcaggaacaaagtaaatgacagttcttaaagttattatgtttttccctcccattgttaccaccactaatccactaatgatgcagtcccagacaatcatcaaagagcagagcattaacgttctagagaaggttaaaggttgtcctcccttctctttttctctttttcttcctctttattttctatacactgtttgcctacgctttccatgtgatggaagagctttcaggtttgaaatttattcttcactatgcaaatctgatcttggttgtcaccatgataacagtactcagtctttttttggttgacattctatttgaatggatagtaataggtccttgagatgtatttccacatacgtatttcacaacagttggactttctggcaatggtttcattttttttttctcttggagggcatttcaaggagctgccttgtaaactctgaatgcctgggttatttgcgttgtgtcttttcatcctcaatgctgagttaataaaactccctagattcgattcttacaagtaatcaaccagcaaatgtttattaagtttatatatggaagacttttgtagctgcagattggcatggtgaaaggtgagctttaggaagatcagtctgggggctgtgtatgtaagtggtggtggggatgttgcaaatccagtggagaagggaggaaggggctatattgtgggaaatggtgagaaccaaaagtgtagcagtgaccttgggagtggaagaggaggtggtgctctgggcgtgtgtatttctgctttcttaggtaccaccaacaccctcccagggcagttgccccaactttcatttctaccagcaggggctaagagttctcagtggcccctgttcttgccaacacttagttactattgctgcataacaaatcatagtaaaacacggtggttgaaaataataactatcatctcattatctgtcatggtttctgtgggtcaggcattcaagggggctgtcctgggatgtcctggctctggacctctcatcagcttgcagacagatggtggctgccagactttctgaaggaggaaaccattggtggtcagcgcatgtgtgaaagtgaaagtgttattcgctcagtggtgtctgattctttgtgaacccatggactggagcctgccaggctcctctggccatgggatttctttaagcaagaatactggcttgggttgccatttccttctccacggaatcttcctgacccagggattggacccaggtgtcccacattgcaccagattctggtggcatctgaaccaccatggaaaccccatcaatatataccttttctaacaatctcttaatctcaaggcatagggccagacaaaggtgagtcaagagatgaagttctgacactgccaaggaataaatgagcagttattgagtatcaaccgggcacagtcttatgcaaactgctctactatgatgaggttatttccttcagcatgatctttcctcagtttgcttcctagacaagcctttccttaagaactctatatttaaatacatgtccttctttatttccatcttgtagttgatctttagttgctaagtcgtgcctgagacttttatgaccccatagactgtagcccgccaggatcctctgtccaagggatttcttaggcaacaatactggcgtgggttgccatttccttctccaggaaatcttcctgacctggagatcaaacccgtgtctcttgccttggcaggcagaatctttaccactgagccatgagggaagccatttccatcttcattgctcaacttatcacctccatagcccttttttttctatttacactctgtgtgtagttgtttgcctatttattacctcacttgccttcctccactcctgagtgctagactgagggttcatgatgacaaggactctgcctctttcatatacatcacatatatccagtaaaacttgagtttcagatcaaaatgagtaatattttaatataaatctttccaaatatgggacatataaaaaatgtgagtatatctcaaatacttaaaaactatatctgtaaaaatgtatttctcaaatgtggaacatgctatactgaaatatgtctgttttatttgaaactcaaatttaatctgatatctggtagttttatatgctacctttggccactgaagtacttggtatttagcacagtttgtgacatataatagaagctcaaataaatgtttgagtcaatgaatgagcaaatgaaagagttcatatcttttttcaggaaaattttttccagatagatattattatttaaaaaaaataataaaagggaacccttctacgctgttggggggaatgtaaattgataacagccactatggagaacagtatgaaggtgccttaaaaagcaaaaagtagagctaccgcatgacccagcaatcctattccgaggcatatacctagagaaaaccgaaatttaaaaagatacatgcaccccagtgttcgctgcagcactgtttacagtaaccagggcatggaagcaacctaaatgtccatcagcaaaggattgcacaaagatgtggtccatatatacaatggaatattactcagcaataaaaagaacaaaatcatgccatttacagcaacttggatggacctagagattttcatattgagtgaagtaagtcagagaaagacaaatattacatgatatcgcttatatatagaatcttaaaagaaaacccaggtacaaatggaacttaaaaacaagtagaagaacgaatgtaggaaacagacttatggttagcaagagatgacgattgagagaataaattgggagatgggaactgacatatacatactacatatataaaaatagataacaaataagaacctactatgtactctacttaataatctgtaatggtctgtatgggaaaagaatgtaaaaaagagtgaatatatgtataactgattcactttcctgtatgcctgaaagtaacacaacattgtaaaccaactatgctccagtaaaatttttttaaaaagaaaataggatttgtgtttgccttaattttttagtgtgctattgttgttgttcaattgctaagagtattgagtctgtactctcaggaggcactcaatatatgagtgaattacagcttagttctctgtgtggtgggatttttacatgtgactttaattttattcataaacattttaaacatttcttaccatgagccatttttattaaaaaaacattttcaaaacttggtaagtaactggaagaaaacctatagtgctggaatcctttatccacagttccaaaatttagaagtttctgagtattgaatgatttttttaaatctcatttagaagaattacctgacctgaaatgacacgagggtatttatagtctttattatctcacttaattgaatattcatattttctggcagaaatattagtacatttgattatgagccattgccctaatctctctagggatatcacactctgtatatactttaatgtgttacaaaatctagaaaattctgacatccaaaactcatcagtccccaggagttattctgaagaatgtttgtgtgtgtgtgtatatatacagatgtgtactgtgtatatagaaatttctgaaacgatacattgaatattgttaattgtgattatctctaagagaagggattggatggggatgacagtgaaagatgaatttatgcttgattatcttcttctttagtatttctaattattataacaaagtgattgcctttttcaatgaaagagtagaattgggtggaggttttatttaggaaggtagtggtattattcatgttaaaggctagtttatcaaacaggctatgcctttacaaattagttcagtatttctctctgctggcagggacccagaaaacgttatgcacacaccatgcagcctattgccttttggataatgtatacatggtctagtgacagagaatttacatcagcaaaaatactaattttgcttaaaaaaataaaatcaaggcactcaaaaatgtgatgagtaaatgaatctactgttattagtgatggttttggcacgttttacgaagtctgaacgattactcatcctctgtacgtttgcagaagtggcttcaacaaaagccagatgcatacgtactagcaggggtcagtaggtggatgagaggattaaaccccgtgagtttttggagccctggtttgtagctgtttttggcttgtcgacaggctactttactgagtcagcctataggatggcttcccagggtaagtctgattttgcttttctgagtttaaaatatacgtggtcaaggagagctgactcgttgccttttgcactggattgcttttgttaacagtgcctgtgtttctttctgtgagaaagacatttatcttattccagcatattctggtgttcctgctactggtttttatggctttacttcacctccctgtagtttttaaagtgaaatgtcttaagtgctgaaaggatttgcaaggggaattgcaaaggtcatatgtaagttctacggctggcgtatggagagcagtgtgattgaaccagagccctcagtgaccctttcttttcaagaggatgtttctaataaattagcgtagcatgctgtatgtgcctgtttatgaccttaaaaatggtttagttcttgctgagtggctattactgatgctttatgacatgttataatggtttcgacttgcacattttttttggattaaaacaatgtcatgcatcagtcaatgtgaagttcatttttcctttttttttcttttaaagggactcaggagaacattcaacattagaataagtccctggattctgacctcagagaagggttggttcttgaggttagaagaagtaaggattcgccaagctcttacaaatgagctttgtagtagttgctggtgaaattataaaacattgcttttcccactagatattaaatgccccttttcattagctgtagtatggggaacaaaagcatgtgatttttctttttttaaatgtttaaccgtagctacttttaaaaggcagttttcattttgtggctggttattttttttgtttttttcttccggtatctagcacagttaaggactttatcttttttgtatctttttaggacactctggtgaatgatggggtctgaatagctctcttaatggaggagggtaccgacaagcctgggctggaggggctggaggagcccagttgcatctctgcccggcctgcttgtggctatattgcccatgtcccttcctctccagctctcgggctggaggaggtcactgtgatgtgaggactggggcatgtccggggctgagagcttttccgagtggcagagacatctctgtgggctcagaaggcgatgtgcctcaagatttctgtccattaatgtttagtacccatgaaggggaaaattgatctgctctacatataaccctttctcaagaaacactgatagataaaaaggagtaaaggggttggagttgattttttttttaaacatgcacattagagctttaaaaaaaatcaaagcatttatgttcttagtggaagtctgaaacctcgtgccaagggctgcatggggttggaggttaatatggcccatctttttcagagcatccatagttctcaaatatttgggatacaggcacaaaagcctcaataattcaactagtcagtaacttaagaactgtttcctgccgataaaagcaaggagatattagagagcagaatgtgagataaaatgtgaggctgcctggagacctctcccttgctgatgatggtggactcagaccgttctcctaggccttccttccaggggcttgcaaggatctggctcaaaatgtgctttggtagaaaagttatggggttcacgtttgtccctttgtaaacgcagtctttccaagactgcttctatgggtattcaaggtgaattggtatgaggtttgagaaaagcctgggggcgagctggaatatttaatccaccatgtcacacacacatgggtactttaaaaggaacaggaatcttgactagaggcttagctcactaccacctggaaatggctatcataataagacattggtcctttttcaatgagagagacagagaagcatgaagtgtggtaaagactggcacctgagtatgtaaccctgtgacctttgccaatgttccctccctcccctggtgtggaacctgaatagtggtttagctaagtagtcaattaaaaaaaaattataattgttttattttaaaaatgttttatagataggagtaaaatcagtgatttcagagcacattatgtgtctggattatctcacctcttttgagttttgtcccttgttgccctcatttcttagtctttctcagcatctcatcaactgacaagatgcaaccccaaacagctttccacacctagttgcttgttagctaattcaacttaaatatatagaatgacatatatgtttcaatttgtgggaaagaaactcaagaaaatatatacatatacgtacacacacatatttgagcacagtctttgatgcacacacacagatatttaggtgtatctgtatctatctttatcttccccgtaatttactcaactcttaaatccatcatcacacacacgcaaaataaaatcttaaaataaccttcctggaagaaataaagagggaaaattagtaggcagtcttcatgacattttaatatgtgtatttactacttagaaatattcaaatacagctttgttttgtatcattaattctggtggtacaatatttgaaaaggtgacagatacaagggcagaacgcaattcttaaagctgtaatttgcagccggctgataataacaagtccattttcttttccaaatgtgctatttatataatttatatttttaaccaatcttagaactaggtcaaaaatagtaattaatcttaagggtaagaaatgttgcaactatgccagatttggaaactttaagaaagtctctggatggctaagcccaatctattgagtattctaatttgcatgtaacacattgctcagcagatagtgcgtgctcagttaactttaaataattgagtcaacttggccacactttgttttttttttttttaaagaaatgtacagagaggcctggcgtgctgcagttcatggggtcacaaagagtcgaacacgactgagtgactgaactgaactgaagcatatttagttaagaagtggcaggccagttttaaagcctagttaagataaacaggccaggcgaaacagtgcatgtggcaaggatagtggtgtttatatgtgcaaagagaaaagactgaaaggaagaacatcgaaatgtttacttttgatgatgaatgatttctattttttatacagtttttttgctttcatgtatttttccaaagtgagcacatgcatcctttgaaatgtagtcgtttcatggcacatattaggccttacataataatttgttaaatgctgagttaatttataatgaaaatgatacacatcagatgtcagtgatgttgcctggagttgggcaacacgacagctttgaggaaaacttacattctagtgaaatcattttttctttctcgaataacatttagtatcccagtatgatttgctctaacaaaacatacacgtttctaaaaaagacttaaacaaacaaaaaccactagataatgggaaatcatacaatagatagtacagagtctgtaggggcccctatagtctataggtgcacaatactcaaaaacttcgtcaagaacataaaggaaagataggaaccttagaaaaacagagttttacacttgctaaatggttaagcagcatacaaatacaatacaacttctcaagctttgccttgaaaagacctagtatttttttgtgaagggagttgcgggaagggttgcagcttgtatactctagtgaagcggtataagtaggcttgtctgaaattgagtgggaagttgtagcaaagtactgggtggttgtggtctgtaatacacatggtaactgaagtagcaggcagatgtttgcagtatgtacatcttgtgtatttgtacactacttgattcagcagggtgtggttttctgtgttcacttactgttccttggtgaccaaaccaagttcatgtgggttatgctcaaattgccctctgatgtatcagtcatgtttgagcagatttgcattttcaaaatgagcatcgtaacagaactagctctatatgaaatagataaaatcaagttgcaccagttctaggcatgtcaagagcctactttggaacccaactgcccttttagcaccccagtgattccggggaccatcattgtgtggcctagagattgtgtgtccttttgttcgtgacctggaagagatataggacaatttgttgttttttttttttttaattactttttttgtggaaacattttgttgtaccgttgtatccttccttggcttgtggctggtaggttcttcaacattcgcaaacttcagtcctattactagatagactatctggtaaagcaaatgaccttgaacttaacaggcacctcattccaggtcctcaccagggaatctaaccttgtacatgatgctactcaatgcttctcaaattgcttctgtgaaaaaccaacatttatggattaccatctgaaggatagaggttcatctgttactctgaatactctgaaacaatgaggaaggagggcagtgtcgttaaaaaagccatttcataaggtaacttttagtttgatttgtcaaataacataaaagaaaagcatgatagttttatatttatcagaaagattcattggttataaagtaggtaagggcagtctactgtaatatctgtacctgaaataatctagactagcagaatctctaaacctgagaatttgtcctgcccccatttccccgtcaacctcagcagttagttttatttcacgacacttagtatttgatactcttaaccccccggaaggtcatcatgaggtataacccatgaatcctgattgtatggggtggttgtcttgtggatggatattccagtgtcttctttatgaagattcttggaagaagtgtctctctggtttttataccacaaatgactgtacttctactcaactttgggtttttgttttatggatacagttagtcatgtaactgatcatgtcttcttcctctttatggccacaggcatgttttctttaacccatactttttttttttaaccaaaagaaaaactagtttgccagaactggaaaatgagatttctcacaagtttgtttggatttccagcatttactgaaaaatcagatctggcagtcctgggatcacgtgtctccatggcaaccatgggatccaataaagtaatgccatttcccttacaacagagcaggcactcttacctttgttttacctccttactttaactgcccggcctgtgtagaccttggactctgcccggtagctttgaaagcaatttgtgacttacctttagaaaataggcaggttcctctttgccttttgggagctaatgtattcctagggtcatgtaattttttttttgaattttctttcatcttgttttcttcatccatgcacattagttttctgttgttttatattgtggggttgtgtgcttttatgtaagctgccttgagtctttgacggggggaagaaacaaggtataaataaagaaaaatagaagagtgactttccccctcagaacatcttatttttattttttgcctggtaagaatttaaaacaatttcagctcttttctgacctattttagaatttccttgattctagtaccattcagagctctgcagttccttgttagggttttgttttgctttggtagctcttcacagagactctgagaaagcattgtttttacctgattcattgacttcccatcatggtgcattaggaactgaaaattttctgttttgaaaatagattcatttgtatcattttttaagattccaaaaattccaaaatagaaacagattcacagacccagagaacaaacttatggtttccagggagaagtgttgtggggatagattgggagtttgggattgacatgtacacactgcaatatttaaaagagataagcaacaaggacctactggatagcacagagaactctgctcaatattctataatcacctaaatgggaaaaaaatttgcagaagaatagatacgggtaatgtataactgaatcactttgccgtacgcctgaaactaacacagcactgttaatcatcttaacttcagtataaaatttttttaaaaaagaactgaaaagttagctaagtcagaatatttgttcatgcagttctaagagggaagattaggccaccatgaaccttctagagtttatctgccaagtgcaaagaccctgagaaggtgccattcagcaccctgcctgtggcactgctgtgacttccggggacagggtcagagaagtcagtagtctttgctagtgtggggaccttctgttctcaatctggctgttagatgttagtgtagcctgcatagtgttgaaaacaactctggaccaatcaaaatgtgtcattaatttttatactctctttagtgtttacatattcctttgaaaaatctggagacccaaacatatgggccagcattcaccctgcatggttgtacgtctagttcaccacaccctcccactacctcttgtctgggtgactctgacgatgaatgccatgtgcccagtgtctctccatttctctgtatgggactgttgttgcttaaagccatgtcagtgcaccaccctaactcatctgctgtttagcataaaccacgctgtggcatgttttcctgctgcggtagtcaccttcccaagccactcagctctttccatggcattcatgtttcgtgaattgaattgtgatcactgtctctcttctccccagtctcagaattgcaaacttcctcagcaagaatggtatgctattgctgctaagtcacctcagtcatgtccgactctgcgaccccatagacagcagcccaccaggctcccccatccctgggattctccaggcaggaacactggagtgggttgccatttccttttccaatgcatgaaagtgaaaagtgaaagtgaagtcgctcagtcgtgtctgagcctcagcaaccccatggactgcagcccaccaggctcctccgtccatgggattttccaggcaagagtgctggagtggggtgccattgccttctccggcaggaatggtaggggtgtacctaaaagtgtagttcaaaagatcactgtgtttgtgcacccaacacatttattgagcacctactgtgtgccaggtgctgttcctgtgctaggcatagagcagtgagtgaaatgggcgcagatacatacctactggagtttacatcctgttaggggtggtgataagtgctgtgaagaagaaagccaggaagagttcctgtttcatttggggctcataggctagagctcaattctgaggtcccttttaaatagagatatgaattcactcgctgaggagtgtagaccaaggggatagcagtgagagtaagatccccgaggaggagcatacttgcatttggtgttaggcatggtttttacttcagtgctgcgcttcctaatggtatgaattagggtcagttgcatttgcctctggactatatctgtgcattcatctctaaaatgcaagactctatatgaggttcacagacataaactactgtacataaaataaataagcaacaaggatttactgtatagcacaggagttatacccaataatggaatctcattttcacacacacacacacaaaatgaattgctatgctgtacacctgaaactaaatactagtattgtacatcagctacacttcaatagaaaaaatcagattaaaatgcaagtttccacatttaggaaggaacgtggcttcctcattagtctctccccaaggtcaagtctggtctttgactcttggtaaatgttgagtaaatatatatgcaattaacagatggacacataagtcattatagaaggatttgaaggatctcaaaagcatagtcttagctaagtgtatttcacaggctcacagattaatgacaatgaacatgaccagctctgaagcatatgtgctgagagtttctctttaatggtgactccacagtttttatgctcagcaagctgcatctacagagtaccactgaggaatatgtatgacggaggaaaggggcctgaactgtgtctgtgttgttgtagctgttactattcattggtatgtcctgactcctagaagagtctctgtgggcttataggaggaccttaaagaacatttgttaaagagtgaataaaatcaaagccggcatacattttcacttctttcataaagcagtgttggagtcacactgcattctgcctgttttcttcccaagaaagatacactaggtccagagaagatgagaaagaccacagcaatgtcaggatcagactgagctttaatgtcttacttgctttgcttcaactcatttatttacgttcttcatttgcagttgggaaatggaagcttagagctagtggcagatacagctagtgtgagtccagggcttgtgttcttactcatggaatgcatcgcttatagggaagaataactagcagatacagaaacagaggtatgaaaggaattcagttccactatattggcgttagtaactgatgacttttaatgctattggaagtttcgtatatgacaggtttcagatggagagaggggtctgctttgtaactcacacttacctagtttgcgtatgcctcagagactgcgttcgtgcagtttctggaggattgatcaggttttctgaaagccatgtgggaaccccttcctaacgtgaatccttgttttgttccactaacgtgtggataatttccaagtgtgacagttacatccctctttcttcatagcctatcagctttcgctatcacattcatatttaacgatgtgctagcaacactgtcctcttgtcagcctcgactcctcccttctgtccccagttcatgaacaaactcttctactttagtattattctagggcagttaggttttttactgcttatttccattttcagtggtgtgaaatgatttattacttttgtgcttttgaaggagaacagatttaaaggtggaaggaagcttggtgaatttctagccatctgttgagtttgggaaggaccactggaacccctctgttttgttttcctgtgtacgtgtgctttcaaatgaggggaaagttgtgatttttgtagcaggtgtcagcctcgatggcaaggggaagcagatatcctggccagctttctggggaagaggagaatggttgtgtattctcatgacttgatttttccagtgctgactgtatggcaatatcattctggcaaatattggctggccgtggaacatttttaagtgcaagggtttaataaatgttctgtctattaccatggctgaggaatcaaaacaaaatactcttcacacagttcctcgagcattcatggatgggttccagggtattgcttttacgttagctcctctatgtgtgaagaatctaaaataaaatattactgaaaacacattgattaagaagagtagggtataattttttgtaccatttcccttttctatacagtaatactgtgccaggaaaggtgatacagatgaactgcatgcagaaaggctttgccagaatttatgtcttcatactcttgttatggtaatgatagtgttgacaataatatgtaatgtctgtgtgtagctgttgataatctctgttctcacctaaggaaaaaaagctaacactggtaatattaaaaaccaaaacaaccccctccccccatttatcccaacagttgtcagattttgtttcccccctactctatagtgtgcttctcacgtatttatgtgattaatgagaatgagtaattgagtataagtgtataaggagtttataaggacaatattttactagtgactttttgcactggggctgtatttgggcagagattcttctgcagtgcttcatgtgtcttaagaatgtagcagattgtcccagacatgaatcagggagttcatttctgacactattttggaggagttctctgtgggagtctatgtttgcgtcaggctggggtgaaaatggcagtgctgatactgttaataataatggctacactgtattgaatgctcacacatattcattgtattaagtacacaaggtgcattgttccatggattgtcttacaacacctgtgaagttggggctcctcttgtctccattttacagacaaaaaaactgaggcttagagcgatttgattatcccctggctgtacagctaatgagaggggacagaccttcattttgactctgttctttccttcctctctctcctctttttccttccctctctctttctctcccttttcccctccctccttctttctttctttctcattgcaggggactttataggcaaatcttgttttcttgtactttgatttattgcactttgcaaacatatatatatatatatatatatatgtataatatttttttgaacaaactgaaggattgcagcaaaccttcttcaaacaagtctatcagcactattttcccagtatcattttctcactttgtgtctatgtcacatttggtatttcttgcaatatttgaaccttttcactatttttatattcattatggtgatctttgatgttactattgcagaaagattttggctcactgaaggttcaggtggtagctagcattttttaacaatacaaaatttaaattgaggtttgtgtatatttttttagacataatactattgcacacttaatagactagcatagtgtaaacataactttggtatgcactgggaaaccagaaaattcatgtagcttgctttattgtgatatttgcctaattgcagttatttgaaaccaaacccatagtattgttgatgtctgcctgtatttgtatatttttattagtctataacataactttcgtatatatagtgttgtatttcagcttctgtatacactgcagtttgctcaccactaaatgtttagtttctatctgtcaccatactcttggccactttacccattttgcctctccctgtaccccatttttctctggtaaacactactctgttctctgcatgtatacatttgtttgatttggtttggagagacctagaggggtaagacaggggagggaggctcatacacacacacacacacacacacacacacacacacacacacacacacacagagtctctctctctctaagatgtgaacccagttctttctcacacacacacacacacacacacacacacacacgagtctctctctctctaagatgtgaacccagttctttctgaccccagagcctggtcgggtagctcattctcaccacatccttcctagaaataggaaactcttacctggaatattttagcgatctgctacttatttccctgctttcttcctctttcctttttaggtctttttcctgccaccagccttctgatgcatgcacctcttcattgaagtcccccttccatccttcctttcctagtgaactcttttctggacttccatatcctgagctttcttctctgagttctcacaatactttgttcctttattaatcaaaacactttgcagctaatagtcagctacttaagtattccaaggattcctaggcccccagcgttcagttttgtgtctgtgactttgtgaatgttttttcttgagactgtccatagttttcatatgagtctcagaaaaatatttgatcaaaaagttaagatattatttataggattctctgtcctcctctaagtaatgagcacctagaggggaggagcatatctgatttgtatttattttcttggatggctataatgatccttttttttctttcccccgagtacctggataaatgaatgtctgtaaaagtaggaccatggaggtatggcctggaggttaagaacagaggatctagagccagacagtgccttggattgaatttctcctctgcaaacagtctagccagtgatacagtcacctcaaaaacctcactcttctcattggtaaaagggacatcataatcgtgttgctgttagagggttgttcctgaggaatacctcaaggtatgctatgtaaagtgcctagctcaagagtactttgcatactacctgtaattagctgctattactattattactgaagaactttgacatggctagagtatgagtttctcttgatttttctagttactatcatggtgatattacaaaaatatttttcatgccactttgagttttcagagcttaaaatcagcatgctttctctagtcaaagtgacaggttcagctcagagaactccctgaaatgttgctcttgggcatttcctttccccctggcctcaactctggctgtttagtgtcttaggttcatgaagtgccagctaatggaaatttgtgatgtgggcactctgccccccaaggatttggacatatgcttctttgtgttttaatcaacagaaaaaagtgcagctctagccatccttctgcataatggttgcagtagcctttttccttgcatgttcttggaacccctgagtgccagacctgtcacttactgtcccctctgtgtgtctcaggtaaaagtccagtaggtcagatgaaaggcagagaccagcagggcataatcactagtctacgtatagcactgatgagtagctggacacagatcacggcttacatgttatttatagtagtgtggccatagggtcatgttggcaagaagcagcctttagaaaagtgctttagttggcccattaatggtcactaaatatagaaaaagtagttagtgaaatctctttacagaaaatgtattgtgagctgggtgcattgacatgaggaggaaaattgttgactcttattttctcttttttttttttggaatgtatactttgtctttacatctctggtaactgtatgacctttagtgagttatttgcaaatactctttaaaaaaaaaaagtcttaaaaagtatggtaactttattcacaatcaccaaaatctggagatggcccaaatgtcctttcacctggtaaaggacacgtaagccattgttcatccatacagtggaatattaacgtgcaaatagataccaatacctgccacagcatggattgagctcagatatacttgttaagggaaaggagtcagactcaaaagtctatgttttaaatgatcccatttatttgacattctggaaaagacaaagctgcaggaatggaacaataagtgtttttcgggggactggggttgggtgacgttctgactccagacgggcagcccaaggaatgtctgaagtgtaagtgcaatgggtcagtgcactctgtcctaatggctttaaaagctgtctggtaaacaccctgaaattttggtttatttatttgacgtttacgagttggagctcctttgtctcccgtctggcagagctgcttactttaaaatagttccttggcctcggcaatattgaacattgagggctggattgtctctactgtgggggctgtgtgggacccagtaaggtgtttaatagcatccctagtttctacgtactagatgctcataacacctgtcaccctagttttcaaaaaatctgtattgaatttgttacgatattgtttatgttttggtttttttggccgggagacatgtgggatcttaactcccaaccagggatggaacccctgccccctgtacttggaaggcgatgtcctaaccactggactgccaaggaagtccctgtgtccccatttgtgacaaccaaaagtgtctccagacattgtcagatgtcccctggggacaacagtgtctcattggagagccacaattttaaaagattaggattcagtgaaaaggcattgagttaccacgactgacaggtgagaatcatcactgtaaccttcctcttgcttccctgtggccccatccgggctccaggttagatagaggaatattctagtcggttggcaggggaccttccctggtcctggagatcggccatttcctcttacaagtgccttggccatttgacctcgtgccagtgagtgctttctctccgctcagggactgtgagagcctagaagtagtatctgtgtacttgccgctcccttgctcttacccctcctatcctagaggtcaactttttgggtctgatgagtcatgcttactgcatttataaattgcttccatttctcccaaagcaaagaaaaaaaatttttttttttggaaatcagtttaaaaaattataataaatacttgttaataaaccaaaattaaaagtgccagtgaactataagatgatcatatttcagatatatttttacagctttgttaatagtttgatattaatttgggcttaagagttacgggaaataggcagagtggtaaaatgatgagatcttttgatctttaaaactttgatcttcaaaattttaaatatatttaggtggtacatggttctcccataccttcttttttttaagattttatttaattggaggataatgacttcacaatattgtgttggtttctgccatacatcaacatgtctcagccccaggtatacatatgtcccatccctcctgaacctccttgccacctccctgcccatcccacccctctaggttgtcacagaacactaggtggggctccctctatcacacagcaaatccccactcactatctattttccatatgataatatatatgtttccatgctcctgtcaattcgtcccaccctctccttcccccactgtgtctacaagtctgttctctatgtctgcatctccattgctgccctgcaagtatgttcatcaataccatctttctagattccatatgcatgggttaatattttttcatgtccagcacaaacctgtgtgtgaatcccaaagcattataaagttggctccatctagtgtatgaaagtattatacagctagagggggagaaaaaaaaaaaaaaaacaactccattctggagatctcctttggtacgtcattatgaaattagattaaaaagttaaacgaaaacaaagatgggctataagctatatttgtgccccaggagataatgcaggccaaagtgaccttcacagtgtgagaggagaggtcataatacattgaagcatcaacatccagcatgcctgacattttgttctaacagccttgccttttctttttctggacggaggtcttgtttacaggcactatcaacaattgtggcttgtccacttccattgtgatactctccgtcctccttggcctggcccctggttttcctgtatggaatcctatctgccagtcatgttcatttcccacagttaggaagcgattagggctaggcccatgtactgtgatttcagagccctacatgatttcctttatcagactggaattctttgtagctgtttgcttttcactgcagtagagtagccactatttgtgggttgtgtttgatctggtttccacggaagggttctggcacattcttcatttctcttagtcagggttcccaaatttgagccatactcatcctaacttcatgacttttgcccccacattccatatgatggcttaaataaattaaaaacacatattgaaaggaaacgccgtattaaatggcaatgacagatggatgcatgtgtaaaataaatataatgaaattggaagaaaacagttcgatccttattggatgtgttgtcaagaagggcctgagtctgagatctgaactgtttttgttacaaagggcaagtattgcaagattgaagacatgttagcatcaaacagacacttttcgtgggatgaaaagaaatttgaaagggtctttctctctgggtaattccatggtcatttaatgtggagtctgtgtgtctccatttgagatcatcctgtatcccgcacgttgagaaactttgctcacaatttgccatcttttccagaggagtttgtcatgctcccccaaagtccaaagctcgtctccccctcaaaagcctttttcaataattctttattttctgagcactgctatacttctcctattaacaagaagaaattgtgctgatattcatattttctcactctctttcccaactagattaagttaattgaggacaagcagtgtgtctttctcttctgtttctagtgaatgccattactttaactcatgtttggtataaatattcagggaagcctgcttcatttcctgcttgtgttttttttaaaggtagatcatagtcagaagtgatcagaaaatgcaccataatcaatttcattattcacttaacccgctgacaactagttattgggttctttccctggatctggaattgtgtctggttaaagaatgaagagggaactaaacagaatgggttattccttcttggaattcagacaccagtgtcgggtgtggggtgcagacagctaaagaggcgactccagtgcaaggctctaattttaggattagtttgcttttgtgattgttgagtggctcacagaaacttagagcagggaaccacagtgagaagcgtgtgggctctggagttttcaaacgctgaatttgcagttcatcaacatcttgcttctgagcaagttactcacctcaatccctttccctctgtttcttcatttaaataaacatgaggtacgatatgcaaagaaaaggcacagttatccgtgtgatgatatgatgaattctctaccttctctcttcccctgtctctttttttttaaaaaagaggcagagacatgatctcatgattttttcagatttttcaaattttctgcctggcccactaggaaatgaaaatgcactgatccttgatccagtattagaaagcaaatgtttttgttaatgggaatgtcattgtagatggtactttaagatggtaaattcatgcaatttccaaattacctatttaaattagtaaatgatttgagcattcagagttactccaaaacacttctgacttcataatctaagcgccatggtatatcattaatgtatctcaagcatattcagtagtgcttggaacaagtaggtactcaataaagacttgttgaatgaatgagttttaataagaattttttgatttttctagcttttattcataattttgcccatatgtatgttttttctttgttctgaaatttttaaaattttattattggagtataattgctttgcagtgttatatccttatcttttaaaaataaaccagtgttacttgatatgaggagcttattaataagcttgattgaaagtggtggtgattctctgcatctccatcaccagcctcatctgtaatacctggcaggtaataagtacttgataaatgtcaaagcaagaattagatagttctgataggcactattttttttaaggacttataacttaattttgtcaagcaaagatgtcttttttcctttgtatcactacatagcagtattacttgaaattacacaggctattaatttaaaacattggttattttaacattttactatcaacataaatatacactttgattataggcaagactccttagagtataagtcagatgcagaatgctattgtgtatcaagtttattgtgattgattagatttaatcaacatacaggaaggattcctgtgcaaatattatttttctcatttcaaatcctatttgttcagcataactgaaacaggatgtcattagtgtaagggtaagtattgagatgctttggaagtttgggaaattttgactattgacataaatttaacctatggagatctttcttttgaacacagaagtttgatttgttatattttgcttatttaggtacgttatttccttcatgacttacgaatatgtttataaagttaaaatacaaattaaaaaagtatttgacacattgtcagaactgaagttttcctgggctagcagttttgtctgtagctaagacaaccattaaaaaggcatcaatagttgtacactatcagaataagtttcagatccccatcaacatcttagtttttggttttttattatgaatgaatatgttatccacaaatatctctggaccttttctgagcttacatttgttttcaatctgcacaccatcttcaaatgccatgtttcaaaaacattttcacttctgtctctttataaataatttatttacttggctgtgcagggtctttgttgctgcccggacttttctttagttgtgaagagggggggctaatctttgttgcagtgtgcaggcttctcattgcggtgacttatcttgttgtggagatcgggctctggggcacgtgggctcagtagttgcagttcccgggctctagagcaccggctcagtagttgtcgggtacaagcttagctgacttcgtggaacgtgggatcttcccagtccaggggtcgaacctgtatctcctacattggcaggcggaattttttaccactgaaccaccaggggtgccctttcactcttgtctcttaataataacttttatttgtcctacaagttgaagttctttgaggcttcaaggactcacttctcgtgccctagtgttctgaaagtggccttttcccttgcataatattgatggagtgcaattttttttgcaggcactgtgctaggtacttttcatacctcacttcatttagtcacataccctactaaacaggtgatataatagcaatctccattttacagatgtagatttcgagactcagaaatgaagtgagttgcccagggtaaagctacgaggtgaacatagtgcatggggtatgtgtgtgtctgcaggccaccgccacacaatgctgtctccagctgaaagatgatgctaagtttagatcgttaagcaagagagacttgagcaacgattcacttatttatgaaatagtggacccctcacaggctaaagaccctgtcctggattcttaccacacgttgtacagataagagttatcacacctggcacactttcataccaccgtccaccatagtgttgtgattgtccatgagaaaaatctatctctacctttagttcagtttttataatacaaataggaaacctccgtgaatggcacagaaaggctaattggcaaagtgcctgtgtcttctctgtcttcttcgcttttccagttccccttgagccataaagggtcaggtggttctttcagttgctgatgccctgagtgagaatctggggaagggtagactcatctgcctcagtagccaggacctcagcccagagggtgtgtagaggccacttgtcagagctgaatttgtcttgttttaacatatttgaatatcttgactctagggaagaagaatgaaactgatgtctatcatgatgaccacagggtcgcaccctcctgtttccatcctcaacaccattaggataagcagagactctatgggcttctttgctattcagtttaattacttaaaaaaaaaaaaaaagagttactacagtgaaagagaaatctgtatttttctttttaaataagttaggagttcaccactgaattgagaggaaaacactcaaagtgactttaaagtcctgaagtggaagatttgacttattataaaatcctagtgtgaataactttgcacccctgcctccatggcaacagccttatctttttctatttatttaccttgataaggaaagtaattgcatttttactaaatttcttttttgagaaaatgccatcaaagcggcataatctccatccgtgtttccttcctcaagtttgtgttgcctcacgaacttggcttttttttgtggattatgttctgcttattgcaaataccccactgccattgatagatagcaaagaaacagcctccgaattgcctttaatggagagcaagtatttcttttgaagtgaactctaacagataatatcagagagctcaaggtaaggaactaatctcttgtattgattatttatgaaagaccaactattatttcaaatattgctcccttcattaattgcttaaaaatttacttcagccagcatttgaagtgcctcttttttgtagattatatttgtattctcaggacagagttttctaaatagtttggaaaagcattattttttttcctctaaatctagagagttctttgataatggcaacaggagcctagattaaatttacctgaggtcatcttggtcttgtgtgcattttccttttcacccttaaagggcttctttgtgagctcggtacaatgagcagtctttcagaagatgctgtcccatcattgttatagggagattctgttcttggtaggattaaaaaaaaaaaaaagggaaagaaacaaaatgaaagagataaacttgattgagtggtactgaacacttatttctgcagatacatagtcattaaaaatttccctcagtcctgctgtgagtgttttcaaattagaactactgggctgccagttcctgtagctttgtatcctcgtactttatccatgaaaataagttgtgttcagcaactgaaagcttccaaatgaaaagtatacaatcatgagccccactactgcctgttgacttcctaattaattaagtgctgtcatcaaattatatttcataactccgtccttacctgatctttttttattttgtcactcttcttctgttcatctttccttccactcatccatcattcactgaacaaaagttttttcagcacttatcatatgccagacactgagaatgtaatacatacaaaggaccctgccctccaggatgaatgacaaacaaacaaaacaaatgattaggagtgggattaagtgctacaaaaaaagaagcatttgctgagagagtaagaagcagaagtggatgttgcttctttaggtaggatggggttggggaggaagccctccctggggaagaggcacaaaacctgtgagacctcatctgaaaggtggagaggaacccctgaaactgccagtctgtcccccactcctaactcttaaccatgggcctgtgtatgtgagtttggagtttccctggggtgagccccagagaagcaaaagctctcatatcttcttctttatcttccccacagcactgagaaacatctctcaaatgctggccacatcagtgaatgtttgagtagaagggccttttggtgacatctgactttccaaaatgtgagcatgatggcatgtggggaaaagagccagatgtgtttgttactctggacagaagtttttgagttttgcagccactttcacgatacttgttaattacctcataatactttcacttaacattcaaagcatatccattgtataataattccaagcggacactttacaacatcagactatacaagtaaagacttcttatttcaacagataaagggaacttgagaatcttgggtattttcctgtcactcttgcagagataattttcatagaacatattatatataattatgtatgttgaaatacggtatatagcagtggttccgaggcctgacttcatattagtcttttatgagaatctttttaaaagattggaatttgaaacagtgttttggaaagtctcattcagtcatttatttgggggaagatctttgacatttgtatttttaaatgctcctgagttgattttaaagggatgatgggggcagaatggtccctaagtctttctgatagaaatgcaggtttggtgaaccattggctgggatcataatgaaacattatgggtagatgcttcctaaattgtatgtagcaggtagttcatgagtcagtatagtgtttggcatgtattaaatgtcttcagctgttaattattgttagggtgatgagaagtagtttactgaaaaaagcaatagctatcagaaggaaagatgtaagacaatgatgtgctttggggaaaataaaacatttgatacccaaataaaataagaaggattctaactgtgttaaaagagtggttctacttttcttcagctgagttttggacaggataacaagtaaaacctcttatctcttctctaactcattcaacatagtgattgagtttttccttccaaaaagattgaggcccaaagttagttaaaaaaaaaaaaaaaaattggctgtcacttggatgtttgatagttttaagttccatttttgttacagttgtctttggagaaggtcagtaagaattctgatgagtctagttgatttgctggaatttggggcaaggagtagcagttaagatttgaattatatgggagtacaggtaatatttttattctacactcagtgtttcatgttaaaagtattatttttcctttgtctctgttaccagttcttattttgtattaaacttttagggtttgtgtgtatatatgcctgtatgtgtctgtgtgtatgcatacatatacatttatatgtgtatatgcacttaggatatatatctgaatagtacatatatgaacaagagagttgcttacacattatagattaattcattgtcagtgtatttattgaacatcaattgtggattgtttattctactagcttctagggatacaatggtaaactgaacagatatggttcctgccactcagaagacatttgttaaatgattgtgtgactacttgagggacaggattgtggaaatgtatgtaatgtttcatgaattttatagcttttgtcagaggtgtatgtcaagctttattccatttgctgataggtatttcattgctatgttcagggagattccccaagaacatttgcgtgatataggtatttctgaaggtaccatgaataagttgaacacatgccctgtgaaagtaattttacttaaaaatttatgtaaacagtcaatggatagcctccttgggttggtagattgtccaggacaaaatatcaggcgatgtcattggcagaagctgccaggggagaatttggcaccatgtggtgtccctgttggaatggctggaattgatgccattggtttcacgatgaacatctgagagcctacggagggcacagattttccctgtgtgtaagcatgtaataaatcagggtttcatttcaaaaacttactgggaaccgtgtaacttaattcagcttcaaatagtgtccaaggtgggagagagtccagcttggtcttttttaaaaaaaatcatcacttaaaggttctgatatggtaatttcctaacctctctgttttctttgatcttcaaatttctcaatttcctcgccgcccccccccccactctgttgaatttccattggttctgtaggttagtcggtgtgcatccagaatagacagtttcaatcataatcgtaagagctactttttaaaatgagagcttaatatgtgtcaaagaaggaagttccactgtggctggagggcagagagcaagggtacagcttgcttccttagactgtaccatacatgttacatatgttcatatattatttccttcagttttaacaataacctatgggatagccatttatcatttcccctttcttgggtgaagaaaccggggcatgggaagtttagtaaatttgcacaaggtcacagaattagtaagtggtaggatttgaatctgaataagttgacaccaaaacttgtgttcttgatttatctgctctactgtgctagagggagaaaaagcaaggtgtggagcaggttagtaaggggaatggtgtcgcatcttagtcacctgttaacgctagaactcagtacaatatccagtctgtggaaagtcctcagtaacttgttaataatgagcacgattattttcatcagggatctgatttccccaccccacccacattccttctacatattggtctttagcattaccagcagtctacctgctttcatccacttgtctccactcttgtccattttcccttatcgcctcccctcacctccatgaagtatcgtcacctctgcctaggactatggcagtagctaatcttgttgctcctctgggtggttctcaatacagcagccagagggacctttctagaaacacacatctgagcctgcttacaacctctcaatggtttcctcttcatcttggaagaaaatcagtgactcttcccttgtctcccaggtcccgacggtctgacggtagccactgcttcagtctcatggatacccatgattcccttgctatctgacctccagccacagtggagcttccttctaactccccacttcagggttcttgcacatgttttaccactgtttagaagactcttcagagaaggcagcggcagcagcagaagactcttctcccgttccccgcttcacacccagaatccataactgctacccccgactcacatcgaagccccgaggtccctgcttaagggaagcctttcctgacccttacatattaagctttcccagttccttgttgtatttatcacaagttacattaaatacttgggtgattatttaagatgtgtcccgttagacttgaagctccaagactttgcacagtgcctgggatgtagaaggtgttctataaatatttattcaacgaaagaaaaaatgaaaaatgaacaaagaatacaaagggccaggaatagcttgtctgagacttctggctggatatttcccattattaaagggaaactaaagaaagatcacttcatcacatgaaattcaagtttgagtatggcttattgagattgcactgttttccacctgtttactttgaagacagtctcaggcacagagaagtgaagtaacttgtccaggatacacagctagtccatatcagatgtctttgttctgacctttgaattgtgtgtagggaggaacagacattttcataaatctccaggacatttttaatgtgctgagtctgtaggagctgcatcaatatttgatattattgacgctgtcatgtcagaattttaaagtgtcttttgagggtatctgttattattgcagtgagttcagagtttaattggatgacaatttaagaatatgcagaggtatgagctaaagatgtcctaaaagatactgcccacagtaagaagcagcttgtgtctgatttccaccaagactgagcaagggatagcactccttatattcttggggtctgagggtaaggaatgctgcccaaatctcgaccctgtcagcaggaaagcatgttcagtgagcaacctccagttccaaaaatgcttttgcacggatgcaaagcagctcgagctgtgtgatgagctgctgccagaggtgtccccagttgagacgggaacaagctgtcccacagccctcctggattctgtggttcttttcggtgttggaaattcacctggatgtaaaattacctctgccttcatgttctctaataacacgcagtcactgcaagcccccaccggtacctgtactggtgctcgagagggctaagtgagcatcccaggtatcgcctggctgctggcttgggtttccagtggtgccttggtccttgtgaagcccctgttgcagggtgaggcagcagttttttgtcctgcaggtacagtaggtactggattaaacaggtctgctgttgcagacagacaccgggcaccgttgtagcacaagctgtgtttggattggagtttccagggccttatcaggagccacccctagtgacacagccagtgccagaactaactttgactttcactcttcgccaagggcttgcagaacaccttaaaggaaaaaagatggaggcgcttagagttcagatgttcatgccttgttcctttgaaagcttttatctgtaagtggagttttattctggaaataatcctgggaccacttggcaggagttttgttttttttattttttgtttttaaggggagaacagagaaagggaaggttttatcgggagttaaaaattctgggactgttactctgtgatgtggctttaatcggcttcagctgtaacctctggtaggtgactgtgacaaggataacaactaatctgtggggtggggggattgaaatgctagtccattagctctgctttctcatttgaaatggaatgttggtcttaaattaatcatgcccccaaaatgactgctcgaaaaatcacagctctgagtgagaacagagcttgatttatgattactaaggtagtctgaagctgggctttgcgatgactaaaaaaggattttcttcaggaaaacgggtgtgcttagtgacattggtcagaattgtccccttgcagacactggattttttgctttctcctctcccctttaccccacactgtggagtagtacacttgcattaataaacatttcatttgcatttctttatattgattttttttttctctttgagaggaaaagaaaacatccaaacatcagaatcatctatctggcatagaaatgtagaatgagtttgaaattggcactttcaaagaaatactaagatggagaaatgctaaatggatcacagctttctcctatcccgcccccgccaccatttcctttaatatttactttcaatgttaggtgataagatttgaaaacaatactaaaagccatgtccctaagtgaataggcattcaagcaaatcaacttaagcaaaagccacctctggagcttaataattatttactgaacgttcctgggtcatgagagaggttctgattaagtcagaaaagcattatgttcagcagcttgtgaaggtgtgtttaaagacggcaagaataatggaaaaatactaaaagtagcagaactatttttagaatttgattcttaaaaaataaaattcctgtaaatgtaattgtggtaaaattcctaatgttcagtggatacatctttaaaagactttataattatttaaattgttttctaatgtcttgttctatttttgctgtatggtttgcttttatagatttttaaaattgtatatgtcattaaaacagtttaattactcatctctctaaagtgatagaacattttatgaacagagtatatacattattatgtatttaaaatgtcatcaggttagaaatgttacaattttatcctttgtaaatcagatactagttagttctctgtggttcatatcacacaagaatgtcctccataacttagtaatttttgaaatattatttttaagcaaattaatggatgttataaatggataaagcgtgccatttagctttaggatagtagtgatgtcatccttgaatttatatccaaaataatgcttaatttcaactgcttttgcttaattgatttctttttttttttctggttgactaaaatactggccataggaccatgcttccctttacaaagtctcagaatgaaattcttagctcatatctttgacaaaacttgttcactgagctgttgctcatttacttcttcttgcctcttctttcagggagggtatactctgtgaattaattgtttcttttgtatttgccactaggaaagcaaagaaacattatagtagaaggcaaccttataagaatttgggttcctagagaataactttccagttttcaatagttccaagttattagaaagctcagagagtaccaatttgggaattcaagcccagcacagaagaatccatggcctaacatttacttactgtctgcagggtgtgctgactgctgtcctaaaaatcttacttgcattaccatattcagttctcatacttgctctttgacaaaagtacttttctcctacctccattttgtagatgacaaaattcaggtttgggcaggtgaaagatcctggccacgtcttatcgctgagaaacggtagagctggaatttcaacagaggtattctgggtacgtggtttctgctttcctcttttccactcaatggattttcattccagatactgactgaattgatgtttcttcctgtggccttttaattgtgtttctccaatgctcagatttctgaattatccaaactgtacctcctttgtgcttttgagtggctatgactaatccagtgtcacagtatttgtctatcacatgggtttccttgtatctgatttactattgattataagatgactgcttaggggagaagacaggtctactaataagaaaaaaaatatatgtgtatatatatatgtgatctattctgacttgagaaaccttaaaatatggaggaaaagtttgtcttataattaaactaatgcagttggtctctagaactgagatttttgggaaaagactgttctctatcactggatgactcaggcagtggtttttattaaaggtcttccagcattaaggttctagtgttacctgattttaggaggtgggttatttgttaggacagcgataccaaattaactctttggatagatatttatttcatcccactatgtgctaaatattcttttaggtgctgaggaatttaggtgctgctgaatgaagcatagaaatctctgccttcatagagctagctctatctggtcatgaggggataggagcgttccagctctatccttaagtctgggtctcatcttcatggtccaaagtggctgctagacctgcagccattacagctaaattctaggagacatgatggcaaaatgggtatctctttaggaagaatctttgaacaaaccacgtgatctttctgctgaagtctcactagcaaaacttaggcatgaagcctaacactagaaccttaaaaccctgaaaaggtgggaaatgtgagtggcagtgtaccagccaaaacaagggcaaaatagaatgggtagctagattgtttgagttgtagctcttaggccaaaacattgatttttttatttttaacaaataactgatattttctaaaatgacatgaaaatgtaccatggtttaacagagtatatccaactggattaaacagaaatggagattgagagtcccttgtacatcagtgtatcgggtgtccagggttataaggcttcagggatggtttgatccagatgctgtttgtcatccacatgctggcttcttctaccctcctccttctttctaggccccggttccttcttgccgttcacatcactgtttcctctagtttgcctttctttccacataggtccaggaagttccagatttatatcctaccgtcttttcaaaccttagtataaacagaggtcttttaccccagtagttgtagtcagaggcattgggctgcctcttattggatcattttagagtacaagcccattcgatgggtatgttgattgatcaaacccacattgtgtttctaggtctggagttagtagcaccaccataacctgcctcatgaatggaaagtgaaggggctggtttttcagggtggaattagggtactttctaaaggaaatgagacagtatggtgagccagcataagtaacatgtgaccgtcataaatcattaccactgtttgtaaggctggcttttagaccatgacaagtgcatatactcactgctcctgagatcataattggtacttttgtcttgatttttacagttttgcaaactttgcatcttggttgatatgtcctagacatgtagtaattgttaagtgatggcaatctaaggcttttgaatcttctctcacctgttgtgatgctatcttgacacatggacagagcatacctgtgactggggtgattgttcgagtagagatagaaggctttgagtctttaaaaagatccttccagttacttcacactcatgtctgaattctttcattagattgtcatggtggtttgatggtttagtcactaagttctgtctgactcttgtgactccatggaccatagccttccaggctcttctctgtccatgtaattttccaggcaagagtactggagtgggttgcatttccttccccagggaatcttgccaacctagggatagaaaatgggtctcctgcattgcaggcagattctttaccaactatagttttggataaaagtttgttccttttaaattgctctaagtgggctatattgttatgccatatcaattacttataccttgtaaggaatggatttttcagagtcttttaaaatatggcatctagatgtgaatgaggttccacggttggacagtgtaaacaggaattctagagtgtgatctaatgaaatgcagcttgataggaaagataggattgagtgtggggctgtctgctttatctgcattatgaccttttgataggctgccagaaataatttcttagaaacgaattgagagtgaagagtgtggaaagccgtggtggcatctgtgggaaatggaggacagttgtggccttaaaaggaggaaatggcaccctcatatccgtgtttaaaaatagctttcagtaacagatactccttggttggagtgtatagaagtaagaaaatcaatttgggaggggtgcatataatcaactttaaaaaaatctgatggtgaatactgcctggaagaacactgggctaatattatagaggtctcaaacattttgggccatatctcctaaagtaagttttttcaagctggctctctcaacatattttaatttacttataaatttcatacatgtgtcactatactgatgctatattataatatgtgtgtgttcattgcttagttgtatctgactctttgcaaccccacggactatagcctgccaggctcctctgtccatgggattctccaggcaagaatactggagtgagtagcctttcccttctccgggggatcttctgaccagggatcaaacctgggcagattctttattgtctaagccaccagggaagcccaatattataatatacaacatgtataaaaatagaaaataaaaatgatgggtaaattttatataaatttcaatctttttcttcctgtactccagggaatctttttgtaccctcttttgaagaatgttgatatattaggtgtcttattatgtttctttgaaaaatactgatataagtcttataatgcttctttttgatttttatctcatcagttattgaagttactcttactggtgcctctggaaggtccagcttaaagagtattaatcctaaatagattcagagagactacgattctttcaaactaattggattctaggtgttgaaaagtgacgattttggatttttaacttgcatatttttaacttggcaattcttgcttttttagaacactttcctccttatgcacaacaaagagtaaagaactccagaggatgggcatgcagtcctctctggataccaagccggcctcatgtctagcagaacaggcccttggaagaccttcagatatttgttgaaggaaagaagaggagaaagacaagctgcactttgcaagcctttttatttcctctgtgccagaaacctgtagcatttattgtctgagctgatagtgttaccaggaaaagctggacatttggcatgttttctttttttttttttcttgaccgctgcaaccaaggttggtgatggctgaagtccacaagatttccacttttgaagccaaagtgtgaaatctggtactttcacatttacatgagttatactctcagttattttaagtgagatatatgtttatcatatatatcacttatcagatacaccatatatttcttatatttatatatatatatcatatagacaagtatcaatatatattcttattggtacttgcttctaccatacatgatgaaaaagtcatctctacacttatacagcaatgactttggaaagaagggaaaggttaagataatggaaataactgatcctttgaaaacgttaaatactaggactttcctgcttcgtctagtggctagtactctgtacttccggtgcaggggcccaggtttgatccctggtcagggaagtagatctcatgtgccacaactaaagagccagtacagccaaataaatgaaataaatattaaaatgttagatacccatactgccatttaaaaagatatatctgtttactgactctcacattggtaatttatgcacttggacttactttctaaagactcttaacaatctctttttgctgacagaacagcacttttgtaggttcggcctgtaggttcttatgtaatcctccttatgatagaatagttatgttgtaaccataatgattcattggcagtatctggacagattttttgtcttgttggttttatagcccatttggcaggagtaggtggtccttcccatttccttccattcacatgttgggttcagcatcagaaggactcttcagagctcttgtcggagttatcagaggctggggatggaatgtgcatttcctcagacatggaagaaagtgttctggtctaagaatcaaagatgtgagttcatgtcccaacactcctaccaaacaaatggacgatcctgggtgtccaagtttccaaacctggcatcaaaatcagtggcatagtttttgtagacatactgattcctgggctttacctaacctgaagtcagaatctcttggaatggagcctgggcatttggacttcaggcagggtcctcagctgatgctgtggcagtcagccttctgcatttggaaaccctagtagcttaacctatctctgacatagctttcttacctgtgcatgaggttaattatcgtgccttcctgtgtcttcactgtctatgtgaacatcagccactgtgctttcttggatataattacattgtatccagtgcaggcagatgctaggctttgagctctatcaactgaatgattataatgaagattcctttttcctggaaaaaaatactaggagttttactttatatcttgtgagtgaattgcaggatagattatcttctcttcaccccttcaaactttgtcaaattctctgaatcaaaaagggattgcctaaatcttaaaaaacagatatgctatggtccaagcttgcatacaggcttataaaaattcactttcttgcataaaaaagaagtagcttgttcatggtttcatgttttctgactactactttttttaactctgttccagtttatcaaaattgtgttttggttattgtgctaagctttttacctctattacaaattttaatcctccttctgatgccaagaggcaaatgtattaaacagtctataaataaagaaaaccaaagctcaaagagattgactgacttggctatcgtcacaggttagtaaaggccagaactgtattctgcctgaggaactgacgagaggtaaggcaagggaaagttcatcagctccttgagcctagaagctaagttgcagcttacagccagattcatgtcttggatgattgtgatatggagaccaaagactgattcctaaggtctggtgaaggggtattggcatccccgtgaaaggtgaggattggtcaggcaagtgttgtttggatggcgagatactgaattttatgagatttctgatatatttaaggcgctggtgaagtcagaggaattaactctttgaatttaggaatataccagtgattcacagagcacatgtccaaatgtctcttatcatcacagagaagggtcaggctttgaaggttaaaaatgtaaatttagccatcaagttaggaactcaggtcatgtttatggctacttagctaagtgtccatattctgtctggtgtgttatcactgtaacttagctggcattcgctccc

SEQ ID NO: 34 - DNA, 134480 bp, synthetic construct
  source 1..134480: mol_type = other DNA
acagcaaattaaaaagtagagacattactttgccaacaaaggtctgtctagtcaaaactatgtttttccagtagtcatctatggatgtgagagttagactgtaaagaaagcggagtgcagaagaattgatgcttttgaactgtgatgttggagaagacccttgagagtcccttggactgcaaggagatccaaccaatctatcctaaaggaaatcagtcctgaatattcattggaagaaccgatgctgaagctgaaactccagtactttggccacctgatgagaagaactgactcactaaaaaagaccctgatgctgggaaagattgaaggtgggaggagaaggggatgacagaggatgagatgtttggatggcatcactgactcaatggacataagcttgagtaagctccaggagctggtgatggacagggaaccctggcgtgctgcagtccatggggttgcagagtcggacatgactgaacgattgaactgagctgaactgaacctgaagtctttgatagcctttgaaggtcaacggactaaaattaggcacaagaatcttgttttcatccatattttctgtggagcagatcagtggctttcctcatattaaaaggtttccagtgaaccaaaagattaagaagattccagtgtttctcagtacaggtatggatgatatttagataagaaagtttgtcattgtgcaagacatagagagtctctagcccataccccttaaattcctttaacacctctatgttattatgatattcatccccttctagtggtagtaatgttagttgctcagtcatgttcaatgctttgagaccccatggactgtagctcaccagactcctctgtccatgggattttcccaggaaagaatactggagtggattgctattcccttctccagaggatcttctcaacccggggatcaaacgcaggtctcctgcattgcaggcagattctttaccatttgagctacagggaagtccatattccagtcacctatagctgagaaacaagatgagaccacaagtatagtctcagtgtttcttgcatgttttacgtttcctcttctttctggcagagaataacttttttcttttttttaactttaatgtctaatttccagtagtatctatcatggaatctgggatcctatttcacgagcacaaaaagactattttccacaggagtgttcaggttctgtaatattttactggtatggacctaatgtgatgtttcatccaaggcgaactagcaaacagccaactcctgggaggtaccggtcattagtctagcctccttagaattttcttgcaggatgatcatttattacttttgaaaggacaaactcacaaatgaagtgttagtctaagaaatatcttcaagatctggcaaataaaacaatgaccattgagcagcatttttatagattacagatcattctgttgcatttgacctcaaaacatcttcaaaaaacagattttgcaatctcctcttttatagttgaagaaattaaggcttctaggaatcaagtgacaagctcaccattacacagcactttagagaaggactcgggatttcaactgtgggtcttagaactttaaaagccaccctctaactctctacttcctccctgatacctccaaacacttttaaaagaaagaaaaataccctcctggaactaatcagagggaacgactggaagttcaaatgagccataacagtgtctgttaatctgttacctaacagtgccgggaagctgtggtgggggtggggggagttgacacttgtacattttatgtgccccacagcttcactcctgtaaagttaggacgatttcatttgaagtcccagccaactgagaaattaaaagcagacagtgacgacgctgttttgtaactttgtgccttttaaaattaactgcacctttcaagtgccgctttggattagaagtggctaattggataaaggagagagtcattcagctggatgaaaagtattgtaaaagccctgactgagttagttaaaggaaagggacgcacaagaacagtactattttacttacagagtgaaggaaagttcctccacgcagttccaaatcgaggacaggttgatttgtcgcagcagcgctgtaatacatgtagcctaatataaagtctgtttaagagagacttgaaggctgaaactttctagtgccaaaaccctttactattttttttttaaacaaggacttggcgtgccctcgcgaaatgtgtgagcttggaggagtgatggtaggagaacacagctgagtccattcttattaaatggtcaagtctgtacccttgaagctagtggagagagagaagggagaggagctgctgacattgacaatgaatccaaactggagttgcactagcggtgtctaccacgttgcctctgccctcgcttagccttctgggaattgtagttttgtggcgagcggctcccctggcaagtcgggtatactcggcccggctgtgactacagatcccagacggcgccgggcagccgcccctcccgtcccggttcgagtgtaaactcccggcgccggggcgggcggccgcgcgcgggccagcgggctgagctctgcaaggcttgggggcgcaccgctcgggggacccaggccccgccgcctcccctccgaccccgggctcggttctcacttcggagcagtgcgaggacgggaagctggagccatgcagtcggaatcggggatcgtgccggatttcgaagtcggggaggagtttcacgaagagcccaaaacctattacgaactcaaaagtcaacctttgaagagcaggtgagtggtgacagctggagggaggcgcggcccgcccctggaggacccgttgccgcccactctgaggcgaggaaagcagctggcccggactctgggacaaggaccccgtgcccttgccccggggcagagggcgaactgacccccgcagctgggggccgtgccggcccggacgggtgcacctatgagggtctcctcccgagcgcattttgggcgtgcggcgggcagccccggacagcccgcgagggcgaggggatccctcggttggggataccagctgcggagagcgggtgggggctggggagtgccccgacgcggaggtgggggagaaggagcgccgggccgggacgcggtctgggttagtttcgagtgaaccccttttctgaaaatcccagcgggctgagaacttgggggagggagagcttacggtggatcgagcgcgacgttagagacaagcaattagctcctgtgttgttggccgcttaggagtcggcccctctgggaaaaccgacctcgggccgcctccaggtgaggtttcccgagccccgcccctgaccttcccggccgcggcacccctgtgcgggaggggcggggtgcgaggtgggggggggcgtgtctccttgtccaggtggaactcccgggctttggggtctcattcaaatgcaggccttccctggagggggtggagcgaggggggggactttgagacggagatttggcgagtgaccgctgttgggccgcgacatgtctttaattctctgggcacttctaaaactgtttgggaggagagtgaagacacctgctggtctggcgtcccatcacccttagtgctcacttcttaggctgcctccactcccacttgtcccttggagcagtttgggtgtcttttttcctctctgtcctgtggccactcaggacatttccaacgtttactaagagagaggtggtcagttgaggcgctgagagtagagagggtttagttccgcccctcagttgtgaggtagcatgaggctgaaactcgaagcttcagcagtgcttctgcatccgtttcaaaccttctgccggccgctcactgtcgatagtgtttgggtgaagagggggacagggtccggaaatcatggtgaaggaaggactggatccggagtgaagggatgtgatcagagctgctggggcatgggggattggtacttgtgcagttaagttcgtttccttcagggctgtgtcagactctgaatccactttggagaaggaaatctgtggagagcacaccgactgactgggtggctgaagcagcctcttggcagatgcttcagggagattggaaggaaacctcctatgcagttagttgcctaaaaccagcctttagttggtggtttctcttcataatggctgttttgtgtgtgagcctagattgtgtgtgttgggggttgggggtgtggagtaatagtgtgtaaagggtattgttggttatgctcattggggctttatctgtattcggctgaagggaccagtgttttaccgagcagtctctgcttttgcttctataagcaaatgcttacatggccagaatgagggagggagtgtgtgtgtgtgtgtgtgtgtagtcctgaaagaaatgaattaaccggactgtttggaacatttttgatggtagctgatacataacattaaataaatttgagagagtgaggaaaataccatctggaaaaacccaaatgaatgccatgaaactcacgttggaggatttggggcctgttctttttcagagtcggcaaaaaaaaaaaaaaaagacttgcaagggttgagcatcctcaggagctagcttgcacgtgtaaagaaaattcgtggacgtgggaagcactggtttcacacgttgaagctggaaacaggtgcaggatggaaccggtgcacagagaaaggctaaatgaaaaaagttgtaaaacttgtctgtggagcagacacatgctctttgcaataaaccagtgaaataaaatctgtgaataaatatatggggttggcaaaatttccctatagtacagttttccacagttttctgatgtattgtcatcgacatctgttgtgtgactttgcaagggctgcatgttcagggcctcctcctcctggctttttgtcttaagtctgcctgggcacctcccttcttgtaatcttggttggaaaaagttgaaatcagaaggggaagatggctgcaactgccttgtctgtcagatgtattttctggattgtcttttggagttgaagataggtctagaatcctcctgaaaaagaagactgttaataacagaagactgttagttgtgtccaactctttgcgaccccatagactgtagcctgccaggctcctctgtccctgggattctccagacaagaatactggagtggattgccattcccttctccaggggctcttcccaacccagggatccaacgtgggtctcctgcattacagccagattctttaccatctgagccaccagggatgcccctagaatctgcctacttgtcaccaactcctctgctcccactttagttcagactgccacctggcctcactggctaattgtctcttacctgttctcctgcctttatccttgctgactctcagtggatttttcaacacaggagccacaatgtctatgttaaaatcggttttcaacctgaatggtggcttgccccactcaggggtaattcagcagtgtctggagacatttttggttgctacagtggatgagagttactactggcctctagtaagtagagagtggaaatgctgctgaacattctccagtgctcaagacagtctcacaatgaagaattatctgtacccagattgttactgctgaggttgagaaacctcatggtaaatgtatcacatcatgttctctcttcagaaccctccctggtatcagtaaaactcgagacccttaaagtggtccaaggcagaccacttaatgggcgggctccctgtcagcactgactgtgggtctcttgttgcccctggtccctctgctgcacccagcctcctcaccattcccggaacactccagacctctccacttctggccctttgtaagctacacttgctggggccagcaagtgtgctttctgtctttgtccagagagcagtagcgttcattccctccccagccgacttcatgtcttcccttaaatgtcattcctgccttgagcacactctgtgctgtggctctccgtctaaactctcagtgtcccttgccctgctcggttttccccacagtacttacattatgacctagtctatcattttctaatgggttccagttatgctatgtttctctgtactaaattgcagggtccaaggggatagggatttctgggtcttcctggtttactgtgatgcccccaggacctagaacagagtttcatcatcagtgctgttgacactttggactggataggtctttgctgtgggggctgtcctgggcattgcaggatgtttaacagcattccaggcttcttcctgctcaaggccatagcatccctcctcaagttgtgacatccaaaaatatgtccagatgccaccaaatgtccatgggacacagactcacccctgtggcagatgaacaggcctagaacaatgcctggcacaatagtgttttgttgtttgactatgtgttgttttctccctttgtatttcattctggatgggccatttgattctggtttttgcatttaaggctgccttccttttaaaataggtatccaccatgctgtctccaaagaggagtttatatattcttcatctggactaggcttagatgtgcaagtgtttgatgaggaaggacagtttcattcctaacccagacctcctagactttagcaatgtgaagccaatggatttaggtaatggaaccccactttggtcacaatgactggagaagctgtgtcatagagagacacacacaagagaaaagggtctcctgaagaaatgtttgcagtttggttcctccccaaaggtttttgaaaccttggtgtattctcctggaaatgagccatgaatggtgggtggcagaggaaaggtgccaaatatgagagggtgaacccagatatcacacatgggcacagtcaggtcagggtcagatgtggaaccattgaatgggtccctctcagggaagggactctctgtagggctttagatcccgaaaaaaaaattttttttaatatgttagcatctttcaggttcatagttcttttgttttgtttcagttcagttcagttcagtcgctcagtcgtgtccgactttgcaaccccatgaatcgcagcacgccaggcctccctgtccatcaccaactcccggagttcactcaaactcaggtccatcgagtctgtgatgccatccagccatctcatcctctgtcgtccccttttcctctgcccccaatccctcccagcatcagagtcttttccagtgagtcaactcttcacatgaggtggccaaagtactggagtttcagctttagcatcattccttccaaagaacacccagggctgatctcctttagaatggactggttggatctccttgcagtccaagggactctcaacttggtgctaaattttgtggctttgtagctgctaatgcccttttcctggacagacttcagaatttatttaatctaattccagtttctcctcttctcaaagttttaataatggtttagataatggttctttaacttcccacaaattagaaatgggaatgaaagtgagtattaggtttatattggcagggtgagataaagcaatggttcccagatgctgattcagagagacgtgtgtgaaatcgttgcagatttgtattcagatgagaaagaaaagatggttgtgtccaactcatgctcacatgcatgaatttccatgtaaagtcaccaccatttcttgaatttagtctgagatttttcctgggcttcccaggtgacactagtagtaaagaacctgcctgctgaagcaggagacataagagattcaatcctagggtcaggaagatcccctggaggagggcatgacaacccactctggtattcttccctggagaagcccatggacaaaggagcctggggggctacagttcatagggtcacaaagagtcggatacgactgaagcgaccttgcatgcacccacatcttcctattaaaaataccctttcaagatggaactgtccatcttgtattgattttggaaaattttcttgatttttctttctgtctaatctgtagagaattactttacatggagatttaagaggattgttctgtcatttctgtctgtccctaacaagctgagtgaccttggggaggctggatgacctctaaactcagtttcttcatctggcaactgaggggcctgcctcctaagggtcttaaggacattaactgtgacattgactatggaaaagtattagcatgatgctgggcacatatttagtgctcagtaaatgttagcagatgttcttgttatttctctattacttagcagtgagtcctgaccttccagaatgtgtttgcatttggttgactctggctttcttctctaaggccagcgttgttatgcaataaaattatcccaagtttagtaaaatctttttgcttccccctactaatgaggtgctgcagataaatcttttgtgttttataattttgatgcagtccttaacagtttctttatgctggttaaaaaaaaacccagaacatctgtggcatcatcacatacatacagtttcatattctacacatatatattgagtacctgcaaattcataccgatgaatgctgttaacatttactgaggccgcactgtgtgccagcccccgtcctaagtggttttacatgtgttaacttgcacaacctgcttgagatgataataataaataagagcaataatgttgtgggttataattttaaaaacaagtaacatgcagtgcttactacatgccaggaatgattctgggtattttacttctgttaactcagttaagtctcacttctaccttgggtacttgtatttttgctgttgacattttacagagaaggaaaccaaggcatcatggttagatgggcctggttctggctctggtcctgtgctccagtgcactagtctgggctgccctgtgaaaggcacggggcctgcctgtgctgcgccttctccaaaacttgcctctgtagtgggagggaagggaacacacagatccagccaaacatacaggacggagcgtgataatcaggcgcatgagccatgggaacgcaatagaggaaggggaactggggtgggcttttgtcagtaaataaggggattcgattttggcattgaatgtcaagcaatactcaaagcatagttctttataacattaaataaaatgttacatgccttaaggcatgatcttttttttttttttgatatgaaccatttttaaagtctttattgaatttgttataacactgcttccatcttggctccccgttcagggattaaactcgcaccctctgcattggaagcatggagtcttaaccactgcgcccccagatgcattcctgcctttatacttgccaccagagtcccagctcttcctcttgttctgtggtcacctggggtggcagagaatggatgcacatagacaggttcagaagtagccatgcttaattaaacacagtgcccatggctttgccacttaactgttgtgtctgtgttcacagctggactcttagcctcctagactctgaatttctttacctgtgaagtggaatctatagaagtgtcctcttaggattggtggaaattttaaaactgagataacacgtgtaaatgtgctttgtagcgtgcctagcacatgctagtaataccaattccttctcttctattttaccatgattgcaattttccccctccgcagcacaacactaaagcaagtgcagaattatgtatctgaagcaaaatggacaagattgaagtacgttaacctggcagatgttcagatcttattatgcaaatttgcttgtgtggtatgattagatggaaaacttgattaaagtgggattctaagtgttggttttgtgtgttattggagatttccttttcccgagtactgctatttatagaattatttaagtgtgtgtatgtgtgtgtgtgtttaattccctttgagttctgcagtgccgtttgcacaggctgatgtttatatctgctccagttgtgcaagaagtggaaaatatcctttttttagaacaggtcacatgtgcttactgtcaggaataggacctcagtgtaaaaaaatgtatcttgggacaaatcaaagttactaaatttccccttccaactgctttgtttcagaactggcagtattaggataaataataggagaaaattttggctaaattgtgggtttttttgtcatttttcaaggacggtaagcaagagtttcatttgttttgtgtgtgtgttttaagtataaaatgtactttgctgttaggtctgtctcatcaaagtaaattataaaaatatgtttgactcatctccaaatatgcattatttggagaaaacagtcaggaaggcgggtcagagatagtcagtgtagttgccccaagcttttcatattgtaaagacaaatgtagcatttataaggaggtttttgtgagtctgatgaacagtgtgtacttgagggcaaggaattatagcaagctatgaaggctgcatctttcctgagccaactgagggcgagaggaccagcgggcagatctgggatttctgttgaaacacccacaccctatttctgttcctaaggcctggggaccaggccccttgtgtctctaggtctggtcttaaacatggctaccttctttctttgctgcatcttccttcctgtggtgtttcatgcatgctgtgaaggttaaagacatacacctttggagtgtttgcacagaggtggaaccagggcaggctgagaggaatgcagtgcttcaggaagtggagacaatggtgagagaaagacccaccaggaaataaatgatacccaaaagtcatgagcccctgttgtcctccccaggtcatttctcaaatgtcactcagtcgctttcagcaaaggcagtataactttggggtcagagggacatggatttgtttgtttttttttttcttttctgtacctacctcatttctctccttccttacaacacttatttattaagtgcttatcgtatgacagctctttgctggcgtagggaatcaaaagtagaatcagatagactagatggtcctgtcatcttggaggtgggggatataagctaataatgaagcaaatagatgaataagacaagtgttcatgctaggaaaacgaaatagaatgttattgatagagagtgcctgggaaagaaggttctttattggatgggtctttagaaatgacctcatagaggaagtgatttttgaggcaccaaatgtctgggttaaaagtgcagatcttgctgctgccattcgctagctgtgtgactttggacaagctcaccaacctctctgagttccctcctctgtaagatggaatgataactactttgcaaggctgctgtgaagatgaaaggtaatgcatgaaaagagttactgtatgaacagtggagaaagacatgcaggcattaatcttcactgtaaataagtgtttataattagtcttaaatgtttttctaatgtccagggagtcagagatttatggttgtctttacaaatctacccccggactaaacgtggagatgggtcttggtatttttattatccttcctttcttccaggatcatcttacttgaatggtctccttgctcatttcacttttgttgcattgagatcattctggtctggccatacttcctttatgtttagtttaggaacagtttttggctgcatctttggtgcaaaggagagggccaagtcacctaggattaaaaagtaaagcctgagatcgatttcagcaaatacacatgcacaccacaaagaaatgacccatgtagaactcctgactcccagggctgttttcagcccctgggtcacacgcttcctgtctacactgatgtgaaaatgtcagtgttcctgcagaaagtaaaagaagaagcctctcctcccacacaccacttctagcttccatcagagttgacatccataggcaatggtgtgttttaattcactcctttacgaaagaaatcttcaaagcattcaaatgtcagtaactgtgttctttgattcaagtgtccacgggaaaagggtcttgggtgtgtgggagcaaatattttaaatccaaacgtggtaagttgaaattttagggaaggcactggtagaattgtgtctttctataagaaaattgtgggctattgagcaatttcaggaaggcttctgtggcctgcccccttggcacccccgcccctgagtgggagaacttgctgacacattgacacacattcccctactttccctcgaggtagagagccgatgggaagggtggtcgtccccactgatgggaccgtgtgtagcttttgtaggataggttttctttctgggaagcttaacttgcttccatgggaagaagatttgaggcagagaaaagttattgagtcccgtggttgaggttgtacatcagatcaggataaaatagataggaatgctgtacttacttcggtaccttttctgtgatatgttcctgaatattaactggtcctaaaaaagcatgcttttcaaaacatacattttatttttataactggagattggaaacttgatgaagggaaaagcacacagaaaacataaggatgattttcctgtttaacttggaacctagcgcaatccctataaagtcttacctgggcacctcagtgagatgtggccaccttgttcttcttgcctgaacctaaacagttggaggtggtattcacaggcactccaatattgtaacaatcccttctctgtcaagaggactgagtatacttctgtttaatttttttttgcatttgaaatctttaagcaaaaaatgaaaaggtattatttcagggtcagtttgctctgtgtaaactgcaagtaacttgagaaataactcaaactcaaataactcataagtctcaaataactgcataacttgagaaaattggcatctcagccaatagaaccctttgcaacaaatttataatacttggggcagagaatgactgtgaataagcataatgactgtgaataaacattaaaatagtattggccagttaggatcatttccttttaagggaaaaggatgacaccaactatgcattcttgaaaagtctgttcatttttcaaggtagagtttacaatagcttatgtaaaagagcctctaaaaatataaacagctggcacgattcctggtgacattccaaataaaagtttgcccatttgcttcaaagaagcatggttagagagtaacctctgagagaaactggcccctggcttgtggtgtatgggacaatcagtggtagactttttggaaccacgtcttgcatcaccttggcatggtcatttatccactggtgtttaggtagataaacactaatcacatcttatctagatgaaggctagaggtataaatgctaaatgacggggtcgtgaaatgcaactctgtcgatattgatagcatgtggatgctttatatcactgttgattcagaagtgaatgagagagaatttgatgccgttcgattgatcatagtatcgcagttgctaaaatgcatgctttaatggcaaggggctgaatggcaagagcaatgaattgggatttgtttctggagtcagtgatacacatgtcactctgctggccgaggtatccctctttctcactcttggtttcgtacacctgtcatctttctaatcagatttcactggcagccagctcccttgtcctcatgtgtttcccctaatgggcacctttattttgcctgcccatagtcacttttccaaattcttgtaacagccccttcccacgtgcttagcctgcatgcttgagtttcatggctttggggtggagaaatcgatacaggctcgccactcttctgtatcacagggatcagtttcagggagttacatgtagactaacagaatgaatcccaggatttgcttgggtgctcacagagagtctccttttgtttccattgatcttgaacttgggatggtggttgtgttttagaatgaagccctaacttggaggcagagaaaactaagtccttcttttgggttaatgttggttgctataacaaagtggcagatgataatcatgtaagtagtagttcctggtaggcagacagctttcctccatgtgacaaatcaagaacccaggctccttccatcttctggttctgtcattgcctagaaccctggcatcttttgtgtctggtggtggaaaggaagaggagaaggtgtaacttaagtcccaaagtgacaggcatcacttctgctcagattctctggcaaggtccagtttcatatctaggtctggatgctggggtgggaactgggaaagagagaccccagctgagcagcaaaacctcttaacttagaaaggagaacccacttttggtagatagctagccatcatcaccatggtcctagtaggagggttttggcttctgaatcgagttgtgcctatctttgcttaggtttatccttggtcttttctgttattttattttatatcttctttttctgattaaacgtggttaatttaaattttctgtcactccaatgggggccacccgagctgatccattgtctgagccccacctctctgtattgcttcctatttccagttcactgattaaaatcaccaccccatttccgaacaacaacagtacatccaccactaccaccatcaccttagtgcaatcattttcaaaatatggcctccagaccaacagtttcagtgtcccttagtaacttgattgaaatgcatatttgcagcccctacccatgaccttctgaatcagaaactgtggctggggagtcccagcagtctgtgtctttcagtaagtcccccaggacatgctgatatgcacacacttccctaatgcttttaccataagtcctgtgtctccatataggaaaaataccctggattggaatatattttgtaaaaaaaaaaaaaaaaaaagggtgttgcttgttatggtcaggctagagagggtcactgataataatcacatactgattttaaaaaaagaaaaaaggatcattccctctagaatgttagtgatcagatgtacatcagtgaaacctggtagggtgctgggttgtccagatgtgagctctgagtgacttggagttaacctggctgtgcttccgtaagaagccctctcccaggtctccgagggctgtagtttatcggagatttgcaaagtgtgaaacttgaagcacactgcagtcacttgactgaatgatttggttgagaaacagtgatggtggttttgagtgtgcccacatgaccaaattgttttccacagaacttctgctgaataaaatttgaaatacgactgtcagcctgttttcctgtcttaatgaattccagacagtttgtagaatgtgggagcttccaaaacagaggggcggggtgactgcgaccagccagcctctgtttagtcgcatgttagggtgtcccgacataacagattgtccccctcattctgaatctcaccaggccatccttctctctagaggagagggcatggcaaggccagtgttatgtcaaacaagcagggcctatagggtagatctggacttcttacttaccaagaaattcaacctcttcttatttttaatccacctaaacccaagcattttgattctttttttttttttttttgctgcatgctgaccttctccagacaaaaagccctgatgcttttttggcaaagaatcttttcttattgtaaactggttaagagctgtaaaccgtcgaagaagtctagagttctgggttcaaccttcagagtaagaaggatttttaacttaaatttcagtttgatcagctactagtttttttttcctctttgaacaagttattcctgtagcctctgtttcaacagaggactaagtggggtgagtggataatagtatgatctaagttgtaagataattgagtgaattacaaagaaatacttgacttaattccccagcccaaagcctgtgctcagtaaccaggctctcactgtgattccatctttgcccacagcaccagcagggtgcaatgcaatgaatttttgacttgaaatgaatttttactttgagacactgcactaagataaaatgactcaaaggcaatgagcaggaaaacaagagggttcacagaacagaaggggagtggggccagattatcttggttagatgatccagaaccatcattccgactcaggccaactctagccatattcttctgtagggttcttctgcctttttttgctcagtggagtcttatgttggcttgaccttgggcttctgaatctactaaccctgtgattctcaaaagtgaaaaattaaaaatgttagtctctcagtcatgtccaactctttgcgaccccatgaactttagcccaccaggctcctctgtccatgggattctctaggcaagaatactggagttgtagccatttcctgctccaggggatcttcctgactcggggatcgaaccctggtctcctgcattgcaggcagattctttcctgtctgagccaccagggattagcatgaggaactttgggagtagatgctggttgaacagtggtgaactccgggatgcctcacagggaggtatttaaagacagcacgtgctatttacgggtaagggattacttttgttgccacaatctttgcctttatcaacatgtttcctttcatcgtaatgataggccagcgaggtggaggaataaataatgaggtgcgctaacttaggtttcacaatgctgtgtagggcagcagccgaactccacggttgtgtccacacgggtgtctgtcattcccaactgtcacgtttcaacttggcctgtagtgagttcctgctttagcttttcacatttcacaagacagcctcgttatacagttacctttatccagtaaaagctgtaatacctcatgttctcaaatttcaatatctttgtatctttcaatcttgtagaattttttctgtcctagtagcaccgcgtagctattttagagactaaatatccacaccaccatgatagcttgcttttcttttctttttctccagctttattgcagtgtgattgacaaataagaattttatatatttcagttgtataacatgatgctttggtctgtttatacattgtggaacaatcaaccatggtcaaatgacacgctttgcttgagcctcacagagtttctcccccagacttgtggctaaaccaaccactgggaagcagaaagggagattagtttgaagaacctccatctttctcaggaggaaaattcccattatcttgtccacataagtggatgccttcatcagttatagcttagacttgttacctgggtaacgagggtcccggcttcattggctggctgggaaggtttggtgaggcagtgaatgcttacctgtagtaatggcgcagtggatgctggctgtacctgctgctgtacctgcattactcttgctctctgcctcctgctccacccaagtgctgctactggtgtcattgccattagaatttaggagtttacacaggaaacaaagaagtggttcatttgtacaggtgctgctgacactatcattgttttgttaccattaagcacatacagtcagttttcatgtgtttgggattcttccagtgagttttcaaacctagacttgcatttggttgtcacccaacagtcttttggaccccttaccccagctgttgcgtgtgtgcagaggaatgggaattagtttgattcccaatcagtgggagacatatcctaccagaaaccagacatatattcatacaaacacatatggaattctcaaggcagcattttttagggtatttgcagcctttttgtggtattgtctggactgtttgaaatttggttctctgctcaacagtccctttcctgaattttataaacagggaaaatgacagtttctctctttccatgtaattgaaatccaccccccctgcaccacatccatactcacacccccacagaagtgaaagaggtggtgagttggatacttgagggtgagatccagtgtgtttggggaattcctgagcatagcacaggatgaagcctgagaaggatggccagaaactgcccagcctgatggatttctgagctcctcattctagtgagcgaacaggatgaattggctgtttaggctggagtggaaaatgaagacacacataactaaagggaagaggaaatgggcaaggcagtttggggagttttcagagtacatttatgtcttgggtgtctcaacagatggacgtgaagagctctaactcttcctctattttcttagagtcatggtttgggaatgatttggaagatccttgggcaaattttcctttcccatgaggtaaaatgatattcagtaaatatttattgagtctactgtggagtctagagatgatggtgaacaaagagggtccaccttaaactgttgttgcttttggcacatgcgtggctgcccagggctaacacagaagccacagcagatcatcctgggccagaggaccccttcctgtggggggagaaaggcgtgtacttgggctcagttaccctgtgaaagaaatacgcttaagtgacatatttattaaaggagagtagtgtgtcatttggggcttctcaggtggctcagtggtaaagaatctgcctgccactgcaggagaggcaacagatgcaggtttgatccctaggtcgggaagagcccctggagaaggagatggcagcccactgcagtattcttgcctggaaaaatcccgtggacagagaagcctggcgggctacagtccatggggttgcaaggagttggatgtaactgagcaactgagaacacacacacacaatatgttatttaatccaatatatccaattattaccaagtcaaaatgtagtcaatataaatattattattttttgattgaggtgtaattgacttataacattatattagtttcaggcacacaatgtaatgattcaataattgtgtatattggaaaatgaccaacacaagaaatctagttaatatccatcactatacatagttagaaaatttttttttctaaaaatttttttattggaaaatgaccagcacaagaaatctagttaatatccatcactatacatagttacaaaatttttttttttctaaaaatttttttcttgtgattagaattttttaaagatttattctcttagcaacttataaatatacaatacagtattttttggttttttttttctaatttttatttaaaatttaattaaaattgaagtatagttgatttacaatattaaattagtttcaagtatacagcattatgatttattatttttgcaggttatactccattaaaagttattataagataatggctatagttccctgtggtatgcagtatagccttgttgcttattataatacagtattattaactatagtcaccatgttgtacattccattacatgacttacttatcttacaactggaattattttctctttgactaccttcactctttttgcccacccgcacaacccctgtgtctggcaatcaacattctgttttctgtatctgaagccactccccctttttttaaggttctgtatgtaagtgagatcatagataatgtaagagatcatgtatagtgtaagtgagaaacatattttaaactgatttcactgacgacagcctttagctgtcaccttgtttgaagcccttatttaaaaaaggacgtgtattttaagaaatcaagcatcttctacctataaatgtgttgataggaaatatttattttatttctgtcagtcacctgaaagaggccccaggaaacatgtaacttataaattccctgggcacctacaggatagtgaatgtccaataacaatttcttgaataaagaacgaccagtataaatgggcttccctggtggctcagatagtaaagaatctatgtgcaatataggagatccaggtttgatccctgggtcggcaagatcccctggagaagggagtggcagtccactccagagcatagccaaaaagaaaaaaaaaaaaagattgattcattaacagaggagcctgacacgctatagtctgtggggttgcaagggtccaacatgacttagtgactaaaccatagcattgaactaagggctaacagagtcatgtctgaaacgagattatctaatacctgtgctttctccataagatacctcacagtcttctcattctcagcaccactagaggacagctcggcactagcaggggcttccctggtggttcagacggtaaagaatctgcctgcagtgtgggagaccggggttcaatccctaggttgggaagatcccatggaataggaaatggaaaccccctccagtattcctgcctggaaaaatcccaggacagaggaacctggtgggcaacagtccatagggtcacaagagttagacacaactgagggactaaaccaccacgagacttgggggttgttggtaaagttaccaacagaaaacaaaagaatgcaaatagcatagtgctaaatgaaccccacccccaccccaagacacttgtgaaaactgaaacgaggaggccgagtgttgccttgtttgacctcagttggaaatgcatgtgtgcgtgactcagatttctcacttctctgtccacaaatgactgtaaaaatactgcaaatattaattttggggttacaagtaagttttagtgagtcggtaaatttgcaaatagggaatccgtgaatgatgaggagtggttgtattaaaaaacttctctagtggttctttctctgatctaaaaagcatctcactggggaacatatttttaaacaatgtctgctctgaaattgttgtggactaaacttgaagccacaataatgaaacttttccaagcatctgatcttctctttttatgagtttatttatcaataaaaatggtttatcacttccagatctttaaagttgggtggggctgttcagatatatattttgatatcattttttttgatataatttctgttgttctttagaagatgaagagtgagaatatggaccagggaaaagagtacagaacaatggtggcgaccactgctacagaatccagcagaagacaataagatggcttagaaattctgcaggcagtttttgaagttaccaagctcagtttagtcatggcctagaagataaaggtgatgcttttgacttcccagggtattgaaaattagcttattttaattataagcacagtcactattataaacattaattgagtgcttgttgagaatgcttggaattcttttaagaagggggaaagaaaagaattgttttcagtaggtccagtagtttcgagtggcacagcagatagatcatacagtttaataacaaagaaacacaaacaaaaacaataatagcagtagcacctagcattttcaaagtccttactacagactgtgtcttgtgtcagtgctgtaatctcatctgcattttggagactgaaacccactggggttaaagtaatgaaaattatagacaatagagttaaagtattgaacgttgccatctttttctgcgttccatctgtaccttttgcacttttataatgtatccttgtgtattataaaaagaatggcttccttattaatagtttgtgtgtgtgtgtgtgtgtgtgtgtgtgtctccctttgtctctctgtcttagtcctgggataaggaagttacctctgtaattttttttgtatttttcatgtattagaaaagtaagaagccaaactagctcagatctagctcagatctagtttacgtacaagtttattgagacatctactagctccatttccaatgctttgtataatttaattctgtgaggtaagtgtatgtgtgtttagttgctcagtcgtgtctcactctttgtgaccctatagactgtagcccactaggctcctctgtccatggaattctccaggcaagaatattggagtgagttgccattcccttctccagaggatcttcccaacccagggatcaaacccaggtctcctgcattgcaggcagattctttaccgtctgaaccaccaagggaagccccataagataggtaggataccattttatagataaacttaggcttggccattgtaagtcacttgcctgaagtcgttcaaataagggcagaaccaagacttaaactggaggactgtttgacttcaaagcttccccccttatctgccctgctacagtagttgctgttcagtggctatgtcctgcctgactctttgcaaccctacagactgcagcacaccaggtttccctatccttcactatctcccagagtttgctcaaactcatgtctgttgaactggtgatgccatccaagtgtctgttgtccccttctcctcctgccatcagtctttcccaacatcagtgtcttttccaataggtcagctctgctcaccctgctgcagtggttactgtgtatattgaggcatggaagggaaggctggataggaagagatcaggggcaacaactcatgttgactttggaagagaaacaggactaggtgtctgatgaagtaaagagagactctgggtgtggttgaacatcttaatccaagataaatagatctgtttattaaaggtgctcaccgaatgcttggctgccttgtcctttgttttcaaagctgtttctgatgattgaaaagaggtaggctgtgaaggcttcaagaaaggtagcaaaagatgggatggtgtgaacgtagtcattcacagggctgtggtgtgtaagttgtaaatttttatcattcccactaaagatcttctttgaatgaccttagctggtgacaggaaaaagtcttgtcttcatgcctatccttgtggtctcccactgaacacatatagttcctaacatcttggtattttctatttgtctctctctctcttttccccctctaacttgacttgttaattgctttttgtgtatgtctttatgaagttgtagccagtctattatgttctggagtgtttatctttgaatgccaaaggtcttgaaacatcgtaagattgtgtaatgaacataacttctgccttgacatgtgggtgttaagaacattagtcattgcaaagtattgagttaaatattttcaataaaaggatataacgatctaatagagaggaagaagttataaaaattctaattgatggctttaacgatgaaccatatacacagtgggttccagcagcaatgggttagagattctcagaatgaatgtaaaggcatttttactttttattagtgggagaggagaaaggccaacaataaaaggaaaaagcacttaattctcatgtatactaagaaaaatgaaaaccatttgagttttcagcgcttctgctcctgatttagtacctcacatgtatctttaactgccataaaaagtgttggagatttccatgagatgttatcaataaggacttctgggctgcgtcttgtcaggaagcccttattcttgcaatgatctgttttctggagagtgtcaggtcatccattgcaacaccatcagagagccagggttttcctgagcaaatgagctaggtaggtctttccttgttgagttaattttatgaagagttttggtcaacattagtcattatgaaactatgtgcctgctaccctggtttatctctgtagacatctctccatggcagaagatggaatccttgtctcttcatgtctctgagcatcagaagatgttagagttatatttgtctgtttcttgctagagagtgttgagtgggtactggtcttctctgaactaaacagggaacattgtttagttgagtgtttggttatcagcactctcttatttgggatctagtggtttaaattggagacactgtgtgctacctgtcctttgccttgccagaaatattcagtcattctggtaaaaaacttctaagctaaataccttttctttcctagagaagttacatccaagaccttgttttaatttcaaaatagagagcgtaaattatgtctgtggctgctgttaaaagtttctcaacagactggctgtcctcaaagggtgtccgagtcaactatagcacttaggggaaaaatgttcatctccaatgtgatatcatttacaagtcgataattgtcttcaagatcaatatatgatattttgggtgttggagagtgtgtggaagggaaatctcacatctgtggtaatatttctggaaggattattgatctctggtcctcctatatgtgatactcaatttatttgctgtcattattcattgaatgtgtagataaggaggttgttttgaatgggagccaagcaacctgttgatgtaaagtctttttttaccttttatgattcccattgttagcacctctctccttgctggctggattccctgtcattttaagtaggcagcaattactggtttgttcaagaagttggctcctgctgccaacgatcctattaattatcacttcatctctcatttagtcttcttagtgttgagagagggtgcatgtaagcgtgtggccaagcagctacagtcacatctccgtaatcgtctcctttttgcgacagttcagcagactcaatgttcagccaaagggctgaggcggccctggtgagtcttttcaactcttctgtaggttgttcggtcagttaaaacctcttggttggcatttgtgtggggagttcagacctgttccggatccatctgtgaactcagatgggacactgtgaaaatactgggatgattttctcagaagctgttttctctctctggggaaaaggcgaccatggaattgactctttgtcagtcttcaaagaaggtaatgtaaataataaccaaagtgacttagtttttacaagttcatgtcgttcatgaatgtttttttgaaaagtgacactctttgcgtaatgttgaatctttggttcttgtcactcatgaatagttaaattactttctgtttgtttccagaaatgtttactttacttgtttcagtgacttttttttttcagatattccactggatcctttgattagatttggagtgcttatgcttccttttccactttttctgttatttttggcagtgatggtgtttgaagctgttgaagtgattcactgcaaagtgaattaattttccacatcttcagatgtgttttccagttgcccccaagtttctttccccccaccctctcatatgattccccatccgcagttctgtcattcttgctggatccattataaatgctgatgtcactgaatttcttaaattacagctggtggggattaacagaaattgtaagcgaataccacttcctcattttgctattttcttaactaattattgtcctttcaagttctgtaggaagctggggatttggaagtaagttctctgtcttgatgttaaaatagcacttttctgttattgttatttttcaaagatagtttgatttttaggatgctccctacctaatgtactctttcttaatctcagatagactttccccacttaggattttgcacatcgagttgtcttctatcctgggtaaagggttttgaatacttcccttaagtttccttatatagaatatttttactcaacagtccttcaccatctacagactgttaatggtactaggtgaagggttgtgattcattgattttttttttttttcctccagagtcttttgtcctttaaggaattcctgcctctgtccccattgttttcttatttagaatctgaatgttcttggtgagcattcttggttgctctgtaccttcaaagatgaatttttctggctttgcagtacctgttctagcatttggagcctggagtccagaatgtcttgtcactctgtggcttgattgagggctccctgaaccttgtctaggagtctttgggacgggactttggaggccacctggatgtgtttgtaaatggtgctggagctctccaggcggcaatattgatcgaattgcagtccatggaaacagaaatagaaagggttcagcatttgcactttcctctggtggtgtttttgcttattttgtgtatttagaaaaggcagccgtatgcaaactgctgacttactattttccctggaatggaaaccatttggattatttcaatgagttttagctaagatttgtttgttcatagtagtagttttgatttctgatgtcctttttataataagacccaaatgtgtctttttactctatggaaataacgtgttccttggagccttgggattttgcaaaccatgaatttgaaaaatcatgtgtttccttcatagtcaaaatggaaactctttagtgaaaattatacgtagataatacttctttttgggtcagttactttttttgaagaaaaaagaaaatttttggctgaattatttaagatttcagagcagtcctttttcctgcttaactttcccactaattatttttttttctcatttttaaagagaaaaagattaaactgagaaattgcagacccaaagcacatttactccactatctgatgtaagatggtgactggtttttttgttgtctttgatgatacagtggatttagtttaacttttagtggtaagatttggactaggtttaaaaatagaacttccttactgtaagaactattatgcactggtttgagttcctgagtattaagataattgtttaacctctggaaaacatgaattatagggtctctgtaagcttaactaacacttccttctaacattgtgataagttctttgatgataagattcgggaatgatatagctatctgaaaaatatttcaaatatcactgtggggttgttggttaaatatgagcttttaaaagtttggataaatagaataaagagaaagaaagaatagttataatatgggtgaaatatttggaattaggtttttgttttttttttcggtgcacagcatgtgggaccttaattcctcaaccagggattgaacctgcacctcctgtgttgaaagtgtggagtcttaaacactggactgccaggaaagtacctggagttaggtattttttttaaaaaagagtttttaaattatcagggcaatgtcactacatataatgggagttttctagtggggaggtagaagttgaaaacattatgaagtggtaggaggagtcacagattaggcgtcaaggaaactgaatttcactaggttgatgactgtgaatatttttgttcatcattttatctcagcagatggcaccattcagaacctaacagtcgctcaataaatgttgactgaatgcctgtattaggaggcctggttccaggcccagctgtgccattcattaatcacgtgaccctcagctaaccattcatgaggagccatggcagatattctgcctactggtgcaggagacacaagagacgtgggtttgatccctgagtcaagaagatcccctggagtaggaaatggcattccactccagtattcttgcctgggaaatcccatggacagaggagcctggtgggctgcagtccatggagtgtgcaaagaatcagacacaacagagtgaccacacacacacacacacacacacacacacacacatagagtctcctcttatgtttaatcaaggggaagttctggacaatggtggctgtgtggtgctctgttgattccttcccccaactgcacctcagtagatgttacttatagtcacctctctttgttccatgaacctagaaggagccttgggcccttctgagttcattgctctaggtttccatgtctcactgtggacactagaggcaaaacttatttgctctctcagaagtatcttctgtctgaggtcccttactgtggctccttgatttggagttccttggtttgtttttgatacctcaatcccaagtacaagtaggcaacattctgtgaagtttcttggtcagcaggtgttcacttaaacaatgaaaacaacagtagcacacaccattgtccttcctttcaataactgttctggtagatttagcagataaatatagaacttaatgaatgagtctggacaatattcttccagtggaataagagatcaagaaatgattagcttaacagagttttccacgtttgttttctacaacccatttatcctttgaggaagggtttgttcagtaccgactgccttccaggcactgtgctagggttacaatggccagtccataagacatgggttctgccttcttgtaactcaccaaggtgaatgtgatgttaggtgtgtaattacagctttagggacaaaagatggaggggtcagttcctctgaggggagaagggaagagtgaaatctcatagaagaaaggaagtttaagtttgttatcgaaagatgatggccgagcaaatgagaggagagccttctagacaggacacttggaaatacagcccagcattttgccttttggacgtcgtaaacttttgagtgtggctggagcactagggagcatgggtggatttaagcagacggagagcactgtggctgccagatgaagagtaggctggagggtggccaaggtctggtgtcacggaggccagttaggatggttccagcttaatagcctttgtgagaaatggtgatgctcacacaccatttaactctgaagggaggtcatgactgtgagaggatacataccttggtcacagattttaagggcaatgaggacagaagtaagatttgtgtgtacactgtttactggtggcaacagtgactgctcattcattcatttatccatcacatcactgggtgcctgttttgtaccatatacccgggaagcaccatagcggataaagtagacatggtgtctgccctcaaaaagtcgatattctcatggaagacacagtctagtattcagatggtaatagattattatgtatttataagttaagtgagaaaaattctgtgtcagttctttccatagacaccctctccttttcttgcagccaactcatattctgatcaacatgttttctgttccctatcggagaaggcaatggcagcccactctagtactcttgcctggaaaatcccatgggcggaggagcctggtagactgcagtccatggggtttcgaagagtcggacacgactgagcgacttcactttcacttttcacttttatgcactggagaaggaaatggcaacccactccagtgttcttgcctggagaatcccagggacgggggagcctggtaggctgacgtctatggggtcgcacagagtcggatacgactgaagcgacttagcagcagcagcataggaacttttgagggtaaagttagataaacattgtattatatataccttgtatctcacatgcttacacacacacacacacacacactcacacactccctctctctttctctgattaaagacatctgtcttcattccagaggcagacaaacacttcaaataaggcatatgagagttcccatagtcagtctgctacaggtaaagttctggatacgttctgatattttctgaactctaatgttttacatacagtaatcctgtttgtttagttccagatccaagcagaaaagtctttgctcttgtgatctctccacacataactggatcttgaagctggctctggtggctgcttcatgtctgtgttccaggttatagcctgtgttttggattcatgtacaggaggaagaatttgcctctaggcagcaagactagttgacatcagataagtggcttctttaaaagagatgttttggtacagaaatgacagtaacaacaaattcttctccaattagaactcttctctacattctccatctaactcaggataatgtttaagattataaggagtcaaaattcagctggatgggtctgataagaattccgaggaggccattctgggtttaagcactcactgttctttgaagatgaagcattctgacatgacagtggtaattgcaactggttttaagtggcaaagggattttctccattttgcatgagttggagaggtcgtgttttattagggctaagactgaatacagacgctgcgagcttcaaatcccagccacactgatgagcagctgtgtgagtttaggcaaaatgctaagattcttggtttcttcacctgtaaaatgtggcagctgttaagcaggtaagacctttcattaaacctgtctgtatttggactctatgtctactagtctgtgacactgagcaacttgtttaccctgtatcttgctttcattaatagtcataatagtaatagttactaactcttgaggaaggagtaagaattaaatgagataaggatttggcatagtacccaacacatagtactcagtataacttacttgttatttttcctgcatcgttatctcaagtgttctgaaatgttctgtaatgctatttgatgactaactgtattctttctgaaaattaagccatcaccaaacacattcattgctctgtgatttcttctttctttctctctctctttttttttaaattaaaaaaaaaatacagtttctgagtttggagtaggattgccagataaaataatggatgtccaggtaaatttgaattttgcacaaagaataatttttagtataaactttctgccaatatttcatgggatgcttatactaaaaaattattatttgatcacgaaatttacatttaactggacactctatatttttatctgtgagatcttgcaacccgagttttggggtaataccccttttatgctgtcatcctttttttaaattttaactcactgaaaagtatatgaatgcttatgcaaacatagtgagtttactcacttggaacatgagtttagaactagttacgcaaatttgatgggacatttcctgtctgtagtaaactctctcctcctaattctttaacagtagtgggaccatcacattgagattatggtgactcctgagtagtatgtagtgaggagttgcttgaaaattctgaagtgctgttgtgtcatttctccccagagggaactgggtcttaatcatgacacgctaatggggaggtgtgaattccagagaatcctgaagacctcatcattgaaggaaattacctcattagtcttagagttgccgacctagggatgatcgtacccaatggctggctggcttttacaaaataggaaaataaacacatggggtggttgggttaataacttagagtgatttcattatacttaaaactgaagttaatttttaagtaggtttggttcttaagctattagactagttggagatgttgagaaaattaaatccaagactaagatactttccgttcaaccagcatttatttatagtatctcttggttgtcaagcaactgcataggggtagagaggaattgaaaaagttcccccagatccttagtgttgagtggagcagtaaccattatgacacaagacagaataaataaagccagggtctgggctagtaacgccagatctcagatggttgaatgtaagcagtgattaaatctgaaaagcaaatggagtaggaatggatcctactgtattaagaagggcttcttggagggtcatactggagagaacttttcaaagatgagaatgatttcatttgggaaatgaagtgttctaggtgtagtcttagcatgcagcatgaaggcagccgcattttgaaaagaatgtgttatttagacctgacaaaaatatacctagcacctcttctcttttgtgagactgtttatggtctagaagttccagatcaggaacttgacttcatgtaggaggagctggacacagtccatgagggtttcctaaatatttttttgtgcacctgctgttgctgtgagtgaggtgacctgagagacccgggcagcgcttagcgactcttgtgagtcacttcaaacgcactgcaagtcactccagttaaatgtgggtttttcctgacaggaacatttccagcgatatctctggtttcaattgggcaaaaccaacagcagaagaattcaatgagaagctttttgtgaggccctctgacttgggggaatatttgcttatgtgactttggaggccagcttaactcatctcctgttgggatgacatttgtttactagacttggccatagtcagagttaatagccttaatggttttgaatggtcccaaatggttctccagcagtgcaccattagcaagtggggaggtttatacagatggcatgttataaacacacacctgcttcagcctttgtgggtttaagagaagagctatccccatcttagatttaactatggaaatatggggaactggaaagtaagagttaccatttcagtaaatgctaggatctttttcaacagttcttttctcacaattttgctttttttttttttctttctctgaaatgattctgtatgaaattaatgctattaaaaaatggccctccctcatttggtgattatagagatcacccctgattctccaggaaattaattaaagcataacaggggattcacattggtaaacagatcttaaaaaggcatatcatgaagagcattggattgggtagcttgtccagtgcacaggagggcccactgagactgggaatggaaaactttagttttcagttatctatttgttgggctctctagaaattagcaaggtgtttagtgatccctgggatttcatgtttgcgaattagggttagcctgtgtctttcaagttcagacaggtagttcttggtggatgtttttgctatttcaggttctagtgggtaaaatacagcctggatgcaaacctttgttggattcttaaacatgaaagaccataaactgcttatgttcgcttgagtctgtctgaatgttgtcattgttgctcctttcttgatgagtgggccaaatactatgcagttttaatatctcaccttgattcctattgccttgtttttggctgttcttagtatcttcctttatatatctgtcattaagttataattgaagcttgatgttttatatttagaatgatgcatggaggttcagctgtgccagccatttaggcttcatggcaaatgttggttcatgccagaaagtttttgaaatctggtctcttttttgggatatccaatctgagcaaaccatccccttctacttaagctgaggggcacagggaagcaattcaaaggtgatttcagcatctctccatgtaagaacgtcttgttgctgataaaaattctggcttgttagttgcctttctaaccaggagtcatgcagcctcacagggacttgctctgacaagtctttgtgtcacttcgttcgtttaccgtccttcacccacagtatcagcggatgccagttctggagtgggcacatagtgatggtagatgacacccaggccacaggctgttgcccaggggctgccagaccctgtgaggcatttcacagctcttgaattctctgaatttgagcttcttttgaactccatccatcaatccatataaccagttattcaacatatgtttatgaggtttttactgtgtgccaggcactcatctaggtttgaagaacagagcagtgagccaaattgttgaaaatccttgtattcaaggagcttacatgtcagggaggggagagctgtagaaacaaatacataagtaaaagacaaatgttaaatggcaatgcatgctatagagaagatacagcatgggtgggtttggggtgacttgtaatttagcattgtgtgggcaaggaaaggcctcactgagaaatggcattggaggaaagatctgaaggagatgagagagtggatcatgccagtatctgggggggaaagctcagccgacagagggaaggattaggacataggccctgggtaagagggtgcctgattccaggacagcatgactgtcatcttggctgagactggctgagcaaaggggtaagtggtagaaatggcactagaagaaatgagatccaaatggaggaagaccctgtagacatttgtacacactttgccacttaactcatgaaaaatggagggcctttgccaattccagctagaggagtaacatgatatgatttcattgaagtggcagcccagtgtgctagggaaaacaatgatctaagaactcagagatcatttaagtcatggttttgtcaccaggtaggggcattttcgttcagcattctgagcttcaaatttttttttctctccttatgaaaacaaggctggtggagtagataattgcaaatgaccttcctgggtggtttgatacagcttctctacgttcatcaattttctccccctccccatcatcttaatgtgtttgagtatttcctgtttgtggctgattacatttctgtatatgcagagcaggacctcagacatatgaagtctgatgctaccttttattcaattgtttgtaatttttctataaacatctcacactgaaaaccttgcaaactatgaagcagttttatttattgatgttaaagatggcttgcagacttcttagcctgaattaacacgggttataacactttatcatatagccttaatactagtttttggttacacagcatagagctgatttattaatacctcactgttacagtgacctatcgattgaagtagagtgattaaccggagacagtttctgtgctcactgagttgaggaggaggagacaggtctggttaagaaagtaccgtgcaaggcggtgtacatgaaagagggcaggaagtcatggtcagcctggggcccgtgggagtcctctgcagacttaccaggtgaactttcagactagtattctttcagtttgtttgcaccatccagttagactttgtgctatgcaaggtgggaggtgccagaggccggcagcctctcttctacagccccaagcaacttgtctctgccccaaacttgcatcacactgtttaagagtttcaaggtcttacagttaaccccctttaggaggcaatataggaaccatcttttatgactggagaatgtccttggggcatctcaacctcctcctttctaccagaatatctcttccacttcttttgatgttttagcaacttacatagacaggtggccctgcgaggtgcatggctggtcagttgctctgtctcccttatggggaaatattgccccagccttggcttatctcaggcctcccatttgaactctttgtcaagagtcagttggagccccaggcatttttacccactgatacaatgtattcctggtgttctattaattggctttgtcttggacagtctagggatattgtaagtttccaggttgaggattctggatgcaacttcccaggaggtagcagggccgctgcttggccagagcagtccttccattgagtctccttgtgcgtttttgggagtgggttgctggaggcgcttctgccgccaggagttagcatagttaccagtgccaggactctgagaagaatgaggccatctctttagcaactaagctgtccctatggtggtgcttaggaggccgctgactgtgccagtgaatgctgttggagcaactgaggcccagaaaggtgaaacaactttgccaggttagtggctgagctggaactagagccaggaggtcttgactcccacggcactgcttccttttcatcttttctacctggtgtctttgcacgtattctttctgccatcttgaacactttctgagcactcctttgcctactgtctgctccactgttcagtctcaattcaaaggttgcttcctgagccacttccttgccccctcatctgaattagcttgctgtgttattcttttatggcttcctgatcttttccttcatagtagttacttacatactcaattacttacataatgatactatattcatccatgtcttcaatgtcttgtcttcccaatccatgaagtcagtgagtgtggctcttttgttcatcactgtgtgcccagagattagcccatgaatagacattgtataaatatttgttgattaaatgagtccataaatgaaagaatgattaaaaggcagactgcattttctcttgtctattcatattaaatgtctgtgcctatcctggctaagggtaacaactgttattgactttgtatattgttgaggatgctgaggatgtgatttttgtctccagatgagtctgtggccttgtggaattttattaaagttgtctctgcaaaaaccaaaaacccagtgacacacacaaatcagctttctttaatttgtgtgggcctgacatgttaggccatgatttatcagtttattttgctgtagttgcattttttattacttaattctgtttccagaaatgaggtttaattttttttttagatactgctcctttctttattaaaaatgaataatgaaacaattgctttttcttaataagattcataatgtatttttggagagatttgtttgggtttaaatgatggaacttttaagtggataggaatggaacaccaagaggtactttctgtagaagaaggagtaaagtttcaaactgtacaaaaaaaaaaggcaacaacagtagactttctctgtttttaaaaccaaattattcctagtgttcatatcgaaaagatggtcttttcccaagctaggttgtgtgtgtaatttatagagaaagcatgcattgttctgaagtatggactatggttgtacaggctcctggtagattagctcaaaggtacctgtgaatagtcacgccctagactatacgaactgaatagtttttctaacagaggcggaaagtctgatgcatactgtttcccagccattcatgcctcaggaaaggaactggggaggtggggagcgaaacccagcctttgccctttgtatcctccaatgtggcacttggctccatgaccctggacagctgagttaacttctctgagccacagaacctccatctgaaaaggggataaaaataccacttacttcagaattatttgaggatttcatgagatcatatatggaaagtttcacaatgcctagcatgtgataaatgccctggagatgtcattacttgggggatagtacagcggacatggtgatggtttaaaggtttatacctgggaggtcctggcctgggtgtgaatcccgaatctctgcagcttatcctctggaccattttgacctaataacttgcctttcatgtcaaagtttcctcatacgtagaatgagaatataataatacctgctatttcgggtttgttgtgaagatgaactgtttgtcagctcctgctacatgataaatgctatgtggatgtttgcatttgtgatcaagaaatctggcttctgctgacggatggtctaggattataagtaaggttccattgtgtaccagatatgcgactgtgaagaaattactaacttctctgagcctctgtttcctctttttttttgtagtatatggatgattctaattgcagtgccaagttttgttagagatcagagataatgtatattcgtagtgcttaacatagggcctggaccatgggagttcagttcagttcagttggtcagtcgtgtccgactctttgcgaccccatgaattgcagcacgccaggcctccctgtccatcaccaactcccggagtttactcaaactcacgtccattgagttggtgattccatacaaccatctcatcctctgtagtccccttctcctcccaccttcagtctttcccagcatccaggtcttttcagatgagtcagttcttctcatcaggtggctgaagtattggcgtttcagcttcaacatcagtctttccagtgaatattcaggactctctttaggattgattggttggatctccttgcagcccaagggattctcaagagtctcttccaataccacagttcaaaagcatcagttcttcagtgctcagctttctttatagtccaactctcacatcagtacatgactactggaaaaaccatagctttgactagacagacctttgttggcaaggtaatgtctcagctttttaatatgttgtctaggttggtcataacttttcttccaaggagtaagcgtcttttaatttaatggctgcagtcaccatctgcagtgattttggagcccctcataaataaagtctctcactgcttccattgtttcctcatctatttgccatgaagtgatggtatctgatgccatgatcttagttttctgaatgttgagttttaagtcaaccttttctctctcctcttccacttttatcaaaagtctctttagttcttccctttctgccataagggtggtggcatctgcatatctgaggttattgatatttctcccggcaatcttgattccagcttgtgcttcctccagcctagcatttctcataatgtactctacatataagttaaataagcagggtgacaatatacagccttgacgtactcctttcccgattaggaaccagtctgttgttccatgtccagttctaactgttgcttcctgacctgcatacaaatttctcaggaggtgggtcaagtggtctggtattcccatctctttaagaattttccagtttgttgtgatctacgtagttactcttgagagtcccttgggctgcaaggagatccaaccagtccatcctgaaggagaccagtcctgggtgttcattggaaggactgatgttgaagctgaaactccaatactttggtcacatgatgtgaagagctgactcgtttgaaaagaccctgatgctgggaaagattgagggcaggaggagaaggggacgatagaggatgagatggttgtatggcatcaccaactaaatggacatgggtttgggtggactctggcagttggtgatggacagggaggcctggcgtgctgcggttcatggggtcgcaaagagtcggacatgactgagcgactgaacaactgaagtgaacatagtcaaaggcttaggcatagtcaataaagcagaattagatgtttttctgggaaaaaaaaaaaaaggcaaaatggttgtctgaggaggccttacaaatagctatgaaaagaagagaggtgaaaggcaaaggagaaaaggaccatgggaaatactcagtaaatgagaggcacagcaaagatttttgttatcattgttatcactgtcacttgattgtttccattaaaaagtttttatggctaatatgtttctgtcttatataaaatgtttattctaaagtgaattccacaaaccctctatggaaatcaacgtgattaatatgtggaaaatgacgttgaggtctcttgttgatatatttctataaatggagctgtttcagcaaattgaaaatactcagtaaaagcctcgtaatttcgtgtttacaattttctgggtcacgaagggtcaaagttagtcagggtcaatgttaggtggacagttttatattcatggaaaatgactcacaggaaacattaggaactaaaatttccgtaataaaaaaacaaaaaagccatctcttaaaccatgtttaaattgagtctgtgtctatttcatatcctaactggcattgtgttcataaagttttgacattgtttgaatttctgttgttaaatctcatttagggctgataatcatacattgtaacacacgtcaccggaaataattaagtactgattccagtgctggtaacattttccacttgagtcatctgggtcactgtgtctacagtatccatatttacacctttgtgttgttttgcaatagatctttaagttcaacttcctttttttaaaaagaaataaaaccttaaaaggtagggaagcaacaacatcatttgtaatccagaactataaatgggctttgagaaaagcagggtgttttcttatgtttgacctgggagtgcctggtgtttcagtggaaggtgagaacttgcagtgagcagtcagatgtggggagaaatgcagatggttgtacctaggttgtagatcctctcaagtcaaagtatggaggtgctaatagaattcctagattctggaaggatgagtaaagctattcaatcagaaatatgtgggagaacgtcttccagatgtgtgcggatatctgctgagagtgttagttggtttgaaggatgcaacctggagagaaagttaatttgagttcagtgtcaatggaggatcttttaagccataattaggagggtggtctttattcaatggccagtgaggaggcttgaaaaagttttttattttattttatttttttggaaaaattttaaataggagccaaaggatcctgtttgtgtttctgaaaaggctctgtggcagggccatagagaatggattgcagaaggtggtgacaaagaagaccaactgaggagttgtgtacgttggagatgatacagtccaggactagcgtggcggttgtagagatggttggggctgagacacactggggttgaagaagcacagccctgggtgatcagttggacataaagtggagagagtgaggaggaaaagatggcttttagatttctcacatgggcaggtgggtagaacactagtgctgtttacagagatgaagctcttggaagagaaagagtttggggagagtggatattcttctttgtgcatggggtatgagatagaatagctgacacttgagagagcacggagacaggcatgattctagggatagagtcggtatttcagacaggtttacattctcatgcatgaaacgcaatcgccagctaacagtcacctaaacagactgggatccatttgtctcccgtacaagaaacccaggcctctgtgacccctgccattctttcagtaattccgtgatgccaggaccatccttgtagtgatttatcttggcttttcttctgttgcttttcatcttgtgactgcaagatggctgcttctcctctgggcattcagaatgaatgccagagtgctcagttctgtcctactcttgtgaccctgtggactgtaccctgccaggctcctttgtctatgggattgtccaggcaagaatactggagtgggttgccatttcctcctccaagggatcttcccaacccggggatcaaactggggtctcctgcattagcaggcggattctttaccactcagccacctgggaatcccctggtggtttatgggcaagttcaagtgccagaaattatattttgtttggatgcttcttgtctttcttgcccatctgtacagtattaaattgcctacatcattagagtctgcaatagagtcatcgttttaaaaatcctggttatttttgactaaacagtttagtggtcaggtaggaaagatgagatgccctatttaactacagtatacctagtcaaatatgtacatagacacactcagagaagcccaccgtttcctattaacatgtagattatgaagtgtgtttcagctttaactatatttttgtttgttaccttcaaacacatataactctgaattgtctttaaaacataataaacataccttttccttatctgattaaaattcttaacctgtggaagacttttgttctcagatttattccatatcttcctaattccttaaagctctctctcagtggacccctttgggattagagccaatgaggaaaattctgtttggtattcacttactgatatgcattgcatgtaaaagcagggagtgtgtgatggaaaatgtcatcccctttactatgacttttgtatctgtgaaggatataattattctgtgtttaaaactagagagaggaaatgtttgttcactcttcctgaaggtaaggttattgagggtatcataagatgcaaatatttgtcctctattctcttccagtttaactcaagagagtctccccatctaatatatgcagaattctcctagtgactgctttagctcagagtggttctgagaataaggaagttttctgtccctgaagtagggtagaaggtgcagagattttggaaaaaggcttctcaggcttaccactatgccatgtgatgttgagaatagaatttaacctctctgaactgatagatgctatgaaatttgggatgagagcaggagatagttgtatggtccctaccacataagtatagaaaaaacagctgcaacaagaatggccgggtacactgaagatgcaagtaatatctagtggagagtaggataaggaaactgggagactgctgggagactttaagaaggccttttggaggagaggactggaagctcatgtatttaataggagaatgcagagggattacaggatggtggaggatggccccaggctgagcacatagacatggtgtgcagcgtgtgtttgatgctttcagagactttctgttttcaatgatggacaaattgagaagagccttggaagtctcgctgagtttggactttgctttctaggtgatggggaacaaccacagacacttgaaaaattcatacaagtttaattttgatagaagtggattttgtgggtcaaagaatctgtgcatttaagatgtccatagattttaaaaattaaatattttgagatcgtggtagattcctaaaatgtgtggttttaagaaataacacccagagatcctgggtacttgcccagttttccccagtggtaccatccaatacaatatcacagccagaaatccactgaagacttttgagaacagtccacaatctgcctgaatctgtgttttaaatgggtgatcatggtagtgatggcctggaatggattggaggtacaacgtggagactaggagatcctttggaggttaatgatctaaaagaggacatgaagaccatggtgataggattggatgggaagggacacctgaagtagtaataataggatttggcagtcatgtggggttgataagagcatttgatgccttgtgcaattgctcagcaagtaggtattgaggactaattgtgtaccagtctctgctaaacatcgggttgaaaggtgagctgacaagagaacaggcactgtgactgaggggaggtgggctggtgaagctgtgttgcttgggacaggacagtgagcactttgcagagggggtaaccgccactctgcttctcctggttatgaccatgtgggaatgtaggtccattgtgattgataattctggtttctcataagctagaaatctagatttttatatgagatctcccaatttttaaatattacctagtacaacttggaaaaaaaaaatagcattcacctgtgggcttgattgacttcattattgccagttcctagcctctcttttctcagtgggatgtttagagcttatgtcaggaatgtctagggtttatttcagttatccactgctgtgtaacaaaatcacccctgtgtgttagtaactctttgggaccccatggactgtagcatgccaggctttcctatcccccactatctcccagagtttgctcaaactcatgtccattgagtcagtgatgctcaaccatctcatcctctgctgcctccttcttctcctcctctcagtctttttcagcatcagagtcttttccactaagttggctcctcacgtcagatggccaaactattggagcttaaacatcagcatcagtccttccagtgattattcagggttgatttcctttaagattgactagtttgatctccttgcagtccaaggggctttcaagagtcttctccaacaccacagttcaaaagcatcaattctttggcacttagcctttatggtccaactctcatatctgtacatgactactggaaagatgatagatttgactatacaaatgtagtagtttaaaactatggctgttttatctctcacacttctaaggggtgactgggcttacctggccaatttttctgctggtcttgcttggggtccctcatagaggtactgtttagttgtagacatatgatggtcagggctggagcaatctggagatctgtcttgggccctgatacatttggaattttgtcttcctgcctgtagtttcacagcctctggtagcctttccctgtggaaaggtaactggatttcttacgtggtgactcagaagatcttcagagtaaacgttccagaattgaaaggaagctaacagtctcaccgaaattaggtccagaattgccaaagcatcactctttttcttagttaatgcaagtctcaggccagcccaggttttttgtgggaggaaactacacaggagcatgaacactcaggcctgtttgttcactgactacggtttttagagaccacctacaactgaagtctcaatacccagatactggggattgtgttgatcaagacaagttggcagatcagggcaaattctcctgcttgccagcccctattcctctgaagtttttgagaatttcctgatactaagtttcttttatggtatcggtgattctggagaaatttacttttcagtatgacatactttggaaccataactcatttgtagttatttgctttctagccctttaaaaatactgctactactaagtgatgagacagactgattctggttttggttgagcgtgtgcttttcagatatgcaaccagtttattaattaatgttgattttctgatcatgtatccttttaggaaggaggccctcaaataaagtccattgaataagaatcccaagtctttactgtccaccagtagggacagctgtccattattatgacacttctgagtattcctggaagcagcaatacaatttgcaggacctaatacaaaatgaaaatgtgagacccctggttttaaaagtaagaattttaagatggtgacagcagatcatgaaactaagcccaggcccaatgcactgcgtacctgtgcaccaggctggccttgtgtagccccttgaacatgtgtgcaaatgttgcattaaagtatgttttcccagaagagaaccattgactctaatcaaattctcatttgattttgacacgcagaaaagttttagaagcactgcttagacaaatcagaaaaagtggaagctttgtgtctgaacagccctctgctcccaagcaggcactataccttttggccacagcagccggtcttggctgacgttaggctgaacattctgccacgcagattcctgaattccagggacaccagcgtcgtggggatggtctatgtggctgagcgtttcacaggttgtctccctttttactgaactctatttctgaagcatacaaaatagattacctgtgcaagcgatgggcatttacgttcctttgaaacagatattagccccgtttgttaggctggggatttggggatcaagatttctgggaggcagccggtggactccagataaggctgccgcattgcccaacttcatagggtttatgcctttatgagagctgccgaaacacggtgccatggactgagtggcttgaaccagagaaatgtgttgtctcagttctggaggctggaaatctggagttgaggtgtcagcagggctgtgctctccccgaacgctccagggagggatctgttcccggcccctctcctgtcttccggtggctccttagcttgtggtgacataattgcagtcttcacctggcttctctctgttcacctttcccctcctgtggaaggacactggtcatattggattagggacccattctactcccgtctgtcttcatcataactaatggtatctgcagggatattatttccaaataaggtcacatttgaggtgttgggacttcaacataaaactttgaggggcacacagttcaacccaaggggtattttccaattgtgatttaggaatggcagctccaggcattctgtaccgctcagcccaagtggccctacatggagggcttgccctggaagaacctcaatagttaagagaggtgtttgtgaagctggcttttaataatacatgagccactttgaattacttgtttgggcccttgatcgggagcatcataaactcttaaattttttttttttttaatcatccctgtcaatcagtggatgcgaaggtcaaattactgtcatgcctacattcctgacccttataatagaataataataagctaacatttattgaatgcttattatgtgctaagaattgcatgtgttatctagttttatcttcacaacaactctattagatagttactgttattcttccagttaacaggtgaggacgctgagatcaggtgtggttgtgtgacatgcccatagtcacatagctaattaaatgacaagctgagatttcaatccagttctgtctgatttccaaatccaagcaacattgcagggggtgcaccctgtatttttagaggaatgtttgcatgtaacagttcaccatttaaagcctgttttatcatgggccttttcttttttctagatcatcctaatgaaatattctccatctatgtttatttgactcaggattcttaacctttttcagagtgaccatagggccttccataggttgtatttctatctacttcagtaagggtaggaattttccatttgaattaattgaaattacaaatggtaaacagtagaagagattatattttagctatgttttttaagagatccttaaaagaacataaaagttaactcatttccttgacattggtgagaatagagtcctaaacctcactagagaattccctagtactgataaggaaatttattctcatctcatttatgctgctttcagtataatgtgctatatggtgagagtggagacaagttctctcgaaaaacacatttttgctttcttccttctttcccaggtagcaactgaaattctctttctctgtcagagtgatagtccagttaaatccatgcatgtagatacatgggttctttcctccaagtgtgagaacagtgctgttttggaagcagagacttggtatcctctgatggtttattttattcttgtttagttgttaagctgtgtccaactcttttgcaacctcatggactatagcccaccaggctcctctgtccatggaatttcccgggcaaaaatacgggagtgggttgctatttccttctccaggggatatttccgacccatggatcgaacccatgtctcctgcattggcaggcagattctgtaccactgagtcacctgggaagcccctgttggtttttggcaagttcaagtgccaaaaattatattttgcttcgatgcttctcatctctcttgcccatctgtacagtattaaattgcagacagtatgatagtcatctttttttttttaatccctgttatccttgactgatagttcaagtcaggcaggtaggaaagaaagatgaggtgctttatttgcttgcagtatacctagtcacctgtttacatagaaacacatacatatatatgtattcacacatacatatacatacacacgtatccgcataaagtctttgttaaaatggcatgtcagctagtgttgctttcagaccgtaaaggtaaggtaagtaaagtcactcagtcgtgtctgactctttgcgaccgaatggactgtagcctaccaggctcctccctccatgggattctccaggcaagagtactggagtgggttgctatttccttctccaggggattttcccaacccagggatcaaacccgggtctcctgcattccaggcagacactttaagtttcagaccataagaactgaatattttccgactctagttgaattatttatcagggtctgtgggataacttattatacttatttgcaaggtttggataaaggctgtcttgaataatccagaatgtgtttcaccccatgtgtctaaaagcaacatttcacacagtgtagtcccaggatcacctgtttcaaaatctttgggggcatggtcaaaatatgaattcctgggccctggtactgcagcctcactggtcctggtacnnnnnnnnnncactggtcctggcaccccagcctcactggtcctggcaccgcagcctcgctggccctggcaccgcagcctcgctggccctggcaccgcagcctcgctggtcctggcaccccagcctcgctggtcctggcaccccagcctcgctggtcctggcaccgcagcctcgctggccctggcaccgcagcctcactggccctggcaccccagcctcactggtcctggcaccccnnnnnnnnnnccccagcctcactggtcctggcaccccagcctcactggccctggcaccccagcctcactcattccgggtttccagggaaccattttgtccggctcctttgtgactcttcaccacaccgtcgtttgagatccatgatgtgaaatgtattaacaggagaataaagagtaaatttaattttctctgtcctggttcattttcctcttttgtcatcctctttcctgtcttttgtcttccaccccctccgtcaaatatattaaaagtatttcaagagctattctaatggtgtactttaaaaaaattgttcataaatgtcttttgtttattttagcaatatcacgattccatctttccttttgtggtgtgtataaaaggagccattggggaagagtgtttgttttcttttaaatgccctctattctccacagtaaatctccaggaaggaacaacatgctgtttgttcttttctcaggatgaaccgtggctttctttgatagtggatattgtcatcaatggtttcagcaacttatgactcgtcctttttataaatcccagaatttagtgcgtgcgtgtatgctaagtctcttcagttctgtccgactctgtgcaatcccatggaccgtagcccgccaggctcctctgtatgtgggattctccaggcaagattactggagtgggttgccatttccttctcaaggggatcttcctgacccagggatggaacccgtgtctcttaagtctcctgcatcagcaagcagttctttaccactagagccacctggaaaacccgagtttctagagcctgctttttggggtgagtgtaaggaatcaggattctctgagaaatccttttgtggattttctgggatctcagaataggccgtcacaactccctcagtgtatggtgtcaagaacttaagcctctaagtatatgaaagagtcgtaaaactagaggttttaatggattgttagtaataggacatttttaaccaaaagtattcctgacaggtgaattccctcccttcctctcccgtattagagaaatccctttgttgtgaagctgaacaagcaagattgtctccactttaatccgtagtaaataacttgttggattccaagagagtagaaattttccaggtgactcagatggatgcttctaaaggtatccagacagtggattatccactttctaatccagacagtgatgttagaagcagattcttctataatattcttctttattataaaaggaaaatcatcacttatgtgttacaaagtggagaaactgtgtggtgtttccttctgaagtgtcagattcaaggtctgtttcctcttagagaccctcaggttaatctccagcattttgtattccagcctgggaaagactggcctggactgtgggctctagcacctcactggttttgtatgtttggactggttaatacaagtgaccacctgttatttttttgtccaagtgctgtggttggatttttctcctccactaatggtacaaatctcttatctccctgctgtgtctctctgatgaaagctttgtactggcagagaacccttggtggcagagctgggctgatgaatgtggccctgactataatttgagttgtcccgggaggggtttgagcgtttctcatgaggactcaatggcagtgagtcaccgtgtgctggggtactggtgtcgtgaaataacagctgtggcagcagcaacaatttagtagcagtcgctggttgagcatttattgatgctcccaccttgcccgtcacgtgtgttaaatagcacttaaattggcagtagtcccatgaactcagctccatctatcatctccattttacacataatcgtctcaaagacaggagactagtaagaagaagaagtggaacttgaactctgatctcttgggtggccacacgtgtccatttaacagccacactacattctttctgactgaagtacacattgttgccagcttccctacccgctcttaaatcacatcatagtcagtttttacttagcagttttttttactgagtaatccagggaccgatgactccctttccttatttttcatttattttaagtgagagagaaagttcaaccttgggaaactgagcatgaccttcagcctgagaccatgtccatttactgaatcctcgagggataaaaggaatcttgtcagggggagggttgggtaagagaggaagaggtagacaggtagacacatccagggagatttgtatctccttagaggagcaggagggacattaagtataatttaagattatagttcagaggtcagccaggtaataatgctaagggacactttatgcaaaaaaaaaaaaaaagttctctggtcaagtaaatttagtaaactaccttctaacatccagttaaaaggcaccaacaaccaaaacaccaagagcacctcacacttactaaatgcttcgtgtgtgcacttttaagcactttgttgtaccagtactataaggtattattttgatcccaattttactgatggagaaaggtcatcctgctattgggtggcgggggtgggagcctaaccaaagcagcctggcctcaggcactggactcctcctcctagtacctcttctggtgacatctcctgagcatgaatatatgtgccagcccccagccttagttgctgtgtgtgtttttgtttacctgtttaaccttctcaagcatcataatgtgcatcagcatattaaaggttctgacgtgtccagcagtcaacacacttgttagtctgtgtccagtgtttctgagttacttcactacaggattcatctgcctttgtcgagcaggaggaatgaagggaaaatacctgcgtgtgtgcacttggggaaaagacaaccaagagaatgattttattctgactttgcttcctccccagtgcagttttgagacatgatttattttcaaaacagagcagactccctgagaatgtggctttattatctaactgcccagtgtttggtgaccttcatcagggtgccgtcttgcttcccctgggggcatggatacctgcttctgtctactttatgggaatcttgacagtaaatgaccgtaaaactctttgagctgctttaaagaaagacactattgaagtccaaggtcttcatgatgtcgtatcaaatatccagacttccttcattttggttaactttgaaaaataaatgtgtgtcctagcaggacagattaactagtttagctcatcagagggagggaagaagatagagctgcaaaatgtttattgctccccagagtcaaatcttcaggcccttatagcctggcacagagatgcttggttacaacaggagcaatgttgatgttgagttccccataagactgtgggagccttatgtttgtgtgactgactttgtccttccgagctccaaatatctgaggccagagacccaaatgcatatgtctgggcatgcatccttggtagtgtatgcttttttaaaagttttgttttagctgtatgattgtaccagtaaaaatccgtttttatcagtgtactaggtaaaaatccatttagctgtaaatgacaaaatccagctcaagcaagaaaggagatttactggttccttgaggtgaagagtgcaggtccttttagggttggtttgaacttaaggatggttttgacccataggcctggtgttagtatcatgggcttgatttctgtgcatctactgtgccttcatggtgacatgtcacctttagtctttttttggttctatctcatgtccagatgtctaccagatattcctgaggctactaattccctttagtttatttttggttctacttcatgtccagatgtctgccagatattcctgaggcagtttattccttccacatccagagatgagagagattgagagattaggtatatttctggaggctgtttctgaatagcaagaaagaagatcaaaccttttttattacccagacttagatcatgttcccatgtatcagccaatgcctctgatgaaggaatggctttagactgattctgccatgttctactcctgcgttctgaggtggcatgtaactttgcaaaggaggtatggaaaatcagatggtttccacataagtgagaatggatgcagggttaaactttgagactcatgacacactttacctgacagttttctcttatacactcatgttagcagttacatgtgaaactggccagttaatgaataaaagacctaggtcaagatttaacttacaggggatttagtttcaagctctctctctcttagtaatacaggctacaccagatcaaattgagggattctcttctttttagcttgttgaacagtgtggtgttttggcttttaatttgtaaagcattaaattgagtctctgtctgccagtggtttttaataccaagtgcgttttgggtgagtgaatctgaggtttcattaaggcaatataaatgaccctagctttattattctcttcttcctattgatctcagtgtgactgctccttgcttttgacattgaacttcaagctttactaaataaaggatatttgtttccacattggtctcctggatgcctgacattacattttatttcataaaaattatgccaccattaaaaataaaatcattaatattgagaggcataaattccaagattgatagtagtagccggaagtgtactgagtgctgactgtgtgacaggaaggcactgcgctcagtgctttatctgcagtgttctgttttttcatctcagtagccctgggagatgctatcattacttgcattttatagttggagaaactgagattaaataacatgtacaagttcacatagagaggaaactgtggagataaaatatagatcttttgactctgagtcctgttctcttgatcactattccctccactattttcaaagccaggatattacatccaatgttaatttggaatgttgggaaagttgcattatgtgtatgtctttctgaagttagtgcttctatagactagttgtggtagaggattgaaaaagagcatttcctagcatggatcttggaaaaacaccaaagagtttttcataaaaaatgtgcattttccctgatagccaaaacaattttgaaaaagaaaacatttggaggactcacacttcctgatttctaagtctgctacaaagctacagtaatttaaacagcatggtaatggcattaagacacacagattgagcagtggaatagaataaagagctcagaaacaaaccctcacatttatggtcagatgatctttaacaggggtgccaagattataaaatggggaaagtctttaaccagttgggttgggagatgtccatatacaaaaacatgaagttgtgttttgccatatgcaaaaatcaactcaaaaattaagatctaaatataagatacagcactataaaagtcctaaagcagaatatggaggaaaatcttgatgacattggactatacgatgatttcttgagtatgacaccaaaagcacagacaagaaaaggaatgataaactagtgggactgcatcaaacctaaacccttttatgcatcaaaggacataatcaatagattataaagagaagctgtggaattatagaagatatcagcaaatcatatatctagtagaggttaatccagaatgtataaagaatgtctcgactcaacaacaaaaataatcaaccctattaaaaaatacgtgaaggacttgaatagagatttctctaaagatgacatacaaatgaccaacaagtatggaaacagctgtttaacatcattagtcattaagagaaatgcaaataagtcacagtgagctatcacatatcacctgttaggatgacttttactaaaaacaatagcaaacaagcagctacccctcaccccttaaaaaaaaaaaaaaactcagaaaataacaagtgttggtaaggatgtgaaaaaatttagatatcgtgtacactattagagggggttgtgagacggtgcagatgctgtggaaaacagtatggtggttcctcaaaaaattaaaaatagaactgccatatgattcagcagttccacttctggtatatatccaaagtaattgaaagcaaagtcttaaagagagattttcacacccaggtgctattcacaatagccaagaggtagaaacaactcacatgtctattaatggatgaatggataaacaaagtttggcatatacgtagaatggaagactatttaaccttaaaaatgaaggagttctgttacatgctacaaccttgatggccactggtatgtgaagtgagccagttacaaaaagagaaatagtatatggtttcacttatatgtgataactaaaatagtcaaattcctggaaacagaaagtagaagggtagtaaccaggggttggaggaaaaaggggagttttttagtgggtattaagtttcagttttgcaaaatgaaaaaactttggagattggttgcatagcaatgtgaacataattaacaccactgaacacttaaaagatggtaaattttatgatgtgtgttttttaaatcagaattgaaaaaaattgtatttgtcttctggtactgatttaagtacttaattgagttatttgaacatcttaaaagttataaaccctgagcctacaggctgaatatggatcacaggtatattcatatagactcataatcttttttttttttggaggggataaaatgtgaaccagtggtcatcattttaaagaattaggaaatttcatgttaaaatctctgcttctaagcttctcttggagaactggaaaatctgaactttgggccttgtctagtcaacaaatgactggaactaaggagcagccaacctctttatagacagggcatgaaacagactacattttttctcattcccttttttttccccttatatcaagtccaagggctcatgtacagttgatccttgaacagtccagaggttaggagagcccacactatggaaaacccatatataacttaaaattgcccctctgcacctgcagattcattcaaccgcatatagtgtagtattccagtatttactattgaaaaaaagttcaggtggacacatgcagttcaaacccatgttgttcaagggtcaactgctaacttcctggtctgtttgtcggttttaaattaaactccttaatccctaatgccctattactactggtgttgtaccgtgcatgctgtgcatgtcctccactaatcagtgtctgccttccctaagtagcctcttctgttttaggtctgagagttctgatctcttgtctttaagaacaatatagactcggtgctttttttttttttccccttttttcctttagctgttttgcttgcagcaaatgtcctaccagtcatgttctaaatatagatgtgttaaatttcaaatgtgaaagtttttgatgggtctgaagccagtttgctaatcagggcaaatgctatgattggcgccagtgtttacagaccctgggggtattgtgaaatccgccttcgccactgtgattcagctcgggggtggaatgaagctccctgacccctggaaagttctccaagttgtttttcttctcaatagtggggtgattcgttgaatgtcataacttagaaaagtacgtgttccttagttcattttactagtgctggattactatcaatagtatggtcataaataatttttgcaagcaaaaacaaatcatatttttttctgatcttttcatgtacaatcagtaaggaaatgtctatttattgaaagaaatctagagacccaagggcctgcctcttcatatgaaattaaaaatagttacttgtgcaaagtgtaaaaattttggttattggaaagttcagactgatccaatttttaaaatcttgtatcttttaagtctaattatttactctttaaagatagggctagtagtgtccattgtaaggaggggcaaaatactcaagaggcatcagttgccaaaattttcaaagctactccctgcctaatattcgtgtgtgtctgtgtgagtgtatatgcagggagcactattagaaatgcctgtatgtttcatgctgggtctgttttgtttgtgtcatagaacttgaaagattcattttcgtgtgttgaataatagtgagcagcagtggaggaaccttagtctccagtaccagtagagtggaggtattcggagaactttctgataatgagaattaaagtaattaagttgctgtgccctgagactctgaatccttatctccccttgccagaagtgaggctgtcatttagagaagtgggtgtctctgttactgaaatgagatatgactgtagttgatcccatcactctctggtgcagaatttttcaccccgagcagcagatcagagaaatcaaacagaacaagccagttaaaccacactgctttgctggctgaagggacccaaaagtaaacaaagtgacagacttttggagttcctttcccaaatttgatttccctgtttttatccattaaattggtcaacagcagcactcactggtaaaaaacaggaacaacagattcaagttttgccgtcagctacactgtagtgttgttctctctcttttttccttcccctcttttctcttcctcctccctttctttgatctttctctccctccctcccttcctcagttcaattttctgtatatatatatatttaaattccaaaggaataataacataaagaaaaacatgttaattttcttcctcaccatcttgaatccagccctgctagagaaataatattaataatttgttgtgtatcatcagtcatttccttgctcaggcaaataagatccgtagatagaaaagtttgtttgaatttttagaaactacttaatctgtttatttttggctgcgctaggtctttgggactttgtgcaagctgtctctagctgtggcgagcaggggctgctcttccttgtggtgtgcaggctactcttgctgcagagcacaggctgtaggtgcatgcatgggcttcagtagttgcaggataagggccctagagcgtgggttcagtagttggggcgcagggacttagtagctgcgggcaagtgggatcttcccggaccagggatctgaactgatgtcccctccgttggcagtgggattcttatccactgtaccaacagggaagtcctatttgtttgaattttcacagaaatggactcatgttgtgtgctgtaactttactcacctgacgctactttgtggctatctctccaaatcagtacctttacctaaaaatcgttactttcagtgtggtatatttcatagtatgattttatcattcttcatataaatcccccattgattaattcagtttacagattcctcctcacccccgactaaacaaatagcgttgcttattttaactgcatatatatatatatatattttttttttttttgaaaaacctttaccctgtgtgatatttgaagagggaagttatagggctttttatttttgttatttgtttttcttggggctagtagttactttatagtgttgtgttaatttctgctgtacagcaaagtgaatcagttataggtatacatatatctactctttttttaaaaaaaagtatatatatatctactccttcccacttagatcactgcagatcattgagtagtgttctctgctatacagtaggtctttattagttatgtattttatacatagtagtgtatatatgtcaatcctagtctcccagttctcctccaccattgcttggtaaccataagtttgttctgtacatcttgactctgtttctgctttgcaaataagttgatttgtaacatttgtctagattccacatataagtaatatcatatggcatttgtttttctctttctgacttatttcactctgtatggcagtctctaggtctatccatgttgctgtaaatggcattatttcattctttttatgactgagtaatattccattgtatatatgtaccacatcttctttatccattcctgtgttgatagacattttattttgcttccatgttttggctactgaaaataatgctgcaatgaacatcagggtgcatgtatctttttgaattatgtttttttctccaatatatgccgaggagtgaaattgatggatcgaatagtagctgtatttttggttttttaaggaacttccatactgttctccatagtggcttatcaatttatattcccaccaacagtgtaggagggttccctttttctctacaccctcttcagcggtcattgtagactttttggtgatggccattctgaccgtatgaggtgatacctcattgtagttttgctttgtgtttctctaataacttgtggtgtggagcatcttttcctgtgcttttggccatctgtatgtcttctttggtgatgtgatttctctttatttttgctcatatgtataccataccatattatatagaacagggttgccttacatcataaatcacatacatttcatcacctttgtttatgaaataattttaattatcttgttattttcaaaggttgaatttagttggtattcctttgaagagtatggcagttgttcttttcaatggaaaaaggagatacgatctgacaggattttttctttcagtgccttgaggaatcttttgaaatgattttccaggtagtaaaacctttaatgtcctttggattcactgtagtttgtgaagctgacaaacaacagctctttgggatggttgtgaaacaaggcctgggacagactgacttgttacttagtctgcatctgttgccttgacaacaaactaaacatttaaaaatacttcggcaaatgccataaacaagtgatgcttgggggttacactattaaagcagaagcaccaagaccacatttagacaataaaggttgcaggaaaaatacccactttttaggagatttttattgtaggtttttctgtctctgataaacactagatgcattagcaaagagaaagtcttctgctctaagttgagaaattactttcaattgcagtatgcagcagtttgcactgtattttggcccaaaggataatgcacacctcttttatttggctttcctcaaagcagtttagtgccatgtgaatgaaaactggattagatctgtcacagcagctgaaggttagggtgacacagggagagataaaacgccaatctttgtgcctaagtattttttgtttaacctgtgctctcacattcttcgtattcacagaggtacttgttgtctgggtggtgatatctacaaatcctgtaaatgaatatttgttatagcatctactattatactaagaatcattcattaaataatttgggggagtgagtaatttataggaaaaaaagggattcttttggccaaacaggaagagtattcaattttgctggactcagtgggagggaaaaacaatcctgttgcagatttctgtattttaagggatgcagttcatgatagttgaataattaggaattcaggaatcctcgctcacgcttttctgttttcttaaattctcatgatctaacattgttctgtttggctataagtaacatttattttcagtttgattttgaaatgctgatactttcagtgtaagtgaaagtcgcttagttgtgtctcactctttgtgactccatggactatacagtccatggaattctctaggccagaatactggagtggatagtctttcccttctccaggggatcttcccaacccagggatccgagcccaggtctcctgcattgcaggtggattctttaccagctgagccacaagggaagccctaaaatactgaagtgggtagcctatcccttctccagcggatcttcccgacccaagaatcaaaccgggatctcctgcattgcaggcagactctttactttcagtatacaaatagtgaaaaataatacaattccacatatggctttcattgtcaagatcatttcttctgcctatcttggtggaaatattcagtattttttcatctaaaaccaaggttatctttatgagctgtcagggctgtggtggcatatgtaatgatacaaatctgggactcccagtgctgtgggtcagagattacaataaaaatacaagtgtaaatttctgaaacaacgtgtactctagattttccagaggcctttaaacagattatagatacagcagtgactcacagttttaatcagtctctatcttgattgaaagaccctctcaaactttgctgtcttcactgcattcagatcccacttctgtggcttactgagctggaagctgttaatgggtctcgtttatgcccacagctgacctgcctcagcctcagtttctccatgtgtaaagtggtgatgctgctgcccatattgacaaaattgttggaaagattcaaaacccaactgctttttaacatactagccctgtttctggcttcttaataatggatatttttacattatttttatggtaaataaactgtgttgtgtttgttaatctgcctgtggaagccaggcagatttattcagttcctcttgtatcacatatcagaggcatggaatctcatcgaggtcagtgaactccctctgagtctcagtttcctcaattgtaaaataagaatactaatatttaccattcagagttgtgaagaaaaaagaccatgtttttatagtatatagcacaggtctggccatgtcataaccatttaccaaatgatagcttctgttgtcactatcattgttattatcatttttattattatttgacaatatgtatatatcgcagaatttctgccgccatttctatagcctagctactgttatctctccctgggttgctctcatagccctttaacccttctcctgatgctgggatgcagaccctccatcataatctggccttgcccttcccctcccacctcagatccccacattgctttgcaacagatctttctgtgctttggcctccacagactttatttcttttcacatgttatactactttcttgcacagggcccttgcatatgctattttttccttcttgaactagtcctctcctcttttcccattcccttatacttctttacttccctcctcatccccttattaaataccttcataggtacttatacttaattctttaagtcacttgtcatgtcacatttttttgtgctcacttagtgaattccatccctcaccctcatcctcaactacaggttctgagagagtagatactgtcagactgggatcaccactggctcttggtttagttccccttcatacgcatttgttgtgggaggcagtggatgactggatgcatgactgagatgggaatagaaaataactgggcaatatttgaggaagcagaggcagtcgtagggtgtgaggttcacccctggggaattcaggttagttcatggtctggcgcgccaccgaggaagcgcagtgtgtttgtgcagggaggaaaaaccgtgcaaatgaagaagtgcagagaggaaggaagaagcttagcaggaaatagctgtggaggattggaaagaggaaataactgagaagtgacttgatagaaaattgtgcatgtatttcctctgctgtagttctcatttttctggtttatgcctttggtcttgttttctgagtctgatttgtagcgttctcttttctttcccccttaggatgccatatcagtttatttacacagacaaaccgatacaccagaaatgagcacacagacagtggcaagtgcagacttgtcgttttcccttcggacgatgaactcttcctcctctttgtcagtttctttctctatctttgtatttcttctgtcaaaagtgcacttttgtgtgtgtgtgtgtgtgtgtgtgtgtgtgtgtgtgtgtgtgtgtgtttgtggttctctactctgaaatggatttaaatcccctcctttggctccccttacccatttctaatgtttaaagattcagcactgacttctcatttcagctgttcatgtcactaatgacagagcgatttttcagagcagaaagctctgctgagaccgctgtcaggtattgagtggttgcagggatgaagaactaactgcttatttttgagtgtttttcttttttagtctccaacctttttttctagtgttaggttaaattaacatataattcacagaagatcaaatttactattttaaagtctacacttcagtggtttttagtttgacagcttgtgcactagttaccattatctaattccagaatatttccattatctccctaagaagccctgtacctttcagcagttaattccaactttcctttcccctgccccctggcaaccattaatctactttctatggatttgcctactagatgtttcatatcaatggcattaggcaacgttcggcctcttatatccagtttctttcactcagcatgaagttgtcaaggttcatctttaagtatgtgtcaggacttcattcctttctatggccaagtaatactccttcataggactgttccacattttttttttttttttcagttgatggacatttgagtggcttccactttttagctgttatgagtaatgaggctctgagcatttgtgtataaatttttgtgttggaacttatttttcatttttctcaggtagttacttaggagtggaattgctgtgtcatattgtaagtctgtgttaaaccttttgatggactcttagactgttttccacagcagctataccattttacattcccactagcaatgtactaagtttccagttcccagtttttccatattcttgccaatgcttcttattttcatttttttaaaaaaattacagtcattttagggtgtgtgaaggggtctttggacttccctggtggctcagatagtgaggagtctgtctgctatgcaagagacctgggttcgatgcctgagttgggaagatcccctggaaaagggaatggctacacactctagtattcttgcttgaagaattccatggacagaggaacttgttgggctacagttgatggtattgcaaagagttggacacgactgagtgaatgtctgactttttaaatgatagtttctggtgggactcccctgacccccacactgtctctttcatttaaaaaaaaaaaaggttattgttcttgtcatttttattagaattagattttgaaatgaacctttgctagaactgagggaatcatgaatagtatttgaaatactactttataattgggaaacagcatgcttacagaaggtaactgaactggaaaatagcaattatggcctacaaattaggatttttttctactaaagtaagcctcaagtaaatattctcatgtataaattatagaaacctattattatacagaaaagtcaaaaaaagaaatttggtaataaaactgtgtgtgtcttctggtttggtttcttttctttgtataactatttttttaaactttaaattcttattcttcatatgctcttactatggtgatttttcatgtacagactaatcttctaagatcttttaaatcctgcagaaaaagctctgctaatattagccaacccgattttttttctattgtttcaaatggaagtatcatggccaagggcccagcattgagaagcttaaacaattatagattctttttccttccattcattagatgtaatttagtatttgaaaaaataaaatcgctcaatttcagttgaagttcagctgtcttaaccctttctcatgttctctatttggcttttcattgtaaaccttgacagtgtcaaatcaatagaaatatatttttgttattctctagtataagatcaaaaccatcacccataaacatgtaatgagacttcttttatgtgtggaaaccaatctctgatctttaggaacttacagctgagtacagagcattgatgccagtaggtgctacagacacgaagtgtttgcaccatatatcaggcaggaggcactcagtaattttaaggatggaagaggcaactatgatataattgatatggaagatataacttacacaggattttaagacatcatttccagatttcgtgcagtagggaaacacaccgaactctgattattctggggaaagaaaattaggaaaacattggaagcgtacagatcttgttaatggcctactgaatgacaagctgtgtttggagcttgattccagagtatggtaggtgagagcttgggttcgggcagtcagatagcttcagtttgtttcttggatgtgacagctttcatttgtgtgattatggtgaaaatgagtgtccacagtccatatgggtgttgtgaggattgaaggggattaatttaaatgactccctctatttggtttctgacacataatgggcactctaataatatttatagtcttcttgtcagatttttttgtaattacagttattttacatttaattattacaaccgttacttaagaaaagtggtattaacacattaaaaaaatattgatttatttatttttggctctataacatctgcattgctttgcatggctttctctagttgcagtgagcagaggctactctctagttgccatgcacgggcttctcttgtttttggagcacaggcttgaggcatgcaggctttagtagttgtagcatgcaggctcaggagttgaggctcgaagactctagagtgtgggctcagtagttgtggcacatgggctttgttgctacgtggcatgtggaacttcccaaaccagggattgaacccatgtccactgcattggtaggcagattcttatccattacaccatcagggaagtccaacacacattttcaaatgagaaaaatgaggcttaaatcatcaagaatttgcctacaacagtggttcttacctggggatgatttttgacagcatctagagacgtgactttggttgtcaccactggggtacagcgtgatattgacatctggtgagtagaggctgaggacagcctctgtgacaaagttatgcagcccaaaacgttgatagtgccaagatgaagaaaccctggccaagagtcacagagcttttaggaagagaagtaggatttgaaccaacttttctcaaccatatgtttctgttttcccccgaaacttctcttcatgagaatacagggagtgacataaagtgagttttgacaagtccctttaagatggggtagtggcttgagactcaaatacagcttcatgagaaggtgacaaaccaagtccagagaaagtgaggtgatgtgggagggaaccaccatctgtttattctttcactgttcattcattcaagtattgatttgctagtcatgttttaattcatgtgtcagtcattaattctccacacgcttactgagcaccgactctgtgggctgtattctcatgcaacttctattcctctagccagacagcttggaaatggaagagaacatttctgaaatgtagtataagaagtggaaaaaaaaaaggttcagtattagaaaatccagtttatgaacttgtctcacttgaacccttacattaatctatttgtttgttcatggactgctcaaataaatgcatgtatccatggtatcttcttgctaggaactgtgttaggtcctggtacttatgctcaagaaagtgtgtcttctgttgtgtgtgtgttagttgctcagttgtgtccgattctttgtgaccctatggactgtagcccttcagggtcttctgtccatggaattccccaggcaagaatactggaatgggttgccattcccttctctgggggatcttcctgacccaggtatcaaacttgagtctcctgcattggaggcagattctttaccatctgagccaccagggtgacctttccataaatctttatatagccttcagaaagaaactgcagttttatcattcttattaccagtaaacatctttttagaaacagaagatgtattggtctgtgtttcagaccgcttttgaattgaggtttttgctgggggaaggaagaatctttcttggatatcaaatgagccttgtggtttactcttaataattattttagtatgaaagagtttgctgggctttatgggaagtatcataaaatacctaatttccctcaaaaaaaaaaaaaaaagcttcctgacttataaaaaagattggaataaaacaaatgtgtcttttaaaaactgcctgtattctgatggaaattcctttaatgacaaaatgaatgtacacacgtgtacacacacacactcttaaagggatacatcaaaagccttgattcttgtttttttttttttaagttataaaataataatatacttacaggagacttggaaaacacagagcaaagttacacatagttctactacatattacatactatttttagtagataagaattttttggagtttcaatatcaagctctcaaaaatcaatagaaagaataggaaagtagaaggatatagtagacctgaaaagcactatgaaccaattcaacataattaagatttatacagttttttttcacaacagcagggtacaaattctgttcacgttcccatagactataaacgaggagacattgaaacatatccagggaaataaagcaaggtgcaaaagtttcatggtcttaaaggtattgaaatcatacacagtctgttctctcattactgtggcattatgttagaaatcagtatcaaaagatatttgaaaataacccatatattttcaagtataatgtgacaaatttaccaagagaaatctttgacttagccattgaaagcctcaataaaacaaacaaacaagcaaaccttgattcttaacagtttgtacttttataccatgaaaaagcaagaattactgcttgcattattattaagaatttcattgactgaatagctcatttttttttttttttaagtaaccacaaattttcccatagtgatgaagaggcggacagtttctggatactgggaagtcccttcttagaagtgtatatttatcatggatgagctaggctaatatatatatatatatatatatatatatatatatatatatatatatatataggtttgtttctgttctaatttatatagaagaaagagtctgtgaggcagatgtaccctgtcccatccagaaggaaggactgagtcagcaccacggagcagtttcattggtcactcctgggtagtctgagctgtttaaacagtttaaaagtacatgcactgaacggcttaattcttcactatgagatggccaactctacgatttttctggaattctaaaaatacgttaccatttgtcgtgactacggtattttattttgcttcttgatcaatttttgccagtttggtttgttcctcctgcccctcatgtcaacagttaatctctctgaactctctgcacatttttggggttaagcccccacccaccacccccctttttattttgagtcccctcagacctttccccattatttactacttacctttttttccttctgtggttcttccattgtctaacattgaaaaagttgttgttgttgtgtgtgtgttttttaatgtttaagtctcttaataaaaaaatacacattagcatttgatatttttgtgtatattttttacctggaattttgaaaagtttatatacacatgtgtagttaacagctgatcgtttcaaaacgtggtttgcacttgtagcctatgagggcaaggtttaatggtacaatgacatataatgtgtctccttgcaaattctttttcttctgcttttctagagcccctgaaagctctcacaggggctgcaggcgcagagaccatccttggggaggaagtccagagtccacggaagactctggggtgttggctgtcttgtggagggatggaatggtgttctcctaagacttcaccatgcaaatcttattccttgaatttgaaaacttgtgaagcaactttgttctacttattagaacagggaaagcacagtggggtatacatggaggcctcagagctgtagtacatgtgtactcctgatgattctaaatctagttttcaattaaagcttgccagtttctaggtatattgtagagacagatgttaccggaatcactctccgacttttcaagcttgtttcatttaagctaccaagaaactgagtctataaaatgacataattttatcttatacctttttctgacctgataattttccttttgccttcttagctcaccagttcaaactaaaaaaatcattctattgccacacatgtaacatcctctggatttcttccccatgtgggatctttttttgttcttgtttagaaactagaagtaatattttaacaaatattcatgattttacctatagtttttgaagatctgacttagtattttattttattttttaaaaaaatttatttatttatttttaattttttactttacaattctgtattggttttggcatagattgacatgaatccaccacaggtgtacatgtgttcccaaacatgaacccccctcccaccccctgacttagtattttaaaagtacttcaactaagaacaagaagctctctatagtccccaggaacgctgatgatttacaaatttattctccttttctggggtgaagggaaaaagaatgaggcctttccttgactccctgatgctgtactaaatcacagcttcctgatggtttctttcaaagtgattaagaatatctgcgatcatgtattttcatcatttacttattagcttgtgtattgtcatctcttccacttgacagtacatgctatgctggcaagaagaatgttaattttattcactgtacagtaagtcccttacaaatgaatgcgttcatgtaatataagttagttatgtgaaaaactaccttgcagaagcaaattttgggtatagattatctgcttgtagtactaaacatttttttcttaaactgagggatttagattttatatttttaactgagaggctttttcttttttttaatgttgaattcatttgatagtaaaatgttctttacattgagggtcaagaggcagtttataatttaaagctaaagattctatcttgagaaaatgtatttagtttgctataaatttatgcatgtaacaataagattaaatggacctttatatgtaggtccttgaactcatatgcagaaaattcaggcttttctctctgaagctttgtataaataacaaacctctgagagtttgaagatggaactcttttaaaattctgtgagcctatggacttgtaattaaaatcacaattattgttagattggttctatgtgtaattaaggcaggaagaaaatacaagccagtaaaatgagtaatgcaaggaaattctgatgtcctgcttccttttgaagagggttttacacattcatccctgtctcgttctctgttgaagattcttatcttggctacatggattgttcagaattttcagcgtaaagaaaaactattgaagtggcctgccttttcttgaggaagctcctcccaaaattatttctagccgggccagattctgtctcttaacatatatgatttcccccagtgtgttgattggtttcttatttcctgacttctcttttatataaaattcctgtggtgcactggagctctctggagctgtgttagggatgccataacacacctcagacctgaggaatgcttggatgttattttattgcctttggcagtctgtggatctcttacttctttcagtctgattagtggggaattcagagctatagtcaggagatagttcacctaaactgttactgctttgatggatttaatgatcaaatgctggctagtgcccaaagcagatatttacatgccctatgcttaattctacatttcccttgtcaaagatggttattcaacaaaggccttttatattggttaaagccaattaatacatggagatgtaatttaatttcttcctcactatggttgaatgtgaggagtcttgattgcctacaatgacatatatacagacaacaccttcgtttactaagtgtaataattaaggcagaacattttttttactgcagttctgtggtagaaaaaccactttgatacctttatttgggtcaaagtgttctttatacagtctttgaggtacggacctcatcaaagcagttgatcttccagtgacccattttggaataatatggacacaatggtgcttctctagagttgatctgaagtattgtgtgtttagtaactaagcaaaaatattctcagtgccaaaggctattaagacttggctatatctttgacagttgtctctgtttagcagtttggtatgttggaaagctacttagtagatcttttttttcttgatatatctcaagattacattagattttatactcagtagtagttcaatcagtattcattgattactttatatagctgttgtagcagtagttactgggagttcagtgatgatcataacagacaacaatatttgttttagtataacagggtttttttggaaggtaaaggtggtacacttaataattattctgcagcagcaagaactgggaatattcctcgaaaattgggactaatgggttaccttagttgacacaggcatggtctctgtcctcatgtggctggtaatcaagaagatgatagttaatccaataatcagatattaagtaccaattgatagttgtgaaaaaattatagaaggccatagagtaagggaatttgacctggtcatggggttagggaaggccttcctaaagaggtaaaatttatgctgagttctggtagaagttctagtagactatttcagaaggaaaaagcatgtgcaaaaagctttagggtgggaagagagtgtggtgtgtttcaggaacagtaagacaggagggatgcaagcatggggctccatgtagagtacgtgcaggatgaagctaggaagcttggtagaagccacaccacctggggccttgactgccctggaaggatttagatctttaccccaaccaaaatggaaagctgttatagaatttaaaatgggggggtgtgtgagtggggtcaagtaggtagaaggatcatatgatcaggtttggattttgaaaagatccttcgggctgcagtgtgaagaagagattgagcagggattgccggggtaaagcaaggctaggggcaagaggaaaatctggggacagtggtgaaatagtttctgtgttagtccagctgagagataatggggactttaaagtgaatctgagaggtatctaggagcaaaactcagaaggacttggaaacagagtcttacgggcactgaagggtgtttggaattgttttgtgcccacctgtgatgatacacagttctcttgtgtccactcagcctgttttataaattaaaatcagcagcactgagcagaaaccacagaagagaaagagctagcttcaccgacttctgagaagtgactggagatagtccctgagaagtcagagactcagaaaatatcttaactatttggcatcatcagcgtactctgtagtgtgtggtggaatgagctgtgtgtaggggagagtacagttccttacattcttatgcaagagttgagctatagaatgatcccaaccagtaatgctgtgtcattgacttcttatccggatctctcttcaattagcctgtagggcagcatgactaaggtatcatttagggtactagaacaataattttctaaataataccctggtgcattgaaggggttaaagtaaggatgcctagatgcttcatctatgatcagggtgctggatcagattagaccctggacccaactggtttatcacgtggttcttttacaaggctgttgctcatcttaaagtgtgatgtaacagagcttatgaattaaaaataaaaacccacagggtcatgtgaatgtgtataaataccagggaactaagtatatctttctctgtagaacataatgtgggtagaagacttttgcttttgcatgtggcataacaccaggctcaagtcattatttatgtatttgcctgatgacgaaatagtagttgttaagtagcagtttgctcttttgtacactctggattatgtctcattcattctgcctttattgctgatatgtgggcatatttttcttagcaacagcagaaccaagccagtttctggggccatcttgcaaaatcttagttcagatactgtactgccaaaatcagcaataatattaatataagaaacattatgaaaattttaagatggtgtcttgaatattcttccaaaaatattgtttcaattagtcaaaaagcacaggttcttgcatgggtttccctttagtttttagctctttaatctcagcaaattatgagattttgctccattttatgcaagagatcaagtttctattagaagttgttttttttttttttctgaaaagggccactatgagagataaatagcatcattcattcatttgtttgatcaaatgattagagatgaggaaatatgttaggaattttcatttcttctactgttacctcctttttggttttcttttatttttagagctgtgtatattaagcaacttcatttacctttggtccttcatcctgagcctggtgttggctagccaggagaattttatgttgtttttcaaaagcttagtccagattttgacagcttcttgcagggtttgatattgaaaacaaccagtgtttaggaataatttaggtgtctactaaattattgactactgctcaccaacttattcttttactaagctttgagtcatattttagattaaacatggttaattttttccattcagttcttaaaactttacacactgagttagatacgtggcttgagtttaaactatgtttgccataagtggagttcctggattactgtccagagtgaatttggactgtcgaaagatttatttggtggcagtatgctcagattttgaaattaaataatagagctagtattcaaaatgactttttttaatgtatcagttttttcaaaagaattattgaaatataattgatttacaatgttgtattcatttctggtatatagcaaagtgattcagttatacatatataatttttcatattctttccataatggtattttaggatattgaatatagttctctgtactgtacatcatgtccttattgtttgtctgttttatatgtagtgatttgtatctgctaatccccaactcctgatttatgccccccaccgtctttcctcttgggaaccataagtttggtttctatgtctgtgagtttgtttctgccttattcataagttcatttgtatcatactttagattccacatttaagtgatatcacatggtatttgcctttctctttctgacttatttcacttagtatggtaatctctcggtccatccacgttgttgcaaatggcatcatttcattctttttatggttgagtacatttattatgtgtaggtttttaatcatggtcattcagaccattttgaactgatacctcattatagttttgtttgcattttctaatgtgcctattggccatctgtataaaataacagttttgatgtttgttcaaaagatcagtgttgattaattctctgaaaagacatgtaattttcacattttctgtatgataagtggagcacatgtgtcactctgactgtattagagtcttttcttagcttaaaaatcctcattaatgacaaggaaataataatgcccaccttcaagggccactatgagagataaataagatcattcatttatttgtatgatcaacaatcatttgttaagcatcaacagtgcaaagtgctgtatgggatatgacagagaatggcaatggagcttataatctacttcatatttgttaagaatatagatgaatactacatggtaactaattgttgatatctaacttttgtctaaaacttgtgatctaaagtgtgttgttaaattactatttgtctgattttgaatttggattagagatgttgaagaatttctgtagatatatttgcacattaattttaggattgtaaagcagtgattctgaactctgcatattagaatgacctggggagctttttagtagctacagaaccagtgtcaggaggttgccctcagagattctgatataattgatttagggcaggacatggggactggcatttcttaggaagctcctcagatgattttaatgggcagctatggttgaggtgtactgctttaaaggtaggtatatttcatgagtgtttatacattgtggttaatgatagatttgctattgacttatcaggatatttagcttgatgtgagcgagagctctgtcattaactatggattgaccagttttgatgataggtttcagagtaaaatatgtggcttcaaagaatcagatatgtggactgtaggcatgactgccacggtgcatctctgtggccttaggtgagtcactttaccatgcagacctctgtattttcatctttaaaatgaggaatttggttaaatgtccgtactatcattcaacaattgttataatgtagtactttaatgccccagtctacgaactacctgttgccagaatggttccctggcctgccatattgttctttccctttcccatagctaatcaaaccagtggtggacacccaatcaaagtcggccgggccataatctgacgaaagacagctaactcactcttgagagagtctgagtaaagatatgaatgttattacagtctgtgaagcatggaaagatgaggaaggggtaggggagcttggtgattaccttgggccatgtgtagactgaggctgactgtgtaaagtgagacgaactggggtgggtgtgtgcagcgaagcacagatgtcctgagaatgcagtgagacgattcatgaaagacacagcaaagagagctttgtctttgacctcatcccagttccagtccccagggacctagctgtaaaattgctgttctcaggtatctgtgatgtggcctgctgtgtccttattctttctccttccttttactcccctcagtgggtttctgtccctggtaaccccatatgcttctgctgctgttaagtcacttcagtcgtgtccaactctgtacgaccccatagccggcagcccaccaggctcccccgttcctgggattctccaggcaagaacattggagtgggttgccatttctttctccagtgcatgaaagtgacaagtgaaagtgaagtcgctcagttgtgtccgactcttagcgaccccatggactacagcctatcaggctcctccgtccatggggttttccaggcaagagtacgggagtggggtgccattgccttctccatttggttagtagaaactttggagaaacaaatggggcaaggataaaaatagaaatggggtaaggagaataagcaaaatagtgcaatattgtagaaagaatgaggatagtaagttagagtaaattagagctctgtcccaaaatagctcggtgaccttatccaaggtacttgacactagcaggttggtctaaaatgggaatggtgcagtcccataggcatggtgtaatgaaagttagattacacttacagaaatgctttgaaaggtaaaggggcatgtcagtgaggggctagcaagttttgagatgtttgccctcagagacaagaggtaggacagaagagaggccgagttataaaatatgcctgaacgaccgagctttttggtatttgacttaactctcaatagactatttcttgggcctcccatgtggcggtagcagtaaagaacccacctgccaataaaagagacataagagacgcgggttcaatccctgagtaaggaagatcccctagaggagggcatggtaacctactccatggagatatgggtcacagaggagcctggaaggctacagtccataggattgcagagtcggacacactgaagtgaccgagcactcacacacgcaaactatttcttcccttctgtcaatttttaattttcacagcttaatttttcttttgctagttattacttcgttcttagaacttctaaatttttgttgcctaaattgtctgatagggttttttgatacacatttttaggtatagttcattttttttcccattaatttctgtagcgaatatgggtaaccattctgtgtattatgagttaatgataaagttactgtttttctttgggttcagtgaggagcaaggattgggtcatgcgtgcaaaggatttagcttgttggtttccttcttatcctcagttggcacatcctaaaatcgttttgttgtctcccactcagtgggcttgccagacagtgggaaaggtttacgattggaatcggaagggtgtccagagttcatgactgaggaaaattggccctgcagtgaacatacttagcctggcacagacaggattttcccatccttccttattactctataagataactttccattgacacagttgggtaattaagaaagagtaaaataaaaggatgattgggttggtagtaggtagaaggtgtacaaagtctttcctgtcatttatatacatatttacacttagtgtgataatttttcccatctggaagtactgttacctttcctaatatatttgggcatgaatatcattcctttcttggagccacataaattcagtttatatcagaagcaacattgggatttttgatagatttttttccctatgccattttcccttgcattccagattgttttctgttgctttagcagaaaaggaagatcaccaactgctgttcctggatctgacattggaccacaagtttcttgagtcattagcagcttttatggagttttctcattgccaagtatttaaaatttctttaagaggtattaagtttattatgtccagtgaagtatgagtggactatgcacacagcttctttttaaagactttctggcaagttgattagagtttatagaatgaagtgtagtggaaaatcagttattttcagagggtgcctttttttggttagtgttatgagcaaaaagtgaaaatacttaaggatcatagataaagttctgtaatagggcactggaagaggatcgctgactcgttcttttttcagaacgcattaactacagtaacttgatggagggctattaagtatttaactgctgctggaagatattagatgcttatcaacattgtgactgagtattgtttcatttaaccgtctgtccatgggttaatatagtatatgattggctcctataaacaaggaaaaaaaactactgaccatttgtcatcattgtgtaacagggcagcttcctaatttccctctcaaagaatcaattctccatagacttccaatcatcttcccagtgtgatgcttttgaaggcaatggcagcccaccccagtgttcttgcctggagaatcccagggatgggggagcctggtgggctgctgtctgtggggtcgcacagagttggacacgactgaagtgacttaacagcagcagcagccttgtggtatgtttttataaagtatcacttaagtactgattcattgatttattcagtaagtcttttcccttttctctgtagtctaaaatgttggtatctttatatccaaatgtgccagctattaacttactagttcgtgtggaaacaagtgcaagggactttcagtgcaagggacacactttcaggtgtcccttcccatattgaaattcagttaattttccagcaacagtatgtaataacacatacaaagtgttgccaactgaagatatttacctgagccttggtgtactggaattttttggggggtcatgttgtgcccctgtgactggtctcagttgctctgactttaccctactcctcccaaagctccaccttccccctcccccagcaaaaacaagtattcaccctaaatcacaaaagttagggaaaaaagtttaaaaaggtaacaaaagttaggaaacctcttctagggtaaagttttctggtaaactgtgtagcatagcccatggctgcaggcatacagagagagatgatcatgccaagacagtgtggcttaagacctcagacagacagttcagttcagttcagtccctcagtcgtgttcgactttttgtgaccctgtggactgcagcatgccaggccttcctgtccatcaccagctcccggagtttactcaaactcatgtccattgagtcgatgatgccatccaaccatctcatcctctgtcgtccccttctcctgccctcaatctttcccagcatcagggtcttttcaaatgagtcagttcttcgtgtcaggtggccaaagtattagagtttcagcttcaacatcagtcattccaatgaatacccaggactgatctcctttaggacagactggttgggtctccttgcagtccaaaggactctcaagagtcttctccaacaccacagttcaaaagcatcaattcttcagtgctcagctttcttcacagtccaactctcacatccatacatgactactggaaaagccatagccttgactagacggacttttgttggcaaagtaatgtctctgctttttaagatactgtctaggttagtcataactttcctcccaaggagtaagtgtcttttaatttcatggctgcaagcatgatctgcagtgattttggagcctcccaaaataaagtctgtcactgtttccctatctatttgccatgaagtgatgggactggatgccatgatcttagttttctgaatgttgagctttaagccaactttttcactctcctctttcactttcatcaagaggctctttagttcttcactttctgccataagggtggtatcatctgcattaagcacactgtgccaagggctcagaggttatctcctagaagccagtgaaaatcaatccagcagacagacctgcctttgaaatgtgcagggtttgagcaacccaggcctgctgagttaagtctctcctgcctgcaggtctagtaatattttatttgatgatcaccattgtgagtattacactattgtatctttggattttgttaccttaatttactcagggatcagattgattcttttgatgttgttttaatttttttgtgagagtagatcttgagtagtcttcctgtaggccttgtttattctccagaatgaagtctctactgaataaagcaggtgttggatgaagtttttccgctcgggcaggttggatcttgattgtttcccagtcttttgtgagctctgaaagctgttttgcttatagcttcctagtagatgttttttttccttgtagtcatactttggtagctagtctttgctcagcccaacagagtttgattctctgcatttgtgtattaactaaagactcaaggagatctataaggacattttctgggtttattattattattgcatagctccttcctttcctttactctgtcctacatattctacccacctgattatccccatattccaaactttccttctcagctcattgaggctctactctgcctagggtgcccctctctgtctcacagtctggaagatacttctaggcagaactcttaggtggttatatttctcatctcatttgatcctcttccttcaggaatcacagtcccaaattgcttattgtttattgactgaaaactgttgtttcatatattttgtctaattttctagttaattacaatgggagagataatgtagtacctgttcctctgcatgattgaaaatgaacttttttctaatgttcagttcagttcagtcacacagttgtgtccgactctttgcgaccccatgaatcgcagcacaccaggcctccctgtccatcaccaactcctggagttcactcagactcatgtccatcaagtctgtgatgccatccagccatctcatcccctgtcatccccttctcctcctgcccccaatccctcccagcatcacagtcttttccaatgaaccgactcttcacatgaggtggccaaagtactggagtttcagctttagcatcattccttccaaagaaatcccagggctgatctccttcagaatggactggttggatctccttgcagtccaagggactctcaagagtcttctccaacaccacagttcaaaagcatcaattctttggcgctcagccttcttcacagtccaactctcacatccatacatgaccacaggaaaaagcatagccttgactagatggaccttagtcggcaaagtaatgtctctgcttttgaatatactctctaggttggtcataacttttcttccaaggagtaagcgtcttttaatttcatggctgcagtcaccatctgcagtgattttggagccccaaaaaataaagtctgacactgtttccactgtttccccatctatttgccatgaagtgatgggaccggatgccatgattttcattttctgaatgttgagctttaagccaactttttccctctcctctttcactttcatcaagaggctttttaactcctcttcactttctgccataagggtggtgtcatctgcatatctgaggttattgatatttctcccggcaatcttgattccagcttgtgtttcttccagtccagcgtttctcatgatgtactctgcatagaagttaaataagcagggtgacaatatacagccttgacgtactccttttcctatttggacccagtctgttgttccatgtccagttctaactgttgtttcctgacttgcacacagatttctcaagaggcaggtcaggtggtctggtattcccatctctttcagaattgtccacagtttattgtgatccacacagtcaaaggctttggcatagtcagtaaagcagaagtagatgtttttctggaactctcttgctttttccatgatccagcggctgttggcaatttgatctctggttcctctgccttttctaaaaccagcttgaacatcagggagttcatggttcacgtattgctgaagcctggcttggagaattttgagcattactttttctaatgtagtgtttatgtaatagttaagatcaggagttgatgcagatgtcaagtttagtctccagcttttactatcttttgatctttggcaacttgttaacatctctctgacttggttgtcttatctgcagaatagacatagtcgtatctaagtcacagggttttatgagcattatttttgatagtgcaagtaaaatgcttagtatagctcctgacacatgttaaagctcattctatgatgatgatgatagtgatggtagtggtattcagctgtatttgcgccattaagtgagggtgttacatgggaagaaaatgctgttaggttagaaattcaagatgttgagtttcttgtggcagttaattgtccctgaagtgcgataggatcaaggagaacatggacattttccatccctctgcttgcagaactgtcgagaagttacagaaaaatgcattaatgatttgtaggtatggtagtcacatgagttgatgcttgttctgaaactgctcgtatagggatgcagaattcctgaagaaaattaacctgattacatctttttctaagctgattatatctttaatgttttatttcttaggctgtgtgataaggtgtgtttattatatttgtcttcatttggtacaactgatatgattcataattataaaaacttgtcttaccccttcacataatcttgacatgcttttttaaaaagctatagaattaaacacacaaagtgcagtatgatgggtaagataggtctcacttaggtcaagttttaaaatatgggcagaacattaccatgtatttataatgaatgtgggtttgtgtgtgtgtgtgtgtttcactgtgtgtgtgtgtgtgtgtgtgtgtgcatgaaaacactgaaagaaaacagcggtttcaagaaagcactttctttctaaggagagaattgggtgtgagggagaacaggtaggggtagaaaaaagccttgaattgaatccctgatgctttgtttctgacaagaattgaatcagatattggaatgacatctaaagatctgaatggtgcttacaccagaatttgttacagtctttgttcgatatttatcttaaaaacaaatataataacaacagtgttcaagttggaactaaaactctgcttcagtgtcttagtttatgttttatcaagactttggggaatgtttccaggaatatgattacaaaactagatatcgtcttactgcgggacaattgcagaatataaggttaggctttgaggccagaaatattgctccatctgtgtatatacttgcagaagttattgttaggataaaatttgttaggtaagtgtacctcagtgtgaattttcggtattggagtacagggactcagtcctgggccggtccatgcgctccatctaatctcctctcctctgagcggttagaatcttcagactccgagttggtgtctcactcctaggatgtagtctgtacaacttaaagggacatatgaaaccccccaactccctgcgtgcttgtgtggttcggtcatgtctgactctttgcaaccccatggactgtagcctgccaggcttatctgtccatggaattctccaggcaagaatactggagtgggttgccattcccttctccatccaattccattgcttctcctaaacatcatctactgttttttttttttttttttgccatccagccacactttgcttgttttcttcttcttctttttttggttatctcttagatttcctgttcattccctggcttgacatgtgactacttcatctatttccacttaatttcccccttcatctgtaatttcttctctgtttctctcagttttcttggctgactcccttatacatgcctcaggtctttatgtatgtatgtgtgtatgtacctatgtatctatccatttgggtttccctgatggctcaatggtaaagaatgtgcctgcaattcaggagactcaggagatgcaggtttgatccctcggtcgggaagatcccctggaagagggtgtggcaacccattccagtattcttgcctggagaatcccatggacagaggagcctggtgggttacagtctgtgaggttgcaaagagtcagacatgacttagcgattgagcatgaacacacgtctatctgctatctgtctgtctaccttctttaatttcttgcctccctccctccctccttccatctctctctcatctgtctgctttctataattccccaagattaatgctcaccttctgactgttattactttcttattcatcttccagcttagattttaaactccactaaggagagaccatgtttgttttccttttccagcacctctgtagtatgtatgtagcgtctggtgtaacgtagccactaaataaatatttgttgaatgaatacatcaatgaagtacagtttgagcttttggctttcatattctcactagatatttaaagttctttaatggaaagtactgcattttaataaagtatttgtgaatattttatgactattttcataaaatattaagagcatttggagtcaaaggtatattttaaagtcagagcagtaatattagaatctgtgggcattaaaataggttaattttcttttaaaaattgatttttaaattttctaacaactagcacatggtttggaaaaaaaaatcaaagaagagtgagtgtttcaaatgaaaatcagcattcatcagctttgtgttgtttctaatcctgtgatattaatagattaaaatttcagtaagattcaccttcaagaagaaatagatatatatgtatgtacatcagaagactgcagtgttctcagaaatgtgactacagttgttcagttgaaggtatgatgggaataaacagttcatactgaagggactttttaagccttgatttgtttttttttttttttaaatggcatatgaagggcacagtgcctcttccagtgttagcttgtgtttcctttaaccttcttcttcaaaggcccatcctaaaaaagattcagccctggttttttttgccctcctctctttcaaagacagtatctcaaaaatggtactaatttaagccctgctaaatgtccagatgcagcacctgggaaaaatgaagttcagaagttcaggatttggaacttgcttaagctaggagaatcttcttgctgtggttgcatgtctggttctagaagctggtaacctctttctcgtgggcatcgttccattgtaacagatggccccaagtgtggacgtgtcagagagtgaagcccaggtgtgaacttgtccaagaagttgaaacactgctcagaatatctctcctcccaatgatagctttgttgttgcaattagaactttctggattggaagagtgaacttaatgaaacataagagaagcctttagagctctgttgtccaatatggtagcccaggccacacatgactcttgagcacttgacatgtgactatttcaagctgaggtgttctccgagtataaaatccacacctgtttttgtaaacaaaaacataaaaacatgtaaaatatcacagtagtaatttatatttttgattgatgttgaagtactctttggggcacactaggtgaaataagataaaattaatttcacctgctttttttttaaatatggtgactagaaaattttaatttacatatgtggctcactttatatttctgtttggcagtactgtttgggctagactcttaaccagggatgtacatgaaacttgattccatttatactttgacatgactgtttagtttgatatatgtcagttcagatctggaatgaaaatcttggactttctacatttgtttcttcataacttgcagtttaaatggagcagtaaaagcaggagtaggatttttttttcagttgtacaagaaatttctagagactaagagctttgcagagctaaaaattcattcccattgttttatttttaagctctattttaagttcctgccaggacgaaaatgttcattcccttttgggttctgatggcctggtaaaaacttctttgtaaacccaagggatgtgatggagttggcacaggagaaaattaatttggttgggatccatgagtggaatggaggtaatgtgcacggcttgcggagtccatcgtcatcaatcactgcagagcccctgcagcaacgccgggctgcctagcacccggccccttggacagcagcagggcaagatacccgctttcccgaagagccctactcttgtgccgtagagaaaagtgttaacgtagagtatgtgcacaatgatgagccacacatatacacattcaataaagttgcttggcatctattcctgtgtgggtgcatttttctggaaaaatgttaaatggagttttccataacttttttttttctctcctaaagtgtgcattgtaggatattttccaaccccacatgtttccagtaacttaagctcaaagctcatagcaatgaggcactttcttgtcaaaagtgagtcaaaaacaggaaccttttaattctgtcacatgatgccagatgttataaaacagtaagagcaaggagttcacttttcccccttctcaatcctcagagttttagctgcttgccttcttcaccattgaggaagccaggaattcagaagtgtgggtcggatattctccgtagaaaatgcatttaggagcgtacactttaactggattataaatagtatctgccctgacaatgctgggattttctcagcttctggagacattgaagtctttgtttcatgggtcactgctctctcccccaccccctaagcttgagtcataaagcttgacaaattaatgaggttgctgaaacttcaaatctagtgggtaggacgtatgggaaacaaggagagacggcagcaaccatacacttggcctcaagatggcttctctcttgctgtcctgaacttgctcgctttgccttttattgcttcaggcccttgaatttattgtttcccttcaacaggatcaacttagattgaaaaaattagaaaaaaagtgtcaataggtagcagcaagactaatattagctcctgaattctctatttagaatagaaaagaaaaaaaaaatctatccatgaaagaagtacaagccagattgctttgatcttgtgtgtgtgtttgtattagctatggaactaagaatggtttttacagtgagtacttgttctcaaccacttaagggaaaacaaaacaaaaaaataggcaacacgaagtctaaaattactagtgactcttggtttagaatgtgtttgctgtgtaacacttgatactggatatataatcaatcaaattatatatatataatcaatcaaaagccaatataaaaattcctttcttgggttgtgtcagttcaccgaaaagatatttcttgagtatttgtttcattcctagcactgtcctagatactggggaaataaagtttaaaaaaagagagacattgctaccttcacagagcttaccttcctatggagaaaaaaaaaagactaaacactaaccaaatctaatggaaataagaaactggacaacggagtctcaggaagagaaaacagctaagtgaggtggagagtaacagagcagcttctatgcgtctcagcctctgttcttccttccccagactgtgctgcaaaacggtgacaaagttatttcccagattttgaattcacccccgacccactgacataaaacattctttgcttgtccctgtgatttccttactagtctgttttatttcttttcaaaagtctctttttgccccagatgaaattgattattcagctcaggcgtattgagtcctaaattaggttgatgttcacaggaagtacttacgttcattctgctttttcagtcagcttttctgcaccctcctacttaagggtagttgcttgtatgctccatacagttctgttttgaaccttagtcttagatgcttttttctcccctcttctggagaggtttatgattattttatttctgttagcatcagggtctttctccagatctgatgttccctcaaaagcctgcatgttgtgatctgtaccaaagtgagttattggccagtgtttgctcatatcctttattttgaatctttcctgttgttggaatcattcataacactacctgatcattaatcctctgctctgaggatatgagtatgatttttttttctggttccaaagatgcactccagctttgcattttggttggcaaaatgaccagagcttggacaaaaggccatgagtgacacacaaacacaggcctgaaatgatcatattacagaacagttaccacgttcgtgtgaatggctaagcaaaggtcaaaaatatgagcaacattatttatggctcagagagtgatttgatattcaaagtctgtcatcatttttcagaagaatggtattagcaaaactgtgccaggctaaggactctctaaaaaatgatttgagacaagctcagtatacagtaaaaaagaaaaaaaaaaaaaaaagacagtttaggtgtatcccaggagacaagaactctgcacctgatgtggaagtagttctgttatcctgctgttgttgtcaggtttgtttgcctcttgacaaagaatttttccttcttccagatcagttttgtcacctttagccagggcagttcttacaggatgaagttagcacctgtggcttgcatggacagtgctgggttatgagaacttactgcagttgcttgctgtaagatgtgttctagttatcagtttattgtctctgaggtcgactttcaccctttattgcctgctgtgtgaaaatggatctggactctgcagatgtttttcttttgccagttggcatgatgttcagctttgtcaggagagggcgctggagagacgttgcaaggtgaaggagttttcctttctgcagcaggtgtgtctgctcatcacagtgtctctggtgggccacctctctgtgaatagtcttcccaggcactccagaggatggagttcaataagttctgtaagtgtaggaccacagtgaattccttcccatgctgagagctcctggatctcatccctggggaggaggaccctgagccctaagggtcgtgacggctccttatgtctgctattcctatattagagtttacttcttattagctaattctctgtgatagttaataattcctttcttcattcaaatttctctggtttgtctcctgattggatcctggctaatacagtgttctatcatcagaattaggtttcattcttgcactgcatgaagcaggtaggtaggagagtctaatgaatttgtacaaaggagcatgaaatctgaatgttataagctattgttactttctctgtgttcttctgattgaatgaccaaatcttaggaaaaactgaaagtctgcaattatctgtggtcaaagtggaggctgctggtgccaatgtgtgctctcagtcgtgtccaactctttgcgaccctgtgaactgtagggtgctgatgatcctagagttaaaaatccacacaaggctttgttggacctgttggccattccgctttgtgtgggagcttcaggatatgtgaacaaggctgctgtgggacccagtggtgagtggtttaattcagtgcctggggattgtctaccgagctgtaatatctacatggataatcagaggtctgcttccttctacccttgtatcatgtgatagggttgcaagcggttcccattttctgagtgaatgctgcatcagtgtgatatgagcaagagtacagctcagggggaaaaaaaggactagaatgaggtgccattgaggattattgggtctgatttcttccatttttggatgaggaagctgaccacaggtgaggttaaatgccttcctgtcaagagtgtgcactgagacagcaggggaatacaccaagacagatttttttttttaacttctagtcagttgttttcccccaactccaatgtatttactttcagatctctaatgatttttctttttttaaataattactttataattgaagtacagttaatttacaatgttgtgttcaagtgtactgcaaagtgattcagttatttatatatatatacatatgcattcaggttattttccactaatgggttagtaaaatatttaatatagttccctgtgctatatagtaggtccttgttgtttatctgtttcatatatatagtagtgtgtatatgttaatcccacattccagatttatcttctcctctccctcctctattccctttggtaaccatcagtttgtgttctgtgtctgtgagtctatttcttttttgtaaataaattcatttgtagcatttatttttagattctacatctgagtgatatgtgatatttttctttgatttatttcacttaatatgttaatcgctagcttcatccatgttgctatagatggtattatatcattcttcaaattatttattttcttatatttgaacttaagatttctaaagcatgggaaaatatagagtgcttcattaaagaatatttgagtctaaatacattaaaaggataaagtagaagatgccttaaggaggtgcatcttcttttgataaaaaatattttattgaagtgtaatgtatgtagagaaaagcatacttactttaagtgtatagaatgatggcttttttttggtaaattgaactcctgttatccaggtctcaggtcaattaatcagatgatatctgcaccccagatgctcccttcttgtaccctttagtcatcaccccgccctatagtagccaccaccctgattcataactgcacagattaattttgcagttttgtgctttatagaaatggattcagtcatatttaggcacttgcctgtgcctggcctttattcatcatgattatgtttgagaaattcatctgggctactgtgcatagttagagttggtttttttcatgattatatggtattccttcaaatacatttttttttttttttgaggtttacccattctcccgttaatgggcatttagggagttttttagtttggggcatttacaagtatgaacgtttgtcttcattattatcttttaatgttttgacataagaagatagagaagtgtgaggtttagggcaaaagcttgaaattagacaaacatactaactttgatcctagtcaagttatttacatccttaagtctgtctccttatttgtaatgaccatcgtgactagtgtttcagaattttggaaaaaaaattgtgtgaaatgatggatgctctacacagtgcttggtatataataagctctcaaagaatagaagttgttagtatttttcaagttaatgttttttaaattgtaacaaagcatcaagataattcactgtctgcattctgttgcttgtgcatcatgtttttcagagcttgcgcttgtttgtttgcatcttctttatcttctctcttcctttctccacgctatatgcattgcctgcctgttataatccaggtgtaggggcagggattgaagaagagtttttagcagatttcattcttgagttatcgtctcagtttttgccattgtaggctcaccattagaataacatttgcttttttttttttttttttttgctctgcccaaagatgcaaaatccttgcaataagaggtttgtatgcctgagcctcagtgacctggaggaaatgagaaatcaacagtttccttctgtagttcaataaccatttactcttcctgccagatgatatgatagaaacgctgtggatcttgaaggcaactgtcttgaatcccacctctagaaaattcctgttaggagtaccgtcaggattgttctcgccttcatttataattggcccaaaggtagagtctacttgcctggatgcctcgtcagtgagtactgactttgggtttagcctcaaataggctttcctctggaatgtactaatccaatgtttagttggacttgggggacaatcattaactcatcctgatttaaggaagctttgtgaatgactagaaatttcaggattatgtttatatagtttcaaaggtcatatttttagacaaaggataatttaagaagattggctagtatccctcatcagtcttaagctattttaatgaaaacaggaaaggacagcctgtttacttcttaggagtgtcatacatctgttttgtttataaattatatttaatcctattttatttagattatatgtatgtatatatgataattttcaaataggtaatgttaacaaacttaaaataggttaaggaaaatatttgtggcccaatatttttttggctaaatgttttgtttatcattttagtagcatttttaaaacctctttatactagtttggacaataaatatgtttctgtaaagctgcagatacaaatatagaagataaatatataaagacaatattttataaatggatttaatgtaaaatcaccatcttatttaaatacacgaaatacatctcattataatcattctacataatataggatctgttataaagtgaacaatctgtttctaatttttgtgcttaaatcttgggataattttaagtgaggtgtagtcagcgttttaatgtattcttggagttagatattatgagcaacatggacttgttaattttatttctagatagttgaaataagtatctgacagaaatgtattaagaagcagaacagttatttttctctatcagctgaaaagcaaatgcattattagcatctgaattgaatgctggaatctccaacatacatgtatgtctatctgtgtgttttgtgatctgagtcttgctactgaaagtataatccatggattagagtggttcatgaactgcatgtcagacatcagtgaactgtgaacaggtattgagtgttcaaaaacctttatagcaattggagagagtgattttaggtctcttgcttctcatacggatttgggcttgtgtatttgtgtgtgtgtgttttgtttttcatttgtcttagaattcaattttattgtagtttacaaaagtattggtctgtgttggatttgaaataaaaaaaaacaaaacagataaagtgatgcaaaccacaaattgcaaatggtttgagaaacattggtgagaaacctccatgagaggtttctaccaaggcagaaaggtggtacaatttctaatctttaaaaaattaattaattaattttaattggaggctgatttcaatattatggtggtttttgccatacattgacatgaatcagccacaggtatacctatgtcccccatctcaagccccctttccaccaccctacccaccccatccctctgggttgcccagtatactggctttcagtgccctgtttcatgcattgaacttggactggtcatctatttcacatatggtaatatacatgtttcaatgctattctctcaaatcatcccaccctcgccttctcccacagagtccaaaagtctgttctttatatctgtgtcttttttgctgtcttgcatatagcgtcatcgttaccatctttctaaattccatatatatgtgttaatatactgtattggtgtttttctttctgacttacttcactctgtataataggctccagtttcatccaccttattagaactgattcaaatgtgttctttttaatagctgagtaatattacattgtgtatgtgccacagctttcatatccattagtcttccagtgtacatctaggttgcttccatgtcctagctattgtaagcagtgctgtgatgaacattggagtacacgtgtctctttcagttctggtttccttgttgtgtatgcccagcagtgggattactgggtcatatggcagttttatttccagttttttaaggaatctccacactgttctccatagtggctgtactagtttgtgtttccaccaacagtgtacgagggttcccttttctccacaccctctccagcatttattatttgtagactttttgatagtagccattctcactggcgtgagatggtacctcactgtagttttgatttgcatttctctgataatgagtgatgttgagcatcttttcatatgtttgttagctctctgtatgtcttctttggagaaatgtctgtttatgtcttttccccactttttgattgggtagtttatttttctggtattgagctgcgtgaattgcttgtatatttttgttattaatactttgtcagttgcttcatttgctattattttttcccattctgaaggctgtcttttcaccttgcttatagtttccttcgttgtgcaaaagctaagtttacttaggtcccatttgtttatttttgcttttatttccattactctgggaggtgggtcatagaggatcttgctgtgatttatgtcagagtgttttgcctatgttttcctctaggagtattatagtttctggtcttacatttagatctttaatccattttgagtttatttttgtgtaaggagttagaaagtgttcattcttttacaggtgattgaccagtttccccagcaccacttgttaaagagactgtcttttctccattgtatattttcttacataggcatgatttaggacatggaatgctgagctcttgttgcatcaagcttttctaatccctagttaaccatatcccctaacatttccaatgtagctgttctgtctgtttaattgtaatgttttgagcctctgattttttagagtgatttgcaaagaagtatttatttctttgcaaataaattcaataaatttatttgcaagtaaattctttggacttagttgcaaattatttgcaactaagtccgaaaaatttaatcattcattcagacattttttatttattgaacatttaactgtggaccagatactgttctaagcattgggaattcatcagtaacaaaacaaaatggaacaaaacaaaaaacaatttctgttctcttctagcttatatgaaaagaattggaatatatcaatatatgtgtacacatttgtatacacacacagacacgtatgaactgcaaggcggttgattgtgtccaagtgcacccagttccccttgggctatgactgcatgcattcctctactctatggatattaaggtcactattgatgtagttttgtgtttgaaccctgtgactaccagaaagtccccaggggacacatgtatttggcttctctcagggctcttggtgcttgagcatgacctccccaaattggtgaggataatgaagcaagcaaagcctcagagcctggaggaaccttggtgcccattgtcctgaaatgctgtccgcctttgggatgtcattaaatatagagtttttccaagctgtttctttgtttcagctggaggaactacgatctcctgtaaaatgttgttcagatccttggagtctaagacagagatgtcagctttctgaaattaggacaggtgtctagggtatatgtactttttgggatgaggtcttctagctttcttcagcttatacaagtaattcatgaccctcaaagctgaagaatcatggatatccagtggccaagagccttttgcagtttggatcctgttatttcatctggttgtgtctcttcttttctcccttagtcttttcctgcagtgactagacctgcttcctcactgtggctccagtgtggcctggccccacctgagatgcttgacctccaaccatccacagagctcatctcctctcctcctttaagcttttgccctattgttacactctgggtttaccctgactactgttcaaaataacatccctctcctgtccctatcttggtccttagtgctttatttttatcctggcagttgctgtctttaacagatgttgctgtctttagtgtcttagatgacttggttatttactagctttattgtccctatgccctttctcacccaaatgttgcatagaagtagaaacttttgtctccttgttcacggttgtatagtgacttccctgggggctcggacggtaaaacatctgtgtacaatgcaggagacccaggttcgatacctgggtcgggaagatcccctggagaaggaaacagcaacccactctagtactcttgcctggaaaatcccatggatggaagagcctagtaggctacagttcagttcagttcagttcagtcgctcagttgtgtctgactctttgcaaccccatgaactgcagcatgccaggcctccctgtccatcaccaacttccggattttacccaaactcatgtccattgagtcggtgatgccatccaaccatctcatcctctgtcgtccccttctcttcctgccctcaaactttcccagcatcagggtcttatcaaatgagtcagctctttgcatcaggaggccaaagtattggaatttcagcttcaacagcagtccttccaatgaacacccaggactgatctcctttattatgggctggttggatctccttgcagtccaagggactctcaagagtcttctccaacactacagttcagaagcatcaattcttcagtgctcagctttctttatagtccaactcacatccatgcagttcatggggtcccaaagagtcggacacaactgagcaacttcactttctttctttcactgttgtatccctggtgcttcaaacagtatctaacacatagtgtgtgttcagtgtatatttggtatacattgaataatatgatgaataaatatggaatctgattcttcctttcaaagtatacaacatggagtttcagttcttccagtttagctgagattccttgtgttgctctatgtgtatttcagtcctgttggttgtggtttcatgaatctcagttcttacgttgccatatattaactttcagtgttttcaatattttatttttctttccatgtgtcagttattcccatgaggcagttttgtctttttcttactgattttcactgtttgttgaatcttattttatgctggaccctccaagtgttcatggttaagaccttagacaagctagagaggccagcaatctctgtctctcagtttcttcatccgtataatgggaataacaataatatctaaccttttaagattgctgtgaggatgaaataagatgatccttgtaaaatggaaaacactgtgtctggcataactattgattgcattaattctgataacagtgtaagtatattatggctcagcataatgtctgcatgtggcaggaacaaagtaaatgacagttcttaaagttattatgtttttccctcccattgttaccaccactaatccactaatgatgcagtcccagacaatcatcaaagagcagagcattaacgttctagagaaggttaaaggttgtcctcccttctctttttctctttttcttcctctttattttctatacactgtttgcctacgctttccatgtgatggaagagctttcaggtttgaaatttattcttcactatgcaaatctgatcttggttgtcaccatgataacagtactcagtctttttttggttgacattctatttgaatggatagtaataggtccttgagatgtatttccacatacgtatttcacaacagttggactttctggcaatggtttcattttttttttctcttggagggcatttcaaggagctgccttgtaaactctgaatgcctgggttatttgcgttgtgtcttttcatcctcaatgctgagttaataaaactccctagattcgattcttacaagtaatcaaccagcaaatgtttattaagtttatatatggaagacttttgtagctgcagattggcatggtgaaaggtgagctttaggaagatcagtctgggggctgtgtatgtaagtggtggtggggatgttgcaaatccagtggagaagggaggaaggggctatattgtgggaaatggtgagaaccaaaagtgtagcagtgaccttgggagtggaagaggaggtggtgctctgggcgtgtgtatttctgctttcttaggtaccaccaacaccctcccagggcagttgccccaactttcatttctaccagcaggggctaagagttctcagtggcccctgttcttgccaacacttagttactattgctgcataacaaatcatagtaaaacacggtggttgaaaataataactatcatctcattatctgtcatggtttctgtgggtcaggcattcaagggggctgtcctgggatgtcctggctctggacctctcatcagcttgcagacagatggtggctgccagactttctgaaggaggaaaccattggtggtcagcgcatgtgtgaaagtgaaagtgttattcgctcagtggtgtctgattctttgtgaacccatggactggagcctgccaggctcctctggccatgggatttctttaagcaagaatactggcttgggttgccatttccttctccacggaatcttcctgacccagggattggacccaggtgtcccacattgcaccagattctggtggcatctgaaccaccatggaaaccccatcaatatataccttttctaacaatctcttaatctcaaggcatagggccagacaaaggtgagtcaagagatgaagttctgacactgccaaggaataaatgagcagttattgagtatcaaccgggcacagtcttatgcaaactgctctactatgatgaggttatttccttcagcatgatctttcctcagtttgcttcctagacaagcctttccttaagaactctatatttaaatacatgtccttctttatttccatcttgtagttgatctttagttgctaagtcgtgcctgagacttttatgaccccatagactgtagcccgccaggatcctctgtccaagggatttcttaggcaacaatactggcgtgggttgccatttccttctccaggaaatcttcctgacctggagatcaaacccgtgtctcttgccttggcaggcagaatctttaccactgagccatgagggaagccatttccatcttcattgctcaacttatcacctccatagcccttttttttctatttacactctgtgtgtagttgtttgcctatttattacctcacttgccttcctccactcctgagtgctagactgagggttcatgatgacaaggactctgcctctttcatatacatcacatatatccagtaaaacttgagtttcagatcaaaatgagtaatattttaatataaatctttccaaatatgggacatataaaaaatgtgagtatatctcaaatacttaaaaactatatctgtaaaaatgtatttctcaaatgtggaacatgctatactgaaatatgtctgttttatttgaaactcaaatttaatctgatatctggtagttttatatgctacctttggccactgaagtacttggtatttagcacagtttgtgacatataatagaagctcaaataaatgtttgagtcaatgaatgagcaaatgaaagagttcatatcttttttcaggaaaattttttccagatagatattattatttaaaaaaaataataaaagggaacccttctacgctgttggggggaatgtaaattgataacagccactatggagaacagtatgaaggtgccttaaaaagcaaaaagtagagctaccgcatgacccagcaatcctattccgaggcatatacctagagaaaaccgaaatttaaaaagatacatgcaccccagtgttcgctgcagcactgtttacagtaaccagggcatggaagcaacctaaatgtccatcagcaaaggattgcacaaagatgtggtccatatatacaatggaatattactcagcaataaaaagaacaaaatcatgccatttacagcaacttggatggacctagagattttcatattgagtgaagtaagtcagagaaagacaaatattacatgatatcgcttatatatagaatcttaaaagaaaacccaggtacaaatggaacttaaaaacaagtagaagaacgaatgtaggaaacagacttatggttagcaagagatgacgattgagagaataaattgggagatgggaactgacatatacatactacatatataaaaatagataacaaataagaacctactatgtactctacttaataatctgtaatggtctgtatgggaaaagaatgtaaaaaagagtgaatatatgtataactgattcactttcctgtatgcctgaaagtaacacaacattgtaaaccaactatgctccagtaaaatttttttaaaaagaaaataggatttgtgtttgccttaattttttagtgtgctattgttgttgttcaattgctaagagtattgagtctgtactctcaggaggcactcaatatatgagtgaattacagcttagttctctgtgtggtgggatttttacatgtgactttaattttattcataaacattttaaacatttcttaccatgagccatttttattaaaaaaacattttcaaaacttggtaagtaactggaagaaaacctatagtgctggaatcctttatccacagttccaaaatttagaagtttctgagtattgaatgatttttttaaatctcatttagaagaattacctgacctgaaatgacacgagggtatttatagtctttattatctcacttaattgaatattcatattttctggcagaaatattagtacatttgattatgagccattgccctaatctctctagggatatcacactctgtatatactttaatgtgttacaaaatctagaaaattctgacatccaaaactcatcagtccccaggagttattctgaagaatgtttgtgtgtgtgtgtatatatacagatgtgtactgtgtatatagaaatttctgaaacgatacattgaatattgttaattgtgattatctctaagagaagggattggatggggatgacagtgaaagatgaatttatgcttgattatcttcttctttagtatttctaattattataacaaagtgattgcctttttcaatgaaagagtagaattgggtggaggttttatttaggaaggtagtggtattattcatgttaaaggctagtttatcaaacaggctatgcctttacaaattagttcagtatttctctctgctggcagggacccagaaaacgttatgcacacaccatgcagcctattgccttttggataatgtatacatggtctagtgacagagaatttacatcagcaaaaatactaattttgcttaaaaaaataaaatcaaggcactcaaaaatgtgatgagtaaatgaatctactgttattagtgatggttttggcacgttttacgaagtctgaacgattactcatcctctgtacgtttgcagaagtggcttcaacaaaagccagatgcatacgtactagcaggggtcagtaggtggatgagaggattaaaccccgtgagtttttggagccctggtttgtagctgtttttggcttgtcgacaggctactttactgagtcagcctataggatggcttcccagggtaagtctgattttgcttttctgagtttaaaatatacgtggtcaaggagagctgactcgttgccttttgcactggattgcttttgttaacagtgcctgtgtttctttctgtgagaaagacatttatcttattccagcatattctggtgttcctgctactggtttttatggctttacttcacctccctgtagtttttaaagtgaaatgtcttaagtgctgaaaggatttgcaaggggaattgcaaaggtcatatgtaagttctacggctggcgtatggagagcagtgtgattgaaccagagccctcagtgaccctttcttttcaagaggatgtttctaataaattagcgtagcatgctgtatgtgcctgtttatgaccttaaaaatggtttagttcttgctgagtggctattactgatgctttatgacatgttataatggtttcgacttgcacattttttttggattaaaacaatgtcatgcatcagtcaatgtgaagttcatttttcctttttttttcttttaaagggactcaggagaacattcaacattagaataagtccctggattctgacctcagagaagggttggttcttgaggttagaagaagtaaggattcgccaagctcttacaaatgagctttgtagtagttgctggtgaaattataaaacattgcttttcccactagatattaaatgccccttttcattagctgtagtatggggaacaaaagcatgtgatttttctttttttaaatgtttaaccgtagctacttttaaaaggcagttttcattttgtggctggttattttttttgtttttttcttccggtatctagcacagttaaggactttatcttttttgtatctttttaggacactctggtgaatgatggggtctgaatagctctcttaatggaggagggtaccgacaagcctgggctggaggggctggaggagcccagttgcatctctgcccggcctgcttgtggctatattgcccatgtcccttcctctccagctctcgggctggaggaggtcactgtgatgtgaggactggggcatgtccggggctgagagcttttccgagtggcagagacatctctgtgggctcagaaggcgatgtgcctcaagatttctgtccattaatgtttagtacccatgaaggggaaaattgatctgctctacatataaccctttctcaagaaacactgatagataaaaaggagtaaaggggttggagttgattttttttttaaacatgcacattagagctttaaaaaaaatcaaagcatttatgttcttagtggaagtctgaaacctcgtgccaagggctgcatggggttggaggttaatatggcccatctttttcagagcatccatagttctcaaatatttgggatacaggcacaaaagcctcaataattcaactagtcagtaacttaagaactgtttcctgccgataaaagcaaggagatattagagagcagaatgtgagataaaatgtgaggctgcctggagacctctcccttgctgatgatggtggactcagaccgttctcctaggccttccttccaggggcttgcaaggatctggctcaaaatgtgctttggtagaaaagttatggggttcacgtttgtccctttgtaaacgcagtctttccaagactgcttctatgggtattcaaggtgaattggtatgaggtttgagaaaagcctgggggcgagctggaatatttaatccaccatgtcacacacacatgggtactttaaaaggaacaggaatcttgactagaggcttagctcactaccacctggaaatggctatcataataagacattggtcctttttcaatgagagagacagagaagcatgaagtgtggtaaagactggcacctgagtatgtaaccctgtgacctttgccaatgttccctccctcccctggtgtggaacctgaatagtggtttagctaagtagtcaattaaaaaaaaattataattgttttattttaaaaatgttttatagataggagtaaaatcagtgatttcagagcacattatgtgtctggattatctcacctcttttgagttttgtcccttgttgccctcatttcttagtctttctcagcatctcatcaactgacaagatgcaaccccaaacagctttccacacctagttgcttgttagctaattcaacttaaatatatagaatgacatatatgtttcaatttgtgggaaagaaactcaagaaaatatatacatatacgtacacacacatatttgagcacagtctttgatgcacacacacagatatttaggtgtatctgtatctatctttatcttccccgtaatttactcaactcttaaatccatcatcacacacacgcaaaataaaatcttaaaataaccttcctggaagaaataaagagggaaaattagtaggcagtcttcatgacattttaatatgtgtatttactacttagaaatattcaaatacagctttgttttgtatcattaattctggtggtacaatatttgaaaaggtgacagatacaagggcagaacgcaattcttaaagctgtaatttgcagccggctgataataacaagtccattttcttttccaaatgtgctatttatataatttatatttttaaccaatcttagaactaggtcaaaaatagtaattaatcttaagggtaagaaatgttgcaactatgccagatttggaaactttaagaaagtctctggatggctaagcccaatctattgagtattctaatttgcatgtaacacattgctcagcagatagtgcgtgctcagttaactttaaataattgagtcaacttggccacactttgttttttttttttttaaagaaatgtacagagaggcctggcgtgctgcagttcatggggtcacaaagagtcgaacacgactgagtgactgaactgaactgaagcatatttagttaagaagtggcaggccagttttaaagcctagttaagataaacaggccaggcgaaacagtgcatgtggcaaggatagtggtgtttatatgtgcaaagagaaaagactgaaaggaagaacatcgaaatgtttacttttgatgatgaatgatttctattttttatacagtttttttgctttcatgtatttttccaaagtgagcacatgcatcctttgaaatgtagtcgtttcatggcacatattaggccttacataataatttgttaaatgctgagttaatttataatgaaaatgatacacatcagatgtcagtgatgttgcctggagttgggcaacacgacagctttgaggaaaacttacattctagtgaaatcattttttctttctcgaataacatttagtatcccagtatgatttgctctaacaaaacatacacgtttctaaaaaagacttaaacaaacaaaaaccactagataatgggaaatcatacaatagatagtacagagtctgtaggggcccctatagtctataggtgcacaatactcaaaaacttcgtcaagaacataaaggaaagataggaaccttagaaaaacagagttttacacttgctaaatggttaagcagcatacaaatacaatacaacttctcaagctttgccttgaaaagacctagtatttttttgtgaagggagttgcgggaagggttgcagcttgtatactctagtgaagcggtataagtaggcttgtctgaaattgagtgggaagttgtagcaaagtactgggtggttgtggtctgtaatacacatggtaactgaagtagcaggcagatgtttgcagtatgtacatcttgtgtatttgtacactacttgattcagcagggtgtggttttctgtgttcacttactgttccttggtgaccaaaccaagttcatgtgggttatgctcaaattgccctctgatgtatcagtcatgtttgagcagatttgcattttcaaaatgagcatcgtaacagaactagctctatatgaaatagataaaatcaagttgcaccagttctaggcatgtcaagagcctactttggaacccaactgcccttttagcaccccagtgattccggggaccatcattgtgtggcctagagattgtgtgtccttttgttcgtgacctggaagagatataggacaatttgttgttttttttttttttaattactttttttgtggaaacattttgttgtaccgttgtatccttccttggcttgtggctggtaggttcttcaacattcgcaaacttcagtcctattactagatagactatctggtaaagcaaatgaccttgaacttaacaggcacctcattccaggtcctcaccagggaatctaaccttgtacatgatgctactcaatgcttctcaaattgcttctgtgaaaaaccaacatttatggattaccatctgaaggatagaggttcatctgttactctgaatactctgaaacaatgaggaaggagggcagtgtcgttaaaaaagccatttcataaggtaacttttagtttgatttgtcaaataacataaaagaaaagcatgatagttttatatttatcagaaagattcattggttataaagtaggtaagggcagtctactgtaatatctgtacctgaaataatctagactagcagaatctctaaacctgagaatttgtcctgcccccatttccccgtcaacctcagcagttagttttatttcacgacacttagtatttgatactcttaaccccccggaaggtcatcatgaggtataacccatgaatcctgattgtatggggtggttgtcttgtggatggatattccagtgtcttctttatgaagattcttggaagaagtgtctctctggtttttataccacaaatgactgtacttctactcaactttgggtttttgttttatggatacagttagtcatgtaactgatcatgtcttcttcctctttatggccacaggcatgttttctttaacccatactttttttttttaaccaaaagaaaaactagtttgccagaactggaaaatgagatttctcacaagtttgtttggatttccagcatttactgaaaaatcagatctggcagtcctgggatcacgtgtctccatggcaaccatgggatccaataaagtaatgccatttcccttacaacagagcaggcactcttacctttgttttacctccttactttaactgcccggcctgtgtagaccttggactctgcccggtagctttgaaagcaatttgtgacttacctttagaaaataggcaggttcctctttgccttttgggagctaatgtattcctagggtcatgtaattttttttttgaattttctttcatcttgttttcttcatccatgcacattagttttctgttgttttatattgtggggttgtgtgcttttatgtaagctgccttgagtctttgacggggggaagaaacaaggtataaataaagaaaaatagaagagtgactttccccctcagaacatcttatttttattttttgcctggtaagaatttaaaacaatttcagctcttttctgacctattttagaatttccttgattctagtaccattcagagctctgcagttccttgttagggttttgttttgctttggtagctcttcacagagactctgagaaagcattgtttttacctgattcattgacttcccatcatggtgcattaggaactgaaaattttctgttttgaaaatagattcatttgtatcattttttaagattccaaaaattccaaaatagaaacagattcacagacccagagaacaaacttatggtttccagggagaagtgttgtggggatagattgggagtttgggattgacatgtacacactgcaatatttaaaagagataagcaacaaggacctactggatagcacagagaactctgctcaatattctataatcacctaaatgggaaaaaaatttgcagaagaatagatacgggtaatgtataactgaatcactttgccgtacgcctgaaactaacacagcactgttaatcatcttaacttcagtataaaatttttttaaaaaagaactgaaaagttagctaagtcagaatatttgttcatgcagttctaagagggaagattaggccaccatgaaccttctagagtttatctgccaagtgcaaagaccctgagaaggtgccattcagcaccctgcctgtggcactgctgtgacttccggggacagggtcagagaagtcagtagtctttgctagtgtggggaccttctgttctcaatctggctgttagatgttagtgtagcctgcatagtgttgaaaacaactctggaccaatcaaaatgtgtcattaatttttatactctctttagtgtttacatattcctttgaaaaatctggagacccaaacatatgggccagcattcaccctgcatggttgtacgtctagttcaccacaccctcccactacctcttgtctgggtgactctgacgatgaatgccatgtgcccagtgtctctccatttctctgtatgggactgttgttgcttaaagccatgtcagtgcaccaccctaactcatctgctgtttagcataaaccacgctgtggcatgttttcctgctgcggtagtcaccttcccaagccactcagctctttccatggcattcatgtttcgtgaattgaattgtgatcactgtctctcttctccccagtctcagaattgcaaacttcctcagcaagaatggtatgctattgctgctaagtcacctcagtcatgtccgactctgcgaccccatagacagcagcccaccaggctcccccatccctgggattctccaggcaggaacactggagtgggttgccatttccttttccaatgcatgaaagtgaaaagtgaaagtgaagtcgctcagtcgtgtctgagcctcagcaaccccatggactgcagcccaccaggctcctccgtccatgggattttccaggcaagagtgctggagtggggtgccattgccttctccggcaggaatggtaggggtgtacctaaaagtgtagttcaaaagatcactgtgtttgtgcacccaacacatttattgagcacctactgtgtgccaggtgctgttcctgtgctaggcatagagcagtgagtgaaatgggcgcagatacatacctactggagtttacatcctgttaggggtggtgataagtgctgtgaagaagaaagccaggaagagttcctgtttcatttggggctcataggctagagctcaattctgaggtcccttttaaatagagatatgaattcactcgctgaggagtgtagaccaaggggatagcagtgagagtaagatccccgaggaggagcatacttgcatttggtgttaggcatggtttttacttcagtgctgcgcttcctaatggtatgaattagggtcagttgcatttgcctctggactatatctgtgcattcatctctaaaatgcaagactctatatgaggttcacagacataaactactgtacataaaataaataagcaacaaggatttactgtatagcacaggagttatacccaataatggaatctcattttcacacacacacacacaaaatgaattgctatgctgtacacctgaaactaaatactagtattgtacatcagctacacttcaatagaaaaaatcagattaaaatgcaagtttccacatttaggaaggaacgtggcttcctcattagtctctccccaaggtcaagtctggtctttgactcttggtaaatgttgagtaaatatatatgcaattaacagatggacacataagtcattatagaaggatttgaaggatctcaaaagcatagtcttagctaagtgtatttcacaggctcacagattaatgacaatgaacatgaccagctctgaagcatatgtgctgagagtttctctttaatggtgactccacagtttttatgctcagcaagctgcatctacagagtaccactgaggaatatgtatgacggaggaaaggggcctgaactgtgtctgtgttgttgtagctgttactattcattggtatgtcctgactcctagaagagtctctgtgggcttataggaggaccttaaagaacatttgttaaagagtgaataaaatcaaagccggcatacattttcacttctttcataaagcagtgttggagtcacactgcattctgcctgttttcttcccaagaaagatacactaggtccagagaagatgagaaagaccacagcaatgtcaggatcagactgagctttaatgtcttacttgctttgcttcaactcatttatttacgttcttcatttgcagttgggaaatggaagcttagagctagtggcagatacagctagtgtgagtccagggcttgtgttcttactcatggaatgcatcgcttatagggaagaataactagcagatacagaaacagaggtatgaaaggaattcagttccactatattggcgttagtaactgatgacttttaatgctattggaagtttcgtatatgacaggtttcagatggagagaggggtctgctttgtaactcacacttacctagtttgcgtatgcctcagagactgcgttcgtgcagtttctggaggattgatcaggttttctgaaagccatgtgggaaccccttcctaacgtgaatccttgttttgttccactaacgtgtggataatttccaagtgtgacagttacatccctctttcttcatagcctatcagctttcgctatcacattcatatttaacgatgtgctagcaacactgtcctcttgtcagcctcgactcctcccttctgtccccagttcatgaacaaactcttctactttagtattattctagggcagttaggttttttactgcttatttccattttcagtggtgtgaaatgatttattacttttgtgcttttgaaggagaacagatttaaaggtggaaggaagcttggtgaatttctagccatctgttgagtttgggaaggaccactggaacccctctgttttgttttcctgtgtacgtgtgctttcaaatgaggggaaagttgtgatttttgtagcaggtgtcagcctcgatggcaaggggaagcagatatcctggccagctttctggggaagaggagaatggttgtgtattctcatgacttgatttttccagtgctgactgtatggcaatatcattctggcaaatattggctggccgtggaacatttttaagtgcaagggtttaataaatgttctgtctattaccatggctgaggaatcaaaacaaaatactcttcacacagttcctcgagcattcatggatgggttccagggtattgcttttacgttagctcctctatgtgtgaagaatctaaaataaaatattactgaaaacacattgattaagaagagtagggtataattttttgtaccatttcccttttctatacagtaatactgtgccaggaaaggtgatacagatgaactgcatgcagaaaggctttgccagaatttatgtcttcatactcttgttatggtcatgatagtgttgacaataatatgtaatgtctgtgtgtagctgttgataatctctgttctcacctaaggaaaaaaagctaacactggtaatattaaaaaccaaaacaaccccctccccccatttatcccaacagttgtcagattttgtttcccccctactctatagtgtgcttctcacgtatttatgtgattaatgagaatgagtaattgagtataagtgtataaggagtttataaggacaatattttactagtgactttttgcactggggctgtatttgggcagagattcttctgcagtgcttcatgtgtcttaagaatgtagcagattgtcccagacatgaatcagggagttcatttctgacactattttggaggagttctctgtgggagtctatgtttgcgtcaggctggggtgaaaatggcagtgctgatactgttaataataatggctacactgtattgaatgctcacacatattcattgtattaagtacacaaggtgcattgttccatggattgtcttacaacacctgtgaagttggggctcctcttgtctccattttacagacaaaaaaactgaggcttagagcgatttgattatcccctggctgtacagctaatgagaggggacagaccttcattttgactctgttctttccttcctctctctcctctttttccttccctctctctttctctcccttttcccctccctccttctttctttctttctcattgcaggggactttataggcaaatcttgttttcttgtactttgatttattgcactttgcaaacatatatatatatatatatatatatgtataatatttttttgaacaaactgaaggattgcagcaaaccttcttcaaacaagtctatcagcactattttcccagtatcattttctcactttgtgtctatgtcacatttggtatttcttgcaatatttgaaccttttcactatttttatattcattatggtgatctttgatgttactattgcagaaagattttggctcactgaaggttcaggtggtagctagcattttttaacaatacaaaatttaaattgaggtttgtgtatatttttttagacataatactattgcacacttaatagactagcatagtgtaaacataactttggtatgcactgggaaaccagaaaattcatgtagcttgctttattgtgatatttgcctaattgcagttatttgaaaccaaacccatagtattgttgatgtctgcctgtatttgtatatttttattagtctataacataactttcgtatatatagtgttgtatttcagcttctgtatacactgcagtttgctcaccactaaatgtttagtttctatctgtcaccatactcttggccactttacccattttgcctctccctgtaccccatttttctctggtaaacactactctgttctctgcatgtatacatttgtttgatttggtttggagagacctagaggggtaagacaggggagggaggctcatacacacacacacacacacacacacacacacacacacacacacacacacagagtctctctctctctaagatgtgaacccagttctttctcacacacacacacacacacacacacacacacacgagtctctctctctctaagatgtgaacccagttctttctgaccccagagcctggtcgggtagctcattctcaccacatccttcctagaaataggaaactcttacctggaatattttagcgatctgctacttatttccctgctttcttcctctttcctttttaggtctttttcctgccaccagccttctgatgcatgcacctcttcattgaagtcccccttccatccttcctttcctagtgaactcttttctggacttccatatcctgagctttcttctctgagttctcacaatactttgttcctttattaatcaaaacactttgcagctaatagtcagctacttaagtattccaaggattcctaggcccccagcgttcagttttgtgtctgtgactttgtgaatgttttttcttgagactgtccatagttttcatatgagtctcagaaaaatatttgatcaaaaagttaagatattatttataggattctctgtcctcctctaagtaatgagcacctagaggggaggagcatatctgatttgtatttattttcttggatggctataatgatccttttttttctttcccccgagtacctggataaatgaatgtctgtaaaagtaggaccatggaggtatggcctggaggttaagaacagaggatctagagccagacagtgccttggattgaatttctcctctgcaaacagtctagccagtgatacagtcacctcaaaaacctcactcttctcattggtaaaagggacatcataatcgtgttgctgttagagggttgttcctgaggaatacctcaaggtatgctatgtaaagtgcctagctcaagagtactttgcatactacctgtaattagctgctattactattattactgaagaactttgacatggctagagtatgagtttctcttgatttttctagttactatcatggtgatattacaaaaatatttttcatgccactttgagttttcagagcttaaaatcagcatgctttctctagtcaaagtgacaggttcagctcagagaactccctgaaatgttgctcttgggcatttcctttccccctggcctcaactctggctgtttagtgtcttaggttcatgaagtgccagctaatggaaatttgtgatgtgggcactctgccccccaaggatttggacatatgcttctttgtgttttaatcaacagaaaaaagtgcagctctagccatccttctgcataatggttgcagtagcctttttccttgcatgttcttggaacccctgagtgccagacctgtcacttactgtcccctctgtgtgtctcaggtaaaagtccagtaggtcagatgaaaggcagagaccagcagggcataatcactagtctacgtatagcactgatgagtagctggacacagatcacggcttacatgttatttatagtagtgtggccatagggtcatgttggcaagaagcagcctttagaaaagtgctttagttggcccattaatggtcactaaatatagaaaaagtagttagtgaaatctctttacagaaaatgtattgtgagctgggtgcattgacatgaggaggaaaattgttgactcttattttctcttttttttttttggaatgtatactttgtctttacatctctggtaactgtatgacctttagtgagttatttgcaaatactctttaaaaaaaaaaagtcttaaaaagtatggtaactttattcacaatcaccaaaatctggagatggcccaaatgtcctttcacctggtaaaggacacgtaagccattgttcatccatacagtggaatattaacgtgcaaatagataccaatacctgccacagcatggattgagctcagatatacttgttaagggaaaggagtcagactcaaaagtctatgttttaaatgatcccatttatttgacattctggaaaagacaaagctgcaggaatggaacaataagtgtttttcgggggactggggttgggtgacgttctgactccagacgggcagcccaaggaatgtctgaagtgtaagtgcaatgggtcagtgcactctgtcctaatggctttaaaagctgtctggtaaacaccctgaaattttggtttatttatttgacgtttacgagttggagctcctttgtctcccgtctggcagagctgcttactttaaaatagttccttggcctcggcaatattgaacattgagggctggattgtctctactgtgggggctgtgtgggacccagtaaggtgtttaatagcatccctagtttctacgtactagatgctcataacacctgtcaccctagttttcaaaaaatctgtattgaatttgttacgatattgtttatgttttggtttttttggccgggagacatgtgggatcttaactcccaaccagggatggaacccctgccccctgtacttggaaggcgatgtcctaaccactggactgccaaggaagtccctgtgtccccatttgtgacaaccaaaagtgtctccagacattgtcagatgtcccctggggacaacagtgtctcattggagagccacaattttaaaagattaggattcagtgaaaaggcattgagttaccacgactgacaggtgagaatcatcactgtaaccttcctcttgcttccctgtggccccatccgggctccaggttagatagaggaatattctagtcggttggcaggggaccttccctggtcctggagatcggccatttcctcttacaagtgccttggccatttgacctcatgccagtgagtgctttctctccgctcagggactgtgagagcctagaagtagtatctgtgtacttgccgctcccttgctcttacccctcctatcctagaggtcaactttttgggtctgatgagtcatgcttactgcatttataaattgcttccatttctcccaaagcaaagaaaaaaaatttttttttttggaaatcagtttaaaaaattataataaatacttgttaataaaccaaaattaaaagtgccagtgaactataagatgatcatatttcagatatatttttacagctttgttaatagtttgatattaatttgggcttaagagttacgggaaataggcagagtggtaaaatgatgagatcttttgatctttaaaactttgatcttcaaaattttaaatatatttaggtggtacatggttctcccataccttcttttttttaagattttatttaattggaggataatgacttcacaatattgtgttggtttctgccatacatcaacatgtctcagccccaggtatacatatgtcccatccctcctgaacctccttgccacctccctgcccatcccacccctctaggttgtcacagaacactaggtggggctccctctatcacacagcaaatccccactcactatctattttccatatgataatatatatgtttccatgctcctgtcaattcgtcccaccctctccttcccccactgtgtctacaagtctgttctctatgtctgcatctccattgctgccctgcaagtatgttcatcaataccatctttctagattccatatgcatgggttaatattttttcatgtccagcacaaacctgtgtgtgaatcccaaagcattataaagttggctccatctagtgtatgaaagtattatacagctagagggggagaaaaaaaaaaaaaaaacaactccattctggagatctcctttggtacgtcattatgaaattagattaaaaagttaaacgaaaacaaagatgggctataagctatatttgtgccccaggagataatgcaggccaaagtgaccttcacagtgtgagaggagaggtcataatacattgaagcatcaacatccagcatgcctgacattttgttctaacagccttgccttttctttttctggacggaggtcttgtttacaggcactatcaacaattgtggcttgtccacttccattgtgatactctccgtcctccttggcctggcccctggttttcctgtatggaatcctatctgccagtcatgttcatttcccacagttaggaagcgattagggctaggcccatgtactgtgatttcagagccctacatgatttcctttatcagactggaattctttgtagctgtttgcttttcactgcagtagagtagccactatttgtgggttgtgtttgatctggtttccacggaagggttctggcacattcttcatttctcttagtcagggttcccaaatttgagccatactcatcctaacttcatgacttttgcccccacattccatatgatggcttaaataaattaaaaacacatattgaaaggaaacgccgtattaaatggcaatgacagatggatgcatgtgtaaaataaatataatgaaattggaagaaaacagttcgatccttattggatgtgttgtcaagaagggcctgagtctgagatctgaactgtttttgttacaaagggcaagtattgcaagattgaagacatgttagcatcaaacagacacttttcgtgggatgaaaagaaatttgaaagggtctttctctctgggtaattccatggtcatttaatgtggagtctatgtgtctccatttgagatcatcctgtatcccgcacgttgagaaactttgctcacaatttgccatcttttccagaggagtttgtcatgctcccccaaagtccaaagctcgtctccccctcaaaagcctttttcaataattctttattttctgagcactgctatacttctcctattaacaagaagaaattgtgctgatattcatattttctcactctctttcccaactagattaagttaattgaggacaagcagtgtgtctttctcttctgtttctagtgaatgccattactttaactcatgtttggtataaatattcagggaagcctgcttcatttcctgcttgtgttttttttaaaggtagatcatagtcagaagtgatcagaaaatgcaccataatcaatttcattattcacttaacccgctgacaactagttattgggttctttccctggatctggaattgtgtctggttaaagaatgaagagggaactaaacagaatgggttattccttcttggaattcagacaccagtgtcgggtgtggggtgcagacagctaaagaggcgactccagtgcaaggctctaattttaggattagtttgcttttgtgattgttgagtggctcacagaaacttagagcagggaaccacagtgagaagcgtgtgggctctggagttttcaaacgctgaatttgcagttcatcaacatcttgcttctgagcaagttactcacctcaatccctttccctctgtttcttcatttaaataaacatgaggtacgatatgcaaagaaaaggcacagttatccgtgtgatgatatgatgaattctctaccttctctcttcccctgtctctttttttttaaaaaagaggcagagacatgatctcatgattttttcagatttttcaaattttctgcctggcccactaggaaatgaaaatgcactgatccttgatccagtattagaaagcaaatgtttttgttaatgggaatgtcattgtagatggtactttaagatggtaaattcatgcaatttccaaattacctatttaaattagtaaatgatttgagcattcagagttactccaaaacacttctgacttcataatctaagcgccatggtatatcattaatgtatctcaagcatattcagtagtgcttggaacaagtaggtactcaataaagacttgttgaatgaatgagttttaataagaattttttgatttttctagcttttattcataattttgcccatatgtatgttttttctttgttctgaaatttttaaaattttattattggagtataattgctttgcagtgttatatccttatcttttaaaaataaaccagtgttacttgatatgaggagcttattaataagcttgattgaaagtggtggtgattctctgcatctccatcaccagcctcatctgtaatacctggcaggtaataagtacttgataaatgtcaaagcaagaattagatagttctgataggcactattttttttaaggacttataacttaattttgtcaagcaaagatgtcttttttcctttgtatcactacatagcagtattacttgaaattacacaggctattaatttaaaacattggttattttaacattttactatcaacataaatatacactttgattataggcaagactccttagagtataagtcagatgcagaatgctattgtgtatcaagtttattgtgattgattagatttaatcaacatacaggaaggattcctgtgcaaatattatttttctcatttcaaatcctatttgttcagcataactgaaacaggatgtcattagtgtaagggtaagtattgagatgctttggaagtttgggaaattttgactattgacataaatttaacctatggagatctttcttttgaacacagaagtttgatttgttatattttgcttatttaggtacgttatttccttcatgacttacgaatatgtttataaagttaaaatacaaattaaaaaagtatttgacacattgtcagaactgaagttttcctgggctagcagttttgtctgtagctaagacaaccattaaaaaggcatcaatagttgtacactatcagaataagtttcagatccccatcaacatcttagtttttggttttttattatgaatgaatatgttatccacaaatatctctggaccttttctgagcttacatttgttttcaatctgcacaccatcttcaaatgccatgtttcaaaaacattttcacttctgtctctttataaataatttatttacttggctgtgcagggtctttgttgctgcccggacttttctttagttgtgaagagggggggctaatctttgttgcagtgtgcaggcttctcattgcggtgacttatcttgttgtggagatcgggctctggggcacgtgggctcagtagttgcagttcccgggctctagagcaccggctcagtagttgtcgggtacaagcttagctgacttcatggaacgtgggatcttcccagtccaggggtcgaacctgtatctcctacattggcaggcggaattttttaccactgaaccaccaggggtgccctttcactcttgtctcttaataataacttttatttgtcctacaagttgaagttctttgaggcttcaaggactcacttctcgtgccctagtgttctgaaagtggccttttcccttgcataatattgatggagtgcaattttttttgcaggcactgtgctaggtacttttcatacctcacttcatttagtcacataccctactaaacaggtgatataatagcaatctccattttacagatgtagatttcgagactcagaaatgaagtgagttgcccagggtaaagctacgaggtgaacatagtgcatggggtatgtgtgtgtctgcaggccaccgccacacaatgctgtctccagctgaaagatgatgctaagtttagatcgttaagcaagagagacttgagcaacgattcacttatttatgaaatagtggacccctcacaggctaaagaccctgtcctggattcttaccacacgttgtacagataagagttatcacacctggcacactttcataccaccgtccaccatagtgttgtgattgtccatgagaaaaatctatctctacctttagttcagtttttataatacaaataggaaacctccgtgaatggcacagaaaggctaattggcaaagtgcctgtgtcttctctgtcttcttcgcttttccagttccccttgagccataaagggtcaggtggttctttcagttgctgatgccctgagtgagaatctggggaagggtagactcatctgcctcagtagccaggacctcagcccagagggtgtgtagaggccacttgtcagagctgaatttgtcttgttttaacatatttgaatatcttgactctagggaagaagaatgaaactgatgtctatcatgatgaccacagggtcgcaccctcctgtttccatcctcaacaccattaggataagcagagactctatgggcttctttgctattcagtttaattacttaaaaaaaaaaaaaaagagttactacagtgaaagagaaatctgtatttttctttttaaataagttaggagttcaccactgaattgagaggaaaacactcaaagtgactttaaagtcctgaagtggaagatttgacttattataaaatcctagtgtgaataactttgcacccctgcctccatggcaacagccttatctttttctatttatttaccttgataaggaaagtaattgcatttttactaaatttcttttttgagaaaatgccatcaaagcggcataatctccatccgtgtttccttcctcaagtttgtgttgcctcacgaacttggcttttttttgtggattatgttctgcttattgcaaataccccactgccattgatagatagcaaagaaacagcctccgaattgcctttaatggagagcaagtatttcttttgaagtgaactctaacagataatatcagagagctcaaggtaaggaactaatctcttgtattgattatttatgaaagaccaactattatttcaaatattgctcccttcattaattgcttaaaaatttacttcagccagcatttgaagtgcctcttttttgtagattatatttgtattctcaggacagagttttctaaatagtttggaaaagcattattttttttcctctaaatctagagagttctttgataatggcaacaggagcctagattaaatttacctgaggtcatcttggtcttgtgtgcattttccttttcacccttaaagggcttctttgtgagctcggtacaatgagcagtctttcagaagatgctgtcccatcattgttatagggagattctgttcttggtaggattaaaaaaaaaaaaaagggaaagaaacaaaatgaaagagataaacttgattgagtggtactgaacacttatttctgcagatacatagtcattaaaaatttccctcagtcctgctgtgagtgttttcaaattagaactactgggctgccagttcctgtagctttgtatcctcgtactttatccatgaaaataagttgtgttcagcaactgaaagcttccaaatgaaaagtatacaatcatgagccccactactgcctgttgacttcctaattaattaagtgctgtcatcaaattatatttcataactccgtccttacctgatctttttttattttgtcactcttcttctgttcatctttccttccactcatccatcattcactgaacaaaagttttttcagcacttatcatatgccagacactgagaatgtaatacatacaaaggaccctgccctccaggatgaatgacaaacaaacaaaacaaatgattaggagtgggattaagtgctacaaaaaaagaagcatttgctgagagagtaagaagcagaagtggatgttgcttctttaggtaggatggggttggggaggaagccctccctggggaagaggcacaaaacctgtgagacctcatctgaaaggtggagaggaacccctgaaactgccagtctgtcccccactcctaactcttaaccatgggcctgtgtatgtgagtttggagtttccctggggtgagccccagagaagcaaaagctctcatatcttcttctttatcttccccacagcactgagaaacatctctcaaatgctggccacatcagtgaatgtttgagtagaagggccttttggtgacatctgactttccaaaatgtgagcatgatggcatgtggggaaaagagccagatgtgtttgttactctggacagaagtttttgagttttgcagccactttcacgatacttgttaattacctcataatactttcacttaacattcaaagcatatccattgtataataattccaagcggacactttacaacatcagactatacaagtaaagacttcttatttcaacagataaagggaacttgagaatcttgggtattttcctgtcactcttgcagagataattttcatagaacatattatatataattatgtatgttgaaatacggtatatagcagtggttccgaggcctgacttcatattagtcttttctgagaatctttttaaaagattggaatttgaaacagtgttttggaaagtctcattcagtcatttatttgggggaagatctttgacatttgtatttttaaatgctcctgagttgattttaaagggatgatgggggcagaatggtccctaagtctttctgatagaaatgcaggtttggtgaaccattggctgggatcataatgaaacattatgggtagatgcttcctaaattgtatgtagcaggtagttcatgagtcagtatagtgtttggcatgtattaaatgtcttcagctgttaattattgttagggtgatgagaagtagtttactgaaaaaagcaatagctatcagaaggaaagatgtaagacaatgatgtgctttggggaaaataaaacatttgatacccaaataaaataagaaggattctaactgtgttaaaagagtggttctacttttcttcagctgagttttggacaggataacaagtaaaacctcttatctcttctctaactcattcaacatagtgattgagtttttccttccaaaaagattgaggcccaaagttagttaaaaaaaaaaaaaaaaattggctgtcacttggatgtttgatagttttaagttccatttttgttacagttgtctttggagaaggtcagtaagaattctgatgagtctagttgatttgctggaatttggggcaaggagtagcagttaagatttgaattatatgggagtacaggtaatatttttattctacactcagtgtttcatgttaaaagtattatttttcctttgtctctgttaccagttcttattttgtattaaacttttagggtttgtgtgtatatatgcctgtatgtgtctgtgtgtatgcatacatatacatttatatgtgtatatgcacttaggatatatatctgaatagtacatatatgaacaagagagttgcttacacattatagattaattcattgtcagtgtatttattgaacatcaattgtggattgtttattctactagcttctagggatacaatggtaaactgaacagatatggttcctgccactcagaagacatttgttaaatgattgtgtgactacttgagggacaggattgtggaaatgtatgtaatgtttcatgaattttatagcttttgtcagaggtgtatgtcaagctttattccatttgctgataggtatttcattgctatgttcagggagattccccaagaacatttgcgtgatataggtatttctgaaggtaccatgaataagttgaacacatgccctgtgaaagtaattttacttaaaaatttatgtaaacagtcaatggatagcctccttgggttggtagattgtccaggacaaaatatcaggcgatgtcattggcagaagctgccaggggagaatttggcaccatgtggtgtccctgttggaatggctggaattgatgccattggtttcacgatgaacatctgagagcctacggagggcacagattttccctgtgtgtaagcatgtaataaatcagggtttcatttcaaaaacttactgggaaccgtgtaacttaattcagcttcaaatagtgtccaaggtgggagagagtccagcttggtcttttttaaaaaaaatcatcacttaaaggttctgatatggtaatttcctaacctctctgttttctttgatcttcaaatttctcaatttcctcgccgcccccccccccactctgttgaatttccattggttctgtaggttagtcggtgtgcatccagaatagacagtttcaatcataatcgtaagagctactttttaaaatgagagcttaatatgtgtcaaagaaggaagttccactgtggctggagggcagagagcaagggtacagcttgcttccttagactgtaccatacatgttacatatgttcatatattatttccttcagttttaacaataacctatgggatagccatttatcatttcccctttcttgggtgaagaaaccggggcatgggaagtttagtaaatttgcacaaggtcacagaattagtaagtggtaggatttgaatctgaataagttgacaccaaaacttgtgttcttgatttatctgctctactgtgctagagggagaaaaagcaaggtgtggagcaggttagtaaggggaatggtgtcgcatcttagtcacctgttaacgctagaactcagtacaatatccagtctgtggaaagtcctcagtaacttgttaataatgagcacgattattttcatcagggatctgatttccccaccccacccacattccttctacatattggtctttagcattaccagcagtctacctgctttcatccacttgtctccactcttgtccattttcccttatcgcctcccctcacctccatgaagtatcgtcacctctgcctaggactatggcagtagctaatcttgttgctcctctgggtggttctcaatacagcagccagagggacctttctagaaacacacatctgagcctgcttacaacctctcaatggtttcctcttcatcttggaagaaaatcagtgactcttcccttgtctcccaggtcccgacggtctgacggtagccactgcttcagtctcatggatacccatgattcccttgctatctgacctccagccacagtggagcttccttctaactccccacttcagggttcttgcacatgttttaccactgtttagaagactcttcagagaaggcagcggcagcagcagaagactcttctcccgttccccgcttcacacccagaatccataactgctacccccgactcacatcgaagccccgaggtccctgcttaagggaagcctttcctgacccttacatattaagctttcccagttccttgttgtatttatcacaagttacattaaatacttgggtgattatttaagatgtgtcccgttagacttgaagctccaagactttgcacagtgcctgggatgtagaaggtgttctataaatatttattcaacgaaagaaaaaatgaaaaatgaacaaagaatacaaagggccaggaatagcttgtctgagacttctggctggatatttcccattattaaagggaaactaaagaaagatcacttcatcacatgaaattcaagtttgagtatggcttattgagattgcactgttttccacctgtttactttgaagacagtctcaggcacagagaagtgaagtaacttgtccaggatacacagctagtccatatcagatgtctttgttctgacctttgaattgtgtgtagggaggaacagacattttcataaatctccaggacatttttaatgtgctgagtctgtaggagctgcatcaatatttgatattattgacgctgtcatgtcagaattttaaagtgtcttttgagggtatctgttattattgcagtgagttcagagtttaattggatgacaatttaagaatatgcagaggtatgagctaaagatgtcctaaaagatactgcccacagtaagaagcagcttgtgtctgatttccaccaagactgagcaagggatagcactccttatattcttggggtctgagggtaaggaatgctgcccaaatctcgaccctgtcagcaggaaagcatgttcagtgagcaacctccagttccaaaaatgcttttgcacggatgcaaagcagctcgagctgtgtgatgagctgctgccagaggtgtccccagttgagacgggaacaagctgtcccacagccctcctggattctgtggttcttttcggtgttggaaattcacctggatgtaaaattacctctgccttcatgttctctaataacacgcagtcactgcaagcccccaccggtacctgtactggtgctcgagagggctaagtgagcatcccaggtatcgcctggctgctggcttgggtttccagtggtgccttggtccttgtgaagcccctgttgcagggtgaggcagcagttttttgtcctgcaggtacagtaggtactggattaaacaggtctgctgttgcagacagacaccgggcaccgttgtagcacaagctgtgtttggattggagtttccagggccttatcaggagccacccctagtgacacagccagtgccagaactaactttgactttcactcttcgccaagggcttgcagaacaccttaaaggaaaaaagatggaggcgcttagagttcagatgttcatgccttgttcctttgaaagcttttatctgtaagtggagttttattctggaaataatactgggaccacttggcaggagttttgttttttttattttttgtttttaaggggagaacagagaaagggaaggttttatcgggagttaaaaattctgggactgttactctgtgatgtggctttaatcggcttcagctgtaacctctggtaggtgactgtgacaaggataacaactaatctgtggggtggggggattgaaatgctagtccattagctctgctttctcatttgaaatggaatgttggtcttaaattaatcatgcccccaaaatgactgctcgaaaaatcacagctctgagtgagaacagagcttgatttatgattactaaggtagtctgaagctgggctttgcgatgactaaaaaaggattttcttcaggaaaacgggtgtgcttagtgacattggtcagaattgtccccttgcagacactggattttttgctttctcctctcccctttaccccacactgtggagtagtacacttgcattaataaacatttcatttgcatttctttatattgattttttttttctctttgagaggaaaagaaaacatccaaacatcagaatcatctatctggcatagaaatgtagaatgagtttgaaattggcactttcaaagaaatactaagatggagaaatgctaaatggatcacagctttctcctatcccgcccccgccaccatttcctttaatatttactttcaatgttaggtgataagatttgaaaacaatactaaaagccatgtccctaagtgaataggcattcaagcaaatcaacttaagcaaaagccacctctggagcttaataattatttactgaacgttcctgggtcatgagagaggttctgattaagtcagaaaagcattatgttcagcagcttgtgaaggtgtgtttaaagacggcaagaataatggaaaaatactaaaagtagcagaactatttttagaatttgattcttaaaaaataaaattcctgtaaatgtaattgtggtaaaattcctaatgttcagtggatacatctttaaaagactttataattatttaaattgttttctaatgtcttgttctatttttgctgtatggtttgcttttatagatttttaaaattgtatatgtcattaaaacagtttaattactcatctctctaaagtgatagaacattttatgaacagagtatatacattattatgtatttaaaatgtcatcaggttagaaatgttacaattttatcctttgtaaatcagatactagttagttctctgtggttcatatcacacaagaatgtcctccataacttagtaatttttgaaatattatttttaagcaaattaatggatgttataaatggataaagcgtgccatttagctttaggatagtagtgatgtcatccttgaatttatatccaaaataatgcttaatttcaactgcttttgcttaattgatttctttttttttttctggttgactaaaatactggccataggaccatgcttccctttacaaagtctcagaatgaaattcttagctcatatctttgacaaaacttgttcactgagctgttgctcatttacttcttcttgcctcttctttcagggagggtatactctgtgaattaattgtttcttttgtatttgccactaggaaagcaaagaaacattatagtagaaggcaaccttataagaatttgggttcctagagaataactttccagttttcaatagttccaagttattagaaagctcagagagtaccaatttgggaattcaagcccagcacagaagaatccatggcctaacatttacttactgtctgcagggtgtgctgactgctgtcctaaaaatcttacttgcattaccatattcagttctcatacttgctctttgacaaaagtacttttctcctacctccattttgtagatgacaaaattcaggtttgggcaggtgaaagatcctggccacgtcttatcgctgagaaacggtagagctggaatttcaacagaggtattctgggtacgtggtttctgctttcctcttttccactcaatggattttcattccagatactgactgaattgatgtttcttcctgtggccttttaattgtgtttctccaatgctcagatttctgaattatccaaactgtacctcctttgtgcttttgagtggctatgactaatccagtgtcacagtatttgtctatcacatgggtttccttgtatctgatttactattgattataagatgactgcttaggggagaagacaggtctactaataagaaaaaaaatatatgtgtatatatatatgtgatctattctgacttgagaaaccttaaaatatggaggaaaagtttgtcttataattaaactaatgcagttggtctctagaactgagatttttgggaaaagactgttctctatcactggatgactcaggcagtggtttttattaaaggtcttccagcattaaggttctagtgttacctgattttaggaggtgggttatttgttaggacagcgataccaaattaactctttggatagatatttatttcatcccactatgtgctaaatattcttttaggtgctgaggaatttaggtgctgctgaatgaagcatagaaatctctgccttcatagagctagctctatctggtcatgaggggataggagcgttccagctctatccttaagtctgggtctcatcttcatggtccaaagtggctgctagacctgcagccattacagctaaattctaggagacatgatggcaaaatgggtatctctttaggaagaatctttgaacaaaccacatgatctttctgctgaagtctcactagcaaaacttaggcatgaagcctaacactagaaccttaaaaccctgaaaaggtgggaaatgtgagtggcagtgtaccagccaaaacaagggcaaaatagaatgggtagctagattgtttgagttgtagctcttaggccaaaacattgatttttttatttttaacaaataactgatattttctaaaatgacatgaaaatgtaccatggtttaacagagtatatccaactggattaaacagaaatggagattgagagtcccttgtacatcagtgtatcgggtgtccagggttataaggcttcagggatggtttgatccagatgctgtttgtcatccacatgctggcttcttctaccctcctccttctttctaggccccggttccttcttgccgttcacatcactgtttcctctagtttgcctttctttccacataggtccaggaagttccagatttatatcctaccgtcttttcaaaccttagtataaacagaggtcttttaccccagtagttgtagtcagaggcattgggctgcctcttattggatcattttagagtacaagcccattcgatgggtatgttgattgatcaaacccacattgtgtttctaggtctggagttagtagcaccaccataacctgcctcatgaatggaaagtgaaggggctggtttttcagggtggaattagggtactttctaaaggaaatgagacagtatggtgagccagcataagtaacatgtgaccgtcataaatcattaccactgtttgtaaggctggcttttagaccatgacaagtgcatatactcactgctcctgagatcataattggtacttttgtcttgatttttacagttttgcaaactttgcatcttggttgatatgtcctagacatgtagtaattgttaagtgatggcaatctaaggcttttgaatcttctctcacctgttgtgatgctatcttgacacatggacagagcatacctgtgactggggtgattgttcgagtagagatagaaggctttgagtctttaaaaagatccttccagttacttcacactcatgtctgaattctttcattagattgtcatggtggtttgatggtttagtcactaagttctgtctgactcttgtgactccatggaccatagccttccaggctcttctctgtccatgtaattttccaggcaagagtactggagtgggttgcatttccttccccagggaatcttgccaacctagggatagaaaatgggtctcctgcattgcaggcagattctttaccaactatagttttggataaaagtttgttccttttaaattgctctaagtgggctatattgttatgccatatcaattacttataccttgtaaggaatggatttttcagagtcttttaaaatatggcatctagatgtgaatgaggttccacggttggacagtgtaaacaggaattctagagtgtgatctaatgaaatgcagcttgataggaaagataggattgagtgtggggctgtctgctttatctgcattatgaccttttgataggctgccagaaataatttcttagaaacgaattgagagtgaagagtgtggaaagccgtggtggcatctgtgggaaatggaggacagttgtggccttaaaaggaggaaatggcaccctcatatccgtgtttaaaaatagctttcagtaacagatactccttggttggagtgtatagaagtaagaaaatcaatttgggaggggtgcatataatcaactttaaaaaaatctgatggtgaatactgcctggaagaacactgggctaatattatagaggtctcaaacattttgggccatatctcctaaagtaagttttttcaagctggctctctcaacatattttaatttacttataaatttcatacatgtgtcactatactgatgctatattataatatgtgtgtgttcattgcttagttgtatctgactctttgcaaccccacggactatagcctgccaggctcctctgtccatgggattctccaggcaagaatactggagtgagtagcctttcccttctccgggggatcttctgaccagggatcaaacctgggcagattctttattgtctaagccaccagggaagcccaatattataatatacaacatgtataaaaatagaaaataaaaatgatgggtaaattttatataaatttcaatctttttcttcctgtactccagggaatctttttgtaccctcttttgaagaatgttgatatattaggtgtcttattatgtttctttgaaaaatactgatataagtcttataatgcttctttttgatttttatctcatcagttattgaagttactcttactggtgcctctggaaggtccagcttaaagagtattaatcctaaatagattcagagagactacgattctttcaaactaattggattctaggtgttgaaaagtgacgattttggatttttaacttgcatatttttaacttggcaattcttgcttttttagaacactttcctccttatgcacaacaaagagtaaagaactccagaggatgggcatgcagtcctctctggataccaagccggcctcatgtctagcagaacaggcccttggaagaccttcagatatttgttgaaggaaagaagaggagaaagacaagctgcactttgcaagcctttttatttcctctgtgccagaaacctgtagcatttattgtctgagctgatagtgttaccaggaaaagctggacatttggcatgttttctttttttttttttcttgaccgctgcaaccaaggttggtgatggctgaagtccacaagatttccacttttgaagccaaagtgtgaaatctggtactttcacatttacatgagttatactctcagttattttaagtgagatatatgtttatcatatatatcacttatcagatacaccatatatttcttatatttatatatatatatcatatagacaagtatcaatatatattcttattggtacttgcttctaccatacatgatgaaaaagtcatctctacacttatacagcaatgactttggaaagaagggaaaggttaagataatggaaataactgatcctttgaaaacgttaaatactaggactttcctgcttcgtctagtggctagtactctgtacttccggtgcaggggcccaggtttgatccctggtcagggaagtagatctcatgtgccacaactaaagagccagtacagccaaataaatgaaataaatattaaaatgttagatacccatactgccatttaaaaagatatatctgtttactgactctcacattggtaatttatgcacttggacttactttctaaagactcttaacaatctctttttgctgacagaacagcacttttgtaggttcggcctgtaggttcttatgtaatcctccttatgatagaatagttatgttgtaaccataatgattcattggcagtatctggacagattttttgtcttgttggttttatagcccatttggcaggagtaggtggtccttcccatttccttccattcacatgttgggttcagcatcagaaggactcttcagagctcttgtcggagttatcagaggctggggatggaatgtgcatttcctcagacatggaagaaagtgttctggtctaagaatcaaagatgtgagttcatgtcccaacactcctaccaaacaaatggacgatcctgggtgtccaagtttccaaacctggcatcaaaatcagtggcatagtttttgtagacatactgattcctgggctttacctaacctgaagtcagaatctcttggaatggagcctgggcattttgacttcaggcagggtcctcagctgatgctgtggcagtcagccttctgcatttggaaaccctagtagcttaacctatctctgacatagctttcttacctgtgcatgaggttaattatcgtgccttcctgtgtcttcactgtctatgtgaacatcagccactgtgctttcttggatataattacattgtatccagtgcaggcagatgctaggctttgagctctatcaactgaatgattataatgaagattcctttttcctggaaaaaaatactaggagttttactttatatcttgtgagtgaattgcaggatagattatcttctcttcaccccttcaaactttgtcaaattctctgaatcaaaaagggattgcctaaatcttaaaaaacagatatgctatggtccaagcttgcatacaggcttataaaaattcactttcttgcataaaaaagaagtagcttgttcatggtttcatgttttctgactactactttttttaactctgttccagtttatcaaaattgtgttttggttattgtgctaagctttttacctctattacaaattttaatcctccttctgatgccaagaggcaaatgtattaaacagtctataaataaagaaaaccaaagctcaaagagattgactgacttggctatcgtcacaggttagtaaaggccagaactgtattctgcctgaggaactgacgagaggtaaggcaagggaaagttcatcagctccttgagcctagaagctaagttgcagcttacagccagattcatgtcttggatgattgtgatatggagaccaaagactgattcctaaggtctggtgaaggggtattggcatccccgtgaaaggtgaggattggtcaggcaagtgttgtttggatggcgagatactgaattttatgagatttctgatatatttaaggcgctggtgaagtcagaggaattaactctttgaatttaggaatataccagtgattcacagagcacatgtccaaatgtctcttatcatcacagagaagggtcaggctttgaaggttaaaaatgtaaatttagccatcaagttaggaactcaggtcatgtttatggctacttagctaagtgtccatattctgtctggtgtgttatcactgtaacttagctggcattcgctccc

SEQ ID NO: 35 - RNA, 20 nt, synthetic construct
  source 1..20: mol_type = other RNA
acaccagcaaggtagccagg

SEQ ID NO: 36 - RNA, 20 nt, synthetic construct
  source 1..20: mol_type = other RNA
agaggccaagcacgtctggg

SEQ ID NO: 37 - RNA, 20 nt, synthetic construct
  source 1..20: mol_type = other RNA
ctgaaacagagcttgcacag

SEQ ID NO: 38 - RNA, 20 nt, synthetic construct
  source 1..20: mol_type = other RNA
ggaaggcagtccatccaatg

SEQ ID NO: 39 - protein, 178 aa, synthetic construct
MRKPATGSSWGLLKISQQHILPLLHKNREDAQLWLPLEIKDTPPGMDVSRLLLATLLVCLCFLTAYSHLAPEEKPRDERNLKNNSSMNLLDFPSVSIVALNKKSKKISRNEAEKKKRPSKRKAPMKNVARTRPPPPTPCVATRDSCKPPAPACCDPCAFCQCRFFRSACSCRVLNPTC

SEQ ID NO: 40 - protein, 3796 aa, synthetic construct
MSTDSNSLAREFLTDVNRLCNAVVQRVEAREEEEEETHMATLGQYLVHGRGFLLLTKLNSIIDQALTCREELLTLLLSLLPLVWKIPVQEEKATDFNLPFSAGIILTKEKNSSSQRSTQEKLYLEGSAPAGQVSAKVNVFRKSRRQRKTTHRYSVRDARKTQLSTSDSEANSDDKSIVMTKYRRSHVLQHFVKQCPKEDHLTAKLNHLSTKEQTPPDTMALENSREMIPREESNTDILSEPAALSTISHMNNSPFDLCHVLLSLLEKVCKFDITLNHNSALAASVVPTLTEFLAGFGDCCNLSDNLEGQMVSAGWTEEPVALIQRMLFRTVLHLMSVDISTAEVMPENLRKNLTELLRAALKIRTCLEKQPDPFAPRQKKTLQEGQEDFVFSKYRHRVLLLPELLEGVLQILICCLQSATSNPFFFSQAMDLVQEFIQHHGFHLFETAVLQMEWLVVRDGVPPEASGHLKALINNVMKIMSTVKKVKSEQLHHSMCTRKRHRRCEYSHFMHHHRDLSGLLVSAFKNQVSKSPFEETADGDVYYPERCCCIAVCSHQCLRLLQQASLSSTCVQILSGVQNIGICCCMDPKSVIVPLLHAFKLPALKSCQQHILNILHKLILDQLGGAEIPQKTKKAACNICTVDSDQLAKLEETLQGNSYNAEPSSGVSSPPYRFQGILPSSGSEDLLWKWDALEAYQNFVFEEDRLRSVQIANHICSLIQKGNVVVQWKLYNCVFNPVLQRGVELAHHCQQLSITSAQTHVCSHHNQCLPQEVLQIYLKTLPTLLKSRVIRDLFLSCNGVNQIIELNYLDGIRNHSLKAFETLIISLGEQQKDSSIPGIDGIDLEQKELSSLNVSTLYNQQAYSDSQSLSKFYARLKDAYPKKRKSVVQDVHINTINLFLCVAFLCVSKEAESDRELANDSEDTSGYDSTASEPLQHMLPCFSLESLVLPSPKHMHQAADIWSMCRWIYMLSPIFQKQFYRLGGFQVCHKLIFMVIQELFRNPEEEQGRREGDRNMDENQDLNRISQPEITVKEDLLSLTVKSDPTPAELSSLKKSADSLGKFESEHLSSVNVEQIPAREAVPEETEVFMSRKSETSLQGIRLLEALLAICLHGTRACQQKMELELPNQNLSVETILHEMRDHLSKSKVIETELAKPLFDALLRVALGNHSADFEHDDAMTEKSHQSEEELSSQPGDFSEEAEDSQCCSFKLLVEEEGYEADSESNPEDSESWDDGVDLKPEAESFIASSSPNDLLENLAQGEIIYPEICTLELNLLSTGKAKLDVLTHVFESFLKIIRQKEKNIFLLMQQGTVKNLLGGFLSILTQTDSDFQACQRVLVDLLVSLMSSRTYSEELTLLLRIFLEKSPCTEILLLGILKIVESDITMSPSQYLTFPLLYTPNLSNGVSSQKCPGILNSKAMGLLRRARVSRCKKEGESESFPQQLLSSWHIAPVHLPLLGQPHLSEGFSISLWFNVECILEAESTTEKGKKTRKRNKSLILLDSSFDGTENNRLEGAAYVNPGERLIEEGCIHMISLGSKALMIQVWADPHTGTFIFRVCMDSNDDTKVVLLAQVESQENIFLPSKWQHLVLTYLQQPQGKKNIHGKLSIWISGQRKPDVTLDFMLPRKTSLSSDSNKTFCMIGHCLSSQEECLQLAGKWGLGNLLLFNGAKIGSQEAFYLYACGPNHTSIMPCKYGKPVNDYSKYINKEILQCEQIRELFMTNKDVDIGLLIESLSVVYTTYCPAQYTIYEPVIRLKGQMKTQLSQRPFSSKEVHSILLEPHHLKNLQPTECKTLQGILHEIGGTGIFVFLFARVVELSSCEETQALALRVILSLIKYNQQRIHELENCNGLSMIHQVLIKQKCIVGFHILKTLLEGCCGEDIIHINENGEFKLDVESNAIIQDVKLLEELLLDWKIWNKAEHGVWEALLAALEVLIRADHQQQMFNIKQLLKARVVHHFLLTCQVLQEHKEGQLISMPREVCKSFVKITAEVLGSPPDLELLTIIFNFLLAVHPPTNTYVCHNPTNFYFSLHIDGKIFQEKVQSIMYLRHSSSGGKSVTSPGFMIISPSDFTASPPEGNRSSSAVPKQVAASMLRSRSLPAFPTSSPHIKPWKLTGSLGCSIDKLQSFVDDGVASQPEKWSPLRSSETLEKTKQDAFVSSCESAKMVCETEAALSAQASVSDAPKGVLELPAVNIDQKDFGAEPRSDDDSPGDESCPRRPLYLKGLASFQRSHSTIASLGLAFPSQNGSAAVGRWPSLVDRNSNDWENFALPVGYEPHHSRTTGAHSVTEDCLVPICCGLYELLSGVLLILPDVMLEDVMDGLIQADTLLVLANHPSPAVQQEVIKLLDAYFNRASKEQKDKFLKNRGFSLLANQLYLHRGTQELLECFIEMFFGRRIGLDEEFDLEAVSNMGLFQKWSVIPILGLIETSLYDNVLLHNALLLLLQILNSCSKVADMLLDNGLLYVLCNTVATLNGLEKIIPLNEYRLLACDIQQLFIAVTIHACSSSGSQYFRVIEDLIVLLGYLQNSKNRRTQNMAVALQFRVLQAAMEFIRTTANHDSENLTDSLQSPSAPHHTMFQKRKSVAGPRKFLLAQTDSLLMKMRSVASDELHVMMQRRMSQENPVQATETELAQRLQRLTVFAVNRIVYQEFNPDIIDILSTPESTTQSRTSASQTEISEENIHHEQPSVFNPFQKEMFMYLVEGFKVSSASGKTSSSKQQWAKILWSCKETFRMQLGRLLVHMLSPAHPSQERKQIFEIVREPNHQEILRDCLSPSLQHGAKLVLYLSELIHNHKDELTEEELDTAELLMNALKLCGHKCIPPSASTKSDLIRVIKEEQRKYETEEGVNKANWQKTVNNNQQSLFQRLDSKSKDISKIAADITQAVSLSQGIERKKVIQHIRGMYKVDLSASRHWQELIQQLTHDRAVWYDPIYYPTSWQLDPTEGPNRERRRLQRCYLTIPNKYLLRDRQKSEDVVKPPLSYLFEDKTHSSFSSTVKDKAASESIRVNRRCISVAPSRETAGELLLGKCGMYFVEDNASDTVESSSLQGELEPASFSWTYEEIKEVHKRWWQLRDNAVEIFLTNGRTLLLAFDNTKVRDDVYHSILTNNLPNLLEYGNITALTNLWYTGQITNFEYLTHLNKHAGRSFNDLMQYPVFPFILADYVSETLDLSDPSVYRNLSKPIAVQYKEKEDRYVDTYKYLEEEYRRGARDDDPVPPVQPYHYGSHYSNSGTVLHFLVRMPPFTKMFLAYQDQSFDIPDRTFHSTNTTWRLSSFESMTDVKELIPEFFYLPEFLVNREGFDFGVRQNGERVNHVNLPPWARNDPRLFILIHRQALESDYVSQNICQWIDLVFGYKQKGKASVQAINVFHPATYFGMDVSAVEDPVQRRALETMIKTYGQTPRQLFQSAHASRPGSKLNIEGELPAAVGLLVQFAFRETREQVKEITYPSPLSWIKGLKWGEYVGSPSAPVPVVCFSQPHGERFGCLQALPTRAICGLSQNFCLLMTYSKEQGVRSMNSTDIQWSAILSWGYADNILRLKSKQSEPPINFIQSSQQYQVTSCAWVPDSCQLFTGSKCGVITAYSNRFTSGTPSEIEMESQIHLYGHTEEITSLCVCKPYSIMISVSRDGTCIVWDLNRLCYVQSLAGHKSPVTAVSASETTGDIATVCDSAGGGSDLRLWTVNGDLVGHVHCREIICSVAFSNQPEGISINVIAGGLENGIVRLWSTWDLKPVREITFPKSNKPIVSLTFSCDGHHLYTANSDGTVIAWCRKDQQRLKHPMFYSFLSSYAAG

SEQ ID NO: 41 - protein, 576 aa, synthetic construct
MKEFEPRPQPDRLCGPCSQAPCQIHLGARTPGPRRRWWACRQVPRPVAMGDKSEQSALCTYKSLDEEGLFGSAELPKRPTGKLVMHSMAMFGREFCYAVEAAYVTPVLLSVGLPKSLYSMVWLLSPILGFLLQPVVGSASDHCRARLGRRRPYILTLCLLMLLGMAMYLNGDAIISALIADPRRKQIWAISVTMIGVVLFDFAADFIDGPIKAYLFDVCTHRDKERGLHYHALFTGLGGALGYLLGAIDWAHLELGRLLGTEFQVMFFFSSLVLTLCFIIHLCSIPEAPLTDVAKDIPSQQASQDLALSSDKMYEYGSIEKVKNGYVNQELVLQGGKTKNPAEQTQRTMTLRSLLRALRSMPPHYRCLCISHLIGWTAFLSNMLFFTDFMGQIVYHGDPYGAHNSTEFLIYQRGVEVGCWGLCINSMFSSLYSYFQKVLVPCVGLKGLYFMGYLLFGLGTGFIGLFPNVYSTLAVCTLFGVMSSTLYTVPFTLIAVYHREEQKQRALGGGPDGSGRGQGLDCAALTCMVQLAQILVGSGLGLLVNTAGSVVVVVITASAVALIGCCFVALFVRYVD

SEQ ID NO: 42 - protein, 173 aa, synthetic construct
MSQSNRELVVDFLSYKFFQKGYSWSQFSDMEENRTETLEGRESDMETPSAISGSPSWHLADSPAVNGATGQSRSLDAGKMIPLAVVKQALREASNEFELRYQQTFSDLMSQLHITPGTTYQSFEQNDDWDIFVELYENTTATESQKGQEHFNRWSLMDMTVAGMALLGLLFNA

SEQ ID NO: 43 - protein, 524 aa, synthetic construct
MSPLGWGLLLGCLGCALPSGARAQFPRVCMTVGSLRAKECCPPLGADPANVCGSQEGRGQCAEVQTDTRPWSGPYVLRNQDDRERWPRKFFDRTCRCTGNFAGYNCGDCRFGWTGPKCDQKKPLVVRRDVHSLTPQEREQFLGALDLAKYTPHPDYVITTQHWLGLLGPNGTQPQIANCSIYDFFVWLHYYSVRDTLLGPGRPYKAIDFSHQGPAFVTWHRYHLLWLERDLQRLTGNESFALPYWNFATGRNECDVCTDQLLGAARQDDPTLISQNSRFSSWEIVCDSLNDYNRRVTLCNGTYEGLLKRNQMGRNSEKLPTLKDIQNCLSLNKFDSPPFFQNSTLSFRNALEGFGKADGTLDSQVMSLHNLVHSFLNGTSALPHSAANDPVFVVLHSFTDAIFDEWMKRFNPPVDAWPQELAPIGHNRMYNMVPFFPPVTNEELFLTADQLGYSYAIDLPDSSALISVEETPDWTTVLSVVTGMLVVLVVLFALMLFLQYRRLRKGYTPLTETQLSNKRYTEEA

SEQ ID NO: 44 - protein, 1880 aa, synthetic construct
MAASELYTKFARVWIPDPEEVWKSAELLKDYKPGDKVLLLQLEDGKDLEYRLDPKTKELPHLRNPDILVGENDLTALSYLHEPAVLHNLRVRFIDSKLIYTYCGIVLVAINPYEQLPIYGEDIINAYSGQNMGDMDPHIFAVAEEAYKQMARDERNQSIIVSGESGAGKTVSAKYAMRYFATVSGSASEANVEEKVLASNPIMESIGNAKTTRNDNSSRFGKYIEIGFDKRYRIIGANMRTYLLEKSRVVFQAEEERNYHIFYQLCASANLPEFKVLRLGDANNFHYTNQGGSPVIEGVDDAKEMAHTRQACTLLGISESYQMGIFRILAGILHLGNVVFMSRDSDSCTIPPKHEPLSIFCDLMGVDFEEMSHWLCHRKLATATETYIKPISKLQATNARDALAKHIYAKLFNWIVDHVNQALHSAVKQHSFIGVLDIYGFETFEINSFEQFCINYANEKLQQQFNMHVFKLEQEEYMKEQIPWTLIDFYDNQPCINLIESKLGILDLLDEECKMPKGTDDTWAQKLYNTHLNKCALFEKPRLSNKAFIIQHFADKVEYQCEGFLEKNKDTVFEEQIKVLKSSKFKMLPELFQDDEKVISPTSATSSGRTPLTRTPSKPTKGRPGQTAKEHKKTVGHQFRNSLHLLMETLNATTPHYVRCIKPNDFKFPFTFDEKRAVQQLRACGVLETIRISAAGFPSRWTYQEFFSRYRVLMKQKDVLSDRKQTCKNVLEKLIVDKDKYQFGKTKIFFRAGQVAYLEKLRADKLRAACIRIQKTIRGWLLRKKYLRMRKAAITVQRYVRGHQARCYAKFLRRTKAATIIQKYWRMYVARRRYKIMRTATIVLQSYLRGYLARNRYHKILREHKAIIIQKWVRGWLARTYYSRSIHAIIYLQCCFRRMMAKRELKKLKIEARSVERYKKLHIGMENKIMQLQRKVDEQNKDYKCLMEKLTNLEGTYNSETEKLRSDLERLQLSEEEAKIATGRVLSLQEEIAKLRKDLEQTQSEKKSIEEHADRYKQETEQLVSNLKEENTLLKQEKEALNHRIVEQAKEMTETMEKKLVEETKQLELDLNDERLRYQNLLNEFSRLEERYDDLKEEMTLMVNVPKPGHKRTDSTHSSNESEYTFSSEIAETEDIPSRTEEPSEKKVPLDMSLFLKLQKRVTELEQEKQVMQDELDRKEEQVLRSKAKEEERPQIRGAELEYESLKRQELESENKKLKNELNELRKALSEKSAPEVTAPGAPAYRVLMEQLTSVSEELDVRKEEVLILRSQLVSQKEAIQPKDDKNTMTDSTILLEDVQKMKDKGEIAQAYIGLKETNRSSAMDCHELNEDGELLLVYEGLKQANRLLESQLQSQKRSHENEAEALRGEIQSLKEENNRQQQLLAQNLQLPPEARIEASLQHEITRLTNENLYFEELYADDPKKYQSYRISLYKRMIDLMEQLEKQDKTVRKLKKQLKVFAKKIGELEVGQMENISPGQIIDEPIRPVNIPRKEKDFQGMLEYKKEDEQKLVKNLILELKPRGVAVNLIPGLPAYILFMCVRHADYLNDDQKVRSLLTSTINSIKKVLKKRGDDFETVSFWLSNTCRFLHCLKQYSGEEGFMKHNTSRQNEHCLTNFDLAEYRQVLSDLAIQIYQQLVRVLENILQPMIVSGMLEHETIQGVSGVKPTGLRKRTSSIADEGTYTLDSILRQLNSFHSVMCQHGMDPELIKQVVKQMFYIVGAVTLNNLLLRKDMCSWSKGMQIRYNVSQLEEWLRDKNLMNSGAKETLEPLIQAAQLLQVKKKTDDDAEAICSMCNALTTAQIVKVLNLYTPVNEFEERVSVSFIRTIQMRLRDRKDSPQLLMDAKHIFPVTFPFNPSSLALETIQIPASLGLGFISRV

SEQ ID NO: 45 - DNA, 8492 bp, Hippotragus equinus
  source 1..8492: mol_type = genomic DNA
ggactccggcaggaggtgcggtcagatttcccgccctgagcacgtgaccatgccggctccgcccgtctattttgccccttccctgcgtgcgccatccccccttaccccgccttcggagactctcgcccaatggggacctgggtaggggccaggggcggccctggtgggcggggctgctgaggaagagagtcgccggagtcggacgttgaacactcccgtgggctcggacccggccggagggtcacctgccccgcgcaccggccgaacggcggagacagcgtacgtgcccggcgtgagtgcgtggcggcggcgcgtgtgcgaagcgagtgggtggtgtggccaggtccacgtgcgaccctgcccagcgacccccgcggctcagcgcccagagaatccatgacccgagatactcaggattctgcgccccgccccgagcggccgccgctccagttctcccgtcccttagtccccacagtcttggtcggtggccacgcattgccatggtgactgtgggcaacttctgtgaggccgagggacccgcgggtccggtctgggcgaagggtgggctcagcccctgcttcttcttcacgctcgtgccctcgactctgatggccctaggggctctggccttggtgccggcttttccatgcagacgtccggagcggcctggtggcgccgacagggtgtcttgggcggccggtcctcgcgtcgctccctacgtgctgcagctgcttctggccacagttcaggtagcgctgcccctagctggcctcgtgggccgggtgggcactgcccagggtgccccactaccaggctaccttttcctggcttctgtactggggactgtggccagcgcctgtggtctggcgatgctcgtgacagaacggagccaggcactgcagaagctagcaatgggcgtctggatcaagttcaggcacagcccgggtctcctgctcctctggactgtgtcttttgcagccgagaatttggccctggtgtcttggaacaacccacaatggtggtgggcaagggcgaacttgagccagcaggtgagggacctcgttgggggagggggaagcctggcgtgtctgctcacattgcttccacgcttttcaaatgcctttaagaaagggaagaaaggaggggccagtgctgctgggagctgatagccagctggtggggagtggcagtgctgagtcactgtagtcttttttaaagcctattagatgctgggcccctgaagaggacctgggtgtgtgtactaccccagtgcccagccgtgttacaaggagtgaaaatgggactttggccctcagtgatagtctccccgcctatgtttaattctaggttcagtttagcctgtgggtgctgcggtatgtggtctccggagggctttttgtcctggggctctgggcccctggacttcgaccacagtcttacaccttgcgggtcaatgaagaggatcaagatgtagagaggagccaggtacacctcaatttctaaaagttagggtctattgtaattccattccccgtcatcatttcttctcaccgtaataactcacttctttcctaaatctgaatccctgttagcctttctgagcccatcaggggtcacctgtgggtccaagttacctgggagctataatcccatatgttttccttagggggtttctggctaatgctgttttgatttctgagctcccctcccctacatgtttcaccatcctaggttccatcaacagaggggccaccgaggtctacctggcgagacctaggcaggaagctccgcctactgagtggctacctgtggcctcgggggagtccagctctgcagtttgttgtgctcatctgcctggggctcatggggttggagcggggactgaacgtgttggtacccatcttctatagggacataggtgagagggaggaggtcaggttagcactctggtccttcattggcctggatggtggtggagactagcccagggaagtgtgacagagttgagaactgggtggtcagtagaggctgtggctggtgcctagggcagtttctcccaaagagagtgctagggtctctgagtgggcttggactcattttctccatagtgaacttgctgacccagaaggcaccttggaactccctggtctggacggtcatcatctatgtcttcctcaagtttctccaggggggtggcactggcagtacaggtatgagggactctgctctcaccctggttggtattggccactgtccttcctcccacaagcgtccctcccccaacccccttggtgctctcagacctttcacatcttgctgctgagctgacgtcattgggctgctcagccctaccgaggccttccttccctggctccccgcaggcttcgtgaccaacttgcgcacgttcctatggatccgggtgcagcagttcacctcgaggcaggtggaactgcgcctcttctcccatctgcacgagctttcactgcgctggcacctggggcgccgcacaggagaggtgctgcggatcgtggaccggggcacgtccagtgtcacggggctgctcaggtgccatgccaatggaaaggaattgtgggagggcagggctggggaagcaggtgaaggggctggtcaggacaacccacccagctggaggagttgtctctctgtcctcttttttttcttaaattataaaattaatatacacatgccctcataataattccaataaagcagacagaacaaatctctcttgaattccactcactagaggttcccactctatagtatgtagagttctgcttttttgcatttttttacatatggacatgtataactagtaggtattgtggaggtgtttcttaaaacagatggtatcatgatgtaggcatcatttctcagaatggctttatatcaaaatgttagggagatgtattcttatctgggcttccctggtggctcagtggtaaagaatctgccttccaagcaggagacacaggttcagtctctgggctgggaagatcccctggagaaggaaatggcaacccactccagtattcttgcctggagaattccatgagaagagttgactcattggaaaagactctgatgctgggagggattgagggcaggaggagaaggggacgaccgaggatgagatggctggatggcatcacggactcaatggacatgagtctgagtgaactccgggagatggtgatgaacagggaggcctggcgtgctgcaattcatggggtcgcaaagagacacgactgagcgtctgaactgaactgaggagcctggcatgctacagtccacagagttgcaaagagtcagacacaacttagtgattaaacaacaacattctcattcatacatgaagatcttttccatgcattgtaattgatccaaagcattctatagtttgggcatgctatggtttatttagccatatataaggggcattgattcttaaggggcatttagcttgattctagtctgttgctatggaaaacaaaacactctgtcaaaatcctcctaggtagagtcactggctctgagcccttaaactattcttcatcgcttgattttgcctcctagctacctagtattcaacatcatccccacactggccgacatcatcattggcatcgtctacttcagcatgttcttcaatgcttggtttggcctcattgtgttcctgtgcatgggtttttaccttggtgagtgctgagagatggcttggtgaaaccatctccctgaaccattcatggtgtgccttgagcgtgagtcctgccccgactcagatggcccagctttgagaggctgtaggtcagtgggctccattaggcccctgatgctcactgctgtgatggatgagcatcctctgtcaaggaaaccccagctctccctagggaaggacatcctggtcactttagattcccgctgtgaacctcaggtcaaggaggaacttcatgtgataggatgcggcttgcctccattggttcaccaaaactgttttcacacaggctttatgcagactgtgatgatgtcttggacacagccccttccctcagggagcttaagactccctcccttgggaatctgggtccctgggttatagcacagggttagtgtacacatgaccagcagcagacatacacatcgtctctgctgctgggagtgacttgctctcttctcctccctctcccttctgtcattctctagccctgaccattgtggtcactgagtggagaacaaagtttcgacgggctatgaacatgcaggagaatgctacccgggcccgggctgtggactctttgctaaactttgagacggtaacggagacctcggtggcagctttgtgaggtttggagatgtagaggagtgtgcctgggggtcgttgggactgaaaaggagcagggaggatgcaaagtgtgctgcttacaatcagggaggagggctggagaatggagctgaaagctgtggctgtgtgaaacagcactggtttgaaattcatcaggtgaagtattacaacgcagagagttatgaagtggaacgctatcgtgaggccatcatcaaatatcaggtgaggatgctggtttgaggcctactgagagcaacagccaggacttgtggaatcaccaggcctgagaggagtaaaatttgggctgtgaggttgatgtgcctgggctcaggttgggatttggtgactgtcaacatgtgtatgacagtccttcctgtttgtcattgcccaagactttagagtggaagtcaaatgcttcactggttctactaaatcagacccagaatgtggtgattggccttgggctcctcgccggctccctgctttgtgcctactttgtcactgagcagaagctacaggtgagggaattgtcctgggcctggggactttgtctaggccatcaggttcacgggtgggaaggaggtagggggtagctagtgggcagggtgacagcccaacagcctcctgtgacccaatcctcatccctggatgtccacaggtcggggactttgtgctgtttggcacctacatcatccagctgtacatgcctctcaactggtttggcacctactacaggtaacctgatgccagccctcacctgtccaggatgcagtgttatctccccagctcccaggaggagctccaaccagccctcttcttgcaggatgattcagaccaacttcatcgacatggagaacatgtttgacctgctgaaagagaagacagaagtgagtgaggagacaggagtgggtttgtagggagtgggagctggcatggtgttcctcgtgtctgtgagataccaggcctgtaatggcatacaacggtggcactctcccaggtgaaggaccttcccggcgcagggccccttcgttttcagaggggtcagattgagtttgaaaacgtgcacttcagttacactgatgggtgagcccctccccttccactgtcccgcagtccccttccccatgtccatttacacactgctcctccccttgccctgcccccccacttctcagctcgccaccatctgggaagacagtctgagcgagaggtggcagggcccagtagtagctgtagtggtggaggggaccctggcagtatagccagcctgccgaccattctcacccttccttgcaggcgagagaccctgcaggatgtgtccttcaccgtgatgcctggacagacactggccctggtgagaggggacccagccagctgacccagactccttgagcttcccttattccagtgcccatggtagctggggacccaggctgtggaggtcagagagccctgtcttattgggtcacaggactgaatgtggcagcctccatggacattggtggcctcttggagagaaagcctttagccaatgggcctgagaatgtttttccatccttttaaaaaaaattttttttttttggttgtggtgggtcttaattgctgtgtgaaggctttcgctagctgcagtgagaaggagcacaggcttctcattgtggtggcttctcctgttacagagcacaggcttcaggcacatgggcttcaggagttgcagcatgcaggctcagtagttatggctctcgggctctagagtataagctcagtagttgtggtgcgtgggctgaggtgctccgagacatgtgggatcttcccagaccagggagcaaacccatgtgcccaggtgggcagattcttagccactgcaccaccagggaagtcctttctccctctctttttcatgcaataggtgggcccatcaggagcagggaagagcacagttttgcgtctgctatttcgcttctatgacgtaagctccggctgcatccgaatagatgggcaggatgtttcacaggtaaggatgctcgggggaagactataatttaggggcccatatgtgaaagaacggtgggtgctgggcatccagggagtagagaaagagctgtcacccctgcaaaaagctgggtcaggagacctcagcctttctagcggcacatggtctggataaggaaaatagtcacgggagtgattcctaggatgctgtatgaggcacaaagatctgcagccatccagggcagcagggagagaaagtgaattttctaccaatggggaaacagagagattaagtgatttgcccacacagctggggtctgagaaggtgaaggcaggactgacacgcagtctcatcccacgtgcttcccaccagcccatcctgccttccaggcctggagggatctcacaggccagagtatatggtcttttggccccaggtgacccagacctctctccggtctcacattggagtcgtgccccaggacactgtcctcttcaacgacaccattgccaacaatatccgctacggccgcatcacagctgggaacgacgaggtgaaggctgcagctcaggctgcgggcatccacgacaccatcatggctttccctgaaggtgagcctccccttcagggtctcccctggcccagttcaggcctattattgcctctgacctccattctaccccatccttgcccatctggtcacagaaaccaagtgtagtacgtgtgacttgagagaggtgggcaatttccacagggtatgatacccaggtgggcgagcggggactgaagctgagtggtggggagaaacagcgtgtcgccatcgctcgcaccattctcaaggctccagacattgttctgctggacgaggtgagggccctgagacgccttgccccactccttcctccctgagcctgtgcccagccattcctgctgagcactgttcttcatgtaggagagccagcacgaatgcatgtttcacaaaaacacttcacagttttcaagcgcaaaacaaggtcctttttgattcccgaggcctcagccagccacttgcatccttctcccaccagggatctggtgggagggacagttttacctaagtccctctctgtaggcaacgtctgcgttggatacccataatgagagggccatccaggcttctctggccaaagtctgcgccaaccgcaccaccatcgtggtggcacacaggtatgggatgggcagcaggtggaggggccccctcgggtgttgtggtaggtgactgacctctgacctctcaggctctccacggtggtcagtgctgaccagatcctcgtcatcaaggacggccgcattgtggagcgaggacggtaagggacacagcatgataaacagggatgggcctctgaagtgggggccccaaggaaaggttgtggaatcccaggggtttctggaaggatctccctcaccagttccttgtcatctcagactggtggcaaggactcttggggtacaaatcacaattggttgggacttacatttttctccttgccccaggcacgaagctctgttgtcccgaggtggggtgtatgctgacatgtggcagctacagcagcagggacaagaagtctctgaagacaccaattcccagactaaggcatgatgacaaaagttgtggccacttccttcctgagggataactctgaggggaatacactgtatccctcttccctgccatgtttcaccctggtcttggtgctagctacagtgatggaacggggactttcagaagagcattgtgggggaaataaaagcgtggactgttaggatcactatcactttgtggtgtggggaactacagcaggcctccactgcaggtcagatgagcattcttgatgggactcttctgtttttgattggaaaagagaaagaaacacaccactttgttgtcttatagactgcccatcctttattgtttctagcccgcctccctgccccctatacatggaggggagccccagtatatgggggatgacaagatgcaggggggccgagtgggacctggccagggagcagttcagagcagctcactcccatgcagctggagcagccagcagagccctctgtaggctcagctccacatgctgtttctccagatactcc

SEQ ID NO: 46 - DNA, 49437 bp, Hippotragus equinus
  source 1..49437: mol_type = genomic DNA
ttttgtgaatatgagcttaaaattaaaaaaggaaggaaagataagtgattattaatggacttgtctgtaaaacatctaagtccccaacattagccccaagattcctaatacaagagttcattggtcactgtaaaatcctaatatcttcagtgtatctttaacagattttaaggaacatattaaccaaatgtacaagttttgatttggccataaaaatgcaagaagagctgtgattctctaggattaatgaataacatttgtttatttgatttgctctaagaaatcattctaaaatctgtttacatatctggcctctccaggatgagttttatgttggttcagcagattgtttacagttttctcttcttctcccttttttttttcatcttccctgctcagtgcccaacccaaggtcaaaggctgatagagagtaaatctcatgagaaggttttactctagggaagttgttcagtggatgggatcttggcgtacagagaaagatgacaggctctttctggctccttctcagccttgttgctgtaactgctgctcaatccaccactgaaggacaggccaagacatttttggagaagtttaaccatgaagccgaagacctgtcttatcaaagttcacttgcttcttggaattataacaccaatattaccgatgagaatgtccaaaagatggtgagtcctcatggctacagaggggtattggttgcttcttaaaaatcagcttactgcccaggaaactgaaaagggaaatcaaacaaatgctctgagctgtgagattggatgtttgcctcagtatttctgattctggagtcccagatgactgaaaaattgacctttgagtttctttgaaaaaatgttacaaaataattcactggtctcagtccagattcttggtgaacatgctttagaaatttaccaccataattcttatcatagtcaggctttcaaagcatgtcacagaaatgccataagttattcagttaataatttcctcaagcctacaatgtcaacaggaatatctaaagactctctacaaatcatctattaactgcaaaaatatgcagctggaggcttagtgaaagagctcgctagtaattaagattaccaggggtcgggtgaggctggacttgggaattccttccttaattgtcatggagttctgagggacttccagagcatacaagatccacagagccctccaagaaaacccgtaatcaaaccaattctgacaaatctcagaatgctctgggaaagcaagatgtactatttgacaagtgcaaggatttaggaagttccttccctcacatatctgaaagcagtgctggaaatggagtgacattatttaaggaaagtttttgtgacatttgtccagcaatgcgttctttcaaaaatgtagttcaaatctggttttttcaaatagtgggttacgggtttaagttaaatcactgccactcactggacagattctatattctggatagattcagtctgagatctgctgcttcatgtgaattccccaggagatttcccccccaccccctgccacagtttttctaaagctttaagagatccaggagattttgacagcccagtgttgtcataggagaccatttttttttcttgtctcatattttggtcttacctttcttcatctcttcatgtttgcttttttctagctttgtatttgatcttgatgtgcactgtgcatttgttttcattctcagtcaaatggtccataggtggtattgaaggtagaccagcattgtgcctaagagctctggagtcaaactgccgaggtccaaatcctggctccaccgctgtctacctgggtgaacttaaactacttaatgaacctttctgcgctttagtttttctgcctgtgaaaagccacctagtactcatatttgcttcatagggttgctgtgacaacagttaacacacaaaaccaccagaattgtgctcaatgcttgtgggcctgggagaacgatacagtaccactgctgtgaatgtgagaaggaattctaattgctgaaaaaatgtgtaacagttctgttcagtgtccagatactgagaaggcattttacagaaggagatgtagcgatgtttgttgaaatcatctctggatcattaagtgctatcacttttgaattgcactggttgattagaggaaaggcagaaatgaaagggcataagtccaagaagggtagtcaaagtgcagacagtatgggccctttaaagaaaagtgaaaatatgcaaatacaagaagcaagcagggggcccagtatctccttcctccagcagtgatgaagggcgagttagcgcattagtgcatctgtgtggatttacctggggaggaggcaatagacagggaggacaacggctcatctgttttcttatcacatttattgagatctcctaatgaaacgggaactgcagctggtgctacaagaggtaccaagacaaataggaagctgagataatggtccactgctgatggccatgcttacagaaagaattggagaaatggagaatgttttccaagaaaagagccactggagtgatttacggggatgagagagagttagaagggaaaacagaattagctctacaaagcctaactcaaaaagaaaaccaacatgagtctgagatggaagaagaaaggatagaatgttcccagttgtattggccaactctcttcagattagaaaggtggtgcctttgaaagctcaaaagagataaatttacaataaataggaggaggtgctgtttctattacaggtagtgaaagtggtaagacttgtaaatctagaccattcttgaatctgaaaaagtgagacattgaaaactataaataggttttggaaatatttaagcaatgtaaggattgtagatccactgtgggtgagacatgcatttataaacccagttctttaccttcctcagtatcaatgcccaaggctatgtcactttacagtgtcatctcactgaaggtgacgtgactgtgtcctttgccatgtgtcttactttgaccaatgggctgttagcagaagtagaggcgtggaaggacttgaacaatgggacttttcctttgcacctttgcctttgccatgaggacatgcctggattgaccaggtaaagagtgagagatgtgtggaatagttgtcctggcagaaactaatcccccagagttttaagaggatccagccaagattagcagagttgcctggcaacactcagtggttctaggcacacaaacaatgaacacttacgcagttgagattttgggttgtctgttatgtagtactattgtagcaatagataaccaatataggaagagaaatttgggctgtatgacatgtgtatgttcatatcccattatggtcacattattgtgggcaatctgtcatttcataattatcccttggtataacgttcagagtcagagtgttgggcttatcagccaatcgacctagtgtggcaattcttagatcaagtcatgagaatagtttaaaataatagagggcactagaatttgatcagtatagtgtccccaaagctccctgtttaggagaggtccatcagatagatataaggaaaaaaactttgttcaaaacaggtttccacatagttcagaaattcaatgaaaattaattaccagacacttgctttagagcaaatacagttctcatgtttgagatcaagcattcaccaattaaactgtaattctcttctcagtaaaatgacattacttttttgcatttattgttggtttgatttttgaaagagtcctttgtaagtcaaaggatttttgtttctcttttttgcaaagtcagaagctctttggcaacatgggaggtccctggacaattttttcccctgtaagagagtgaaaggatcctgccactggcaggggcatcctggttctttgttccagtatttggcagtagctactacagctgcccccaattcctgtgggcacaactgtgaagggagcattgaagactgccctgttggagccccagaggtctcacaacacttcatgaatatttcttgttgagttatcagaagctgtgaagagacagcataaggcccacacttaccctttgggtggtcagggcccctagagcccttgggcacacctgcttcctggaccttttcctctgtctttagggtgggggcacagtgaacccagagcagggtcattttaaactgctattctgtacccaaggagagaacgcagacttcaaccctgtctgcaatgagtctgtcccacactccccaagatatgtaggcacctatgcataggtacaggggtggggcaaggtcagtgtgatgcagatacgatggaattcaggaaatctgatactatcctgattctgctaagctggctgtgatgcgttgggcaagtcacttactttttatctcataaatgtaagatagtagatgggcccagtcaagatttttcagtggataacagtggtgagtggataagtcccacatgtggagggttcacaggagtcaagtgcattggaggtattgttcatactagttttcctttgtcatgaaaacttgataatgtcccagttgagtgatgtaatttggtaaaattgaacttgagcaattcaaaatgacatgtttcgtgccgtccagatttgacactcattgatctgagcactctgacgggacgccaggcggccgccagctacacccagggagggcagcctagtggtcagggactactgctgcttctcagtgtgtgccaggtaactgggcaaaagagaaaacacttaattttggctaaatcgtttggtttggagcagttccatgagggtttcagatctagttctaggacctagggaataaagtgggttttctttttctttacttttactattaagggcttttataacaacagctttattgagatataactgtgtgctaagtcgcttcagtcatgtccaactctttgtgactccatggactgtagcccgccaggctcctctgtccgtaggatttcccaggcaagaatactggagtgggttgccattcccttctctaggggatcttcctgacccagggatcgaacccaggtctcttaatctcctgcactggcattggcaagcaggttctttaccactagcaccacctgggttatgtaccataaaattcaccaatttaaagtatacagttcaatgcttcttagtatatttacagaattatgcaaatatcatcactatctcatcttagcacattttcatcactccaaaaggaaagcacatgcttattagcaatcactcttcttcccctaaccccccagctctcagcaaccactaatctactttctgtctatagattcgcctattctggacttttcatataaatggaattatacactaggtggtcttttgtgcatgccgtagcatgtatcattattttgtcccattttactgccaaatagtattccattatatggattttactttactttttattgtaaaaattttcaagcacatatacaagaagaaagactaatatgttgaatctccttatacccatcacccagcttcagcaattatcaacacttcggccaatcttgttttatttttctacccaacgccatgtttattggattattttgaaggaataactatatgttttatgtaataaatgtttcaccttgagctcccaatgtaagaatttttaaataaccttaatagcagtttcatgtcaaagacttaacaataattcctcaatataatcaactatctaggcaatatacaaatgtaccctaatatctcattttaaaaattcagctggtttgctttaatcaggatctagcaaagtcctctcttgatcattttggcagatgtactttaagtctctttcagtctatagagcccgtcctcttttttttttttttttttgtaatttatttgcagaaaaattgagttgttgctcctagagaaactcccacatactggattggctgattgtgttcccataatgttgcttaacatgctcttttgacccttgtatttgctacaaatgtatagatctggtacagaggtcagcacacttttttctgtaaaaggccaagtagtaaatatttcaggctttctgagccctacagtccctattcaatcctgctattctagaccagtcaactctgccactgtaacacaaaagcaggtatagacaatacataaataggtgtgaatatgaaaactttatttataaaaacagatggtaggcagagtcctgctctaaagacttgatcaaaatcaggtttcccctgtgaggttttttaataggtgtggaaattgaatttacactactagcagggttcaggaatattgagccaaaaaattaattcagattcctagagctctggaaaaaaagaaggaaataaaaaaatctgtagggaccctttttagatccaaagctcaaggcatttctactttatgcaatagatacaaataaatttaagatagaccaaaaattaaataggaaaagcaagtcaagcttttataagaaaatataggtaacttttggttaggaatggtttattaagtgagtctcggttggaaatggtttactaaatgagtcttagttgagaatggtttattaaataaaagacaaaaagatcaatctataaaggaaaaggctgagcaaataaatttcatcagaattaaaaacaaacttttgtgcaccaaaagacatcataaacacatacacacacaagacaagaagcagagcttgagaaaacattttgatacatataattaacaaaagattgacagccgagatatataaagaaattttactaaatgataaagacaaaaattcactagaaaaatgggggaaagatatgagcaacaaatgcatagaagaagaaattcaaataaataaataaataaataaatatatatatatatatatatatatatacacctcatatatatgtttaacctgactaataatcaggataacattattttaatagtgaaataccaaattgacgtaaaatcatatttgccaaaatatgatatctgtagaagttgaaacttgctttaacccatcagttgcactcccaagaattccacctggagagcctcacctgtgtactcaagaaactttatatatttgcagatttaaattaaatattagcaattttatatgatttaacctaatacaaggatgtatatggtaaaaagtattacttgaagacaggaaacgttcatagatcagaaattattaaataaatttgaacttggtcatatacttaaatattatacagcagttaagatcaataaggaatgtatacttgaaaaactggaaaaaataagtaatgctaagtgaaaaaagcagagagattttctttttttctcaactttattgagatataattgacatataacattgtgtaagtttaaggtatacaaactgttgagttgatacactgatatattacaaaatatatggtagcagtagtagcagtagtcttaactaatacctgcattacatcacatgattaccatttgagaacatttaagatgtattctcttagcaacttttgagtatataatatgatattattgactctaaccactaaataaatatgtctgaagcaactattataaagtattaacattttaaaaacctgagtagaggtttttgtgacatttgctatgttatttatactatattatatctttattatgaaatacatcaaatatatatctggtgggccactttctggcagggcctaatttcagaagtgagttttttttcccctataaactaaaattttttaaaaatcccacagacagagtagcctagtgggctacagtccatgtggtcacaaagagttgaacacaactaagcaactaacagacacacaaagtgtaatttaggattttatattttcaggccttgaaatgacaaagcatctctcaataggatgagaatatggtatccactacagttatacatagcgggtcagagagggttttaacttcctgtgattatactgagtaatgtgtgtcttgaccccaagcccccatcaatggctgcagaaacatttgctgtgttaattgctgctcttctgcctttgcacagaggcagtatgggatgctgtttatttgacctgtaatggttctttttgaaccctgtagctgtgtaagtaactgtatatgcttcaattcattcatcattcaaatcccaaaattacatatagctgtcaagcattatctaagtgacttggttggtatgtatgaactgactttgattctctgtgtaactgcttagctgtcagttttatttaggcatgggtaccttatagtatgaatatggaataaattgtaaaaaagattaaaaagaacagcttgagatggaacagtgtatcctcaggggccaaatttcaagacaacataatgtttttgtgatacaaagtataacacttctagtatgataatgataaataaaacatatcctcaaagttcccacatacattataattttaaaaaatgttttaagactgaggccttttggggattctgggttgtctccaagggagattgaaataaaaaaaatgctcttaatttgggatcaaattttaccagaaattttgctgtaaataatcctagattggatgaaaaagggtaggggctgagaggtgggtggtgggttatgtaaatgaatctgtgctatagaccaaactcctctttccatagctcattccttctcattcagacatggtacaaagaagactagaatgtgttaaatccaatctacagccagtggttaagagcatttagctttagaggcaaacatatctgtgttgattccctgattcttccagttaatagctgtgtgacctagtcaaaattacttacctgctctgtgcttcatttgcttcatttgtgaattggagacaatcacaactacctcacaagattgtgcagattcattgaacagtagttcctaaggggttgtgtgtgctcaataaagagaaatcattttccatttcactgtgactattctattcatctcttgtatgatccatggctgcaccgttcatgaaccactttcattatgtcacacacctgcttgcaacccgtaagtgactccctagtattcacaggataaaagtaaaatttcttaatctagaaaatgcagtcatgcctggagtcctgctttggaatctctactatttatctattgtgtaaaagattaccacaaaagattatctattgagtaaaagattaccagatcaaaacaacacacatttattatctcctgggatagtttagctggatctgcttctgagtcttacaagattacaatcaaggtcctggctagagctgtggtctcatctgcaacttaaccggagatgaatccactttcaagctaatgtggctagtggtagcattcagatcctcctatgctccttaggatgtcagtcagaggccatcttgaattcctcaccatgtggccctagccacgggatagctcacaacatagcatcttgctgcatcagtattagcaagggagattcttcaaacaagataaaaatgatagccttggaagttccctggctgtccagtggttagtgctctgtgcttccactgcaggagggaacgagtttgatctctggttagggaactaagatcccacaaacaaacaaaacaatcttatctaacataaacatgtataatccttcacttctgctgtattctccttgttggaagtgagtcagaggtcctgctcacactcaagggaagggagacacaggagggtgtgccaccaggaagtaggggtcctgggaaccatcttagagtctacgcgcctcaggatccaggattcagacgctggcaattagttgccggctctactgttcatttttcgtagctccttcttcacatacaaaaaatggaaatagaataattttctgtctcttggggttgttaagaaaatcaaatgaggtaaattattttgcaaagtactctacagcggtctgttttctgcctactttaagatctgtcttaagttccgccgcctccaggaaagtgaaagtcaagtcgctcagtcgtgtccgactgtttgcgacccgtggactgtagcccaccaagcctctccatccatgggattctctaggcaagaatactggagtgggttgccatttccttgccaaatctggtccctataacaggaactgtttggccccactcataaagtttatatggaatcataggcttttatgtttcactaatgaaacattcatgatgtgtatcttatctgcttgataaaacaataagcagcttaaggacaaggactttttttctataagtgataaagtagctaccattgtttagtgcttaggatgtatcagggactcagaggcattttattatttgttaaattttcttgtcctttcaacaaccctttgaggtgagttctactattactctcattttatggataaggtaacatgactcaggctaagtaatttgctcaaggtcacacagctagttagaggtgtctgactcgaggaatggagttcttacgtgcctcatatgctacctctttttatagtctagagaagtacagtgtagtaaggggttgctcgttttagcctttgataaatggaactgagcttgtccactgagagaagactgcattggatgcatatggagaagtcaagatgggggcaagtgaaccctgctatcactacctgcttcttggtttctctggtgagtggataatcaccatggctaccaaatggccatgttcagggcagtcttgaactggggatcaaaattcaagatcagaatctctggtaaatcacagtactatggagtttcctacaaacttgttatttctcatggttctcatcaccatgagaagctgtattcttaggaattgcgctctgagctctgctgggctttccctttagagtgtttatcgttgaatccttgagcgactcacccacgtcacagtgctaaggccgtacattccaggaccccacaacataaatcatctgtgagaattcacttccagttctggggacaggacccttgggaaaacgaagcaaaaggccaggaagagagagtgaccaagagtggcttggtcacgcttaacctaaaccttgaccttcagcaaagtagagaattaaataactcaggaaatattagatgttccaccagatgttctttggcctgtatctcctatttgaacagtcccattctaacttcaacttcattttttgttgttgtcatttcagaatgaagccagggccaaatggtctgccttttatgaagaacagtcccggatggccagaacttactcactcgaagaaattcagaatctcacactcaagcgtcaattgaaggcccttcagcatagtgggacctcagtgctctcggcagagaagagcaaacgagtatgtgacatgctagcactgatcccaagaatggaaatactggggaaatcttaaacattagtatcactcagggctgcttactttatctgcaaacctagcaatgctcagaatagaaagagtgctgtgcctcggtggggtgatcacgtaatttatgctccaaatcgggatcctttgagagtgaagggggatgctggtatgttaggacacctcattaaactaggatagtcagggctctgcggtccatagatgcagtgacagaggtcaccttcctgaggaccaggcacttagtccatgtctgtgcttctcaactgcgagtgattttgcccaccagggccatttgacaatgtctggagatatttttgattgtcacaactgttgaagggtgttattggcctctagtgaggagggatgttgctaaacactttgcaaagcacaaggaagtccccagtgacacttgtctggtctaaaatatcagcagtcctaagctcgagaagcccgacatgtcatctcatcctccccaacccctttcattcttgactgtcttctgcaacttctttaaaatgtcgctaaaccaccccagctcagaccactttagggataggaaagtcgcttctttctaaaacatcatttccatatgtgggtccctctaagtaatggcaagattcttcctccattgagtgtaaagagatttacctccactttctactgccttctggagccaaatggctgtctcctgtaatcagttcagttcagtcgctcagtcgtgtttgactctttgtggccccatgaatcgcagcacgccaggcctccctgtccatcaccatctcccggagttcactcagactcacgtccatcgagtccgtgatgccatccagccatctcatcctcggtcgtccccttctcctcctgcccccaatccctcccagcatcagagtcttttccaatgagtcaactcttcgcatgaggtggccaaagtactggagtttcagctttagcatcattccttccaaagaaatcccagggttgatctccttcagaatggactggttggatctccttgcagtccaagggactctcaagagtcttctccaacaccacagttcaaaagcatcaattctttggcactcagccttcttcacagtccaactctcacatccatacatgaccactggaaaaaccatagtcttgactagatggaccttagttggcaaagtaatgtctctgcttttgaatatactatctagattggtcataacttttatttcaaggagtaagagtctttcaatttcatggctgcagtcaccatctgcagtgattttggagcccaaaacaataaagtctgacactgtttccactgtttccccatctatttgccatgaagtgatgggaccagatgccatgatcttcattttctgaatgttgacctttaagacaactttttcactctccactttcactttcatcaagaggctttttagttcctcttcactttctgccataagggtggtgtcatctgtatatctgaggttcttgatatttctcccggcaatcttcattccagcttgtgtttcttccaactcagcgtttctcatgatgtactctgcatataagttaaataaacagggtgacagtacacagctttgacgtactccttttcctatttggaaccaggctgttgttccatgtccagttctaactgttgcttcctgacctgcatacagatttctcaagaggcaggtcaggtggtctggtattcccatctctttcagaattttccacagttgattgtgatccacacaatcaaaggctttggcatagtcaagaaagcagaaatagatgtttttctggaactctcttgctttttccatgatccagcggatgttggcaatttgatctctggtttctttgccttttctaaaaccagcttgaacatcagggagttcgcggttcacgtattgctgaagcctggcttggagaattttgagcattactttactagcatgtgagatgagtgcaattgtgcggtagtttgagcattcttttgcattgcctttctttggaattggaatgaaaactgacctttttcagtcctgtggccactgctgagtttcccaaatttgctggcatattgaggtcagcactttcacagcatcatctttcaggatttgaaacagctcaactggaatgccatcacctccactagctttgttcgtagtgatgctttctaaggcccacttgacttcacattccaagatatctggctctagattagtgatcacaccatcgtgattatcttggtctcctataatagtcttcaaataaaggaaggcagatttttttaaaactatttgaggcttttttctctaacctaaaacatccttccatccgttgatttttttcttatatgatggtttcaagttccctaaccagtcctggttgctggcttcattttgtcagtatccttggactgaatgcagccctccaagtgggttcatctctgcatgaaagtgagcagcgatatgacatcctgctcttccaagacatagctctaatgtgccccctctttgaaaccattcctgaatttccaagttactaattcaccactccccccatcctgccacacctttttggtgacagttgtagcgtctgtcactctgttatgtaatcattgatttcatgactcgctgtggcatgtctgtggggctcttaaagaccagtgactggttcatgtcataattatcagagtgtaggacatagtagatgctcagtgaagcctgaatggaacaagaaatgcactactcggcgcatgtgtaggtgagaaacattcttgggatttgggtagatctgttttttttttccagtcactccacatgtatttatcatatgcttataaaggcagtccatgctagttgatgatgggaaaatttagctgagatattccaaccctacataaaagaagatacttggccaagaagctgtgaacttctgtattttgaggcataaaaaattgcatgattgaaaagacatctctacattagcattctcttttgtatatcttccatttttaacattgtttattatctttaatttgtagttgaacacgattctaaataaaatgagcaccatctacagtactgggaaagtcttggacccaaatacacaggagtgcttagcacttgaaccaggtgggctattcattttgagcagtgattataaaatttacttttttttattccaagctttaaaaatgagattaacatcagatgatgatgttgtgccttttagatagacaatccaaagagggaaaaattccaaatgtgtgtgttttatcacacggatgctcttttaagttttaacaaaacttcactataaatcctgtcacactcaagtagtttaattaagttagtagttcaatgatctcagtggtttattttctctgcagaattattttgaagctcttataagggtgaggacacaaaatggattaaagatctaaacgtaagaccagaaactataaaactcctagaggagaacataggcaaaacactctctgacataaatcacagcaggatcctctatgacccacctcccagagtaatggaaataaaagcaaaaataaacaaatgggacctaattaaacttaaaagcttctgcacaacaaaggaaactataagcaaagtgaaaagacagacttcagaatgggagaaaacaatagtaaatgaagcaactgacaaaggattaatctcaaaaatatacaagcaactcccacagctcaattccagaaaaataaatgacccaatcaaaaaatgggccagagaactaagcagacatttctccaaagaagacatacagatggctaacaaatacatgaaaagatgctcagcatcacacattatcagagaaatgcaaatcaaaaccacaatgaggtaccatttcacaccagtcagaagggctgcgatccaaaagtctacaagcagtaaatgctggagagggtgtggagaaaagggaaccctcttacactgttggtgggaatgcaaactagtacagccactatggagaacagtgtggagattccttaaaaaagtggaaatagagctgccatacaacccagcaatcccactgctgggcatacacaccgaggaaaccagaagtaaaatagacgcatgtaccccaatgttcatcacagcattgtttacaatagccaggacatggaagcaacccagatgtccatcagcagacgaatggataagaaagctgtggtacatatacacaatggagtattactcagccattaaaaagaatacatttgaatcagttctaatgaggtggatgaaactggaactgattatacagagtgaaataagccagaaaggaaaacaccaatacagtatactaaggcatatatatggaatttagaaagatagtaacaatgaccctatatgcaagacagcaaaagagacacagatgtatagaatagtcttttggactctgtgggagaggtcgagggtgggatgatttgggagaatggcattgaaacatgtatattatcacatgtgaaatgaatcaccagtccaggtttgatgcaggatacaggatgctcggggctggtgcactgggatgaccctgagggatgggatggggagggaggtgggaggggggttcgggatggggaacacatgtacacccatggcagattcatgtcaatgtatggcaaaaccactacaatactgtaaagtaattagcctccaattaaataagtttattaaaaaaataagggtgaggacatgaatgaatcatgagatttcattgaacaactttatgaccttgatatttgccagcctttcaattctttagagatgaaaatttctaaaactgcatgtttttttcctttgggtgctttgtgataataggtttggatgacataatggaaaacagcagagactacaatcggaggctctgggcttgggaaggctggagggctgaggttggcaagcaactaaggccattgtatgaagagtatgtggtcctggaaaatgagatggcgagagccaacagtaagtttgctgggctgtggcagttctgaagctccctatagggctgtggggctattgctcatgaattaccaagcctgccctttgatataaggggtatccctaaattaatcacctgctgaacaattcaggttacatgtctccaagaggagaccactagggaataaagaaaggtgaattgacattctacactttaaagggcttgagagcgagaataagttaccaggcctcaaacaaatcagtagtctgggaagggctcaggctcctgagggttcctaaggtagtctgtggatggacagattctatttaccagaaaggatgagagacagagataccgtctctcctttcaactcccgtgtggctgcagttcattctcaaaggtcatttgtgtgattacctcagagtggtgtcccagaaagaaacaaatgagagtactttaggctggaaactgcggtcatcaaaatcttaacatggggaggaatttccatatctctcaagtcatcctcctgcctgaataatgagctcaggccatggcattgtgaggaaatttctgttttggtcgtttactgcctcctggggttgaggaagggaaaacagttttcatctgtctttctgtgctctactgccgcttaaactcatattctcaggccagaggcaaactggagactggaacccatcgccacatccttccatccaaatatttacttctctcctcatcttcctgatcattcattgccaatgagcatgtaaacattaaaatgccgaaaatacatttacaaagtttattagctgttatcctggcccaagctcgtgtttcctgataacgagacactgcatgaagcacagagatgggcccactgtggccgtgtccaagagggttgggttacagttgaaaatataaggccctaaacaaaatgagaatttaaagacccaatcacatgttttaaagctaaagatgctaactgacctatggagagagtagagacctggagttaggcgactaggagtccgcctctcatcctcaccagttgtgtgaccttggacgaatcctttaatcagccaagaaccagctgttacccagcaccatggggattgtaatactgaccatcttgtagagtttttgtgctcattagatgagataatgaattaaatttcaggcacattagctagtgttattcatttgtatccctttgagttgaaggccaataaaaatgtgacaggtctttggatttttttaacctcccaggaaggctagtctatgtatactgtgctttatctctttctttccagatgttctcattttcttctttttaaaacagattatgaggactacggggactattggagaggggattatgaggtgactggggcaggggactatgactacagccgtgaccagttgatgaaagatgtggaacatacctttgcagaggtaacgagacacagaagttcacatattgtatgatttcatttatattaaatgtgtataatcagccaaactgtagagaaagaaatcagtgaccacctggggctggaggtgggaatggagttgactgcagatgggtacaagaaaacttttgggaatattggaaatgttctaaaactgggcagtagagatggttgtccaaaagtatacttttattaaaactcacaaaactgtatactttaaaatgggtaaattttataatatataaatgatacttcaatttaaaaatgaaggaagtaggtagcatcttaaaatgaatatatatattttttgcatctgccttccaattggggcttccaaagtggtgctaacggtaaaaaacctgcctgccaatgcaggagacataagagatacgggtgtgatctctgagtcaggaagatctcccagaggagggcatggcaacccactccagtattcttgcctagagaatcccatggacagaggagcctggcgggctacagtccatggggtcacagagtcagacacgatggaaggaacttagcacgcacaccttccacgtggtgtttgtacacctccagatgtgttcaccactttattttatgcagtggaactagtcatcatctatatctggtaagaaggaatgctttcaaaatcttcagaatatttcagaggagaagaaattaaaatttagggtaattctactgtctaaagaaacccctgtttttagtgttgggaattggaaattggaatagggtattcttggtcttaaactgtcttcctgggcttttcagattaaaccattatatgaacaacttcacgcttatgtgagggcaaagttgatggatacctacccttcctatatcagccctactggatgcctccctgcgcatttgcttggtaagaaactcgaggaattccttgtctactttgctctttgctgtttccaccaataaggttgttattttggggtgaggcccaacttttgaaacattctgtcgatgaagttagtaacattatagaaatcatattttgaaagcactgtcttcaccagaaaagtcattttaaattgtcctctattgcattactttatacacagagagttgttttgtttggcctcaatccatggataaaggggttattaaagatcaccagagaatgagagtgaaaatggagaaaaaaagtttttgttttgttttttaagatcctcaggtttatttttatgttttaattcttttggctgttctgggtctcccttgctgcatgcgggctttctctagttgtgctgcgtgggcttctcttgttacacagcatgggctctaggcacatgggcttcagtaactaaagctcatgagctctagagcgtgggctcagtagttggggcacacagacttggttgccctatggcatgtggaatcttcctggaccaggcatcgaatctgtgtcgcctccattggagggtggatttttagccactggaccaccagagaggtctgaaattaaattgtgttgttcaacttgattggctgacccttgagctgagattttagcatcttgttgtcagacaaaagaagcttagttggttgggagtggtcaggggtgagagaaaagctctctagaattaaggtatagcctgagtgaaagcttcgtaagttggttgttcaactgcaacagtatcttttgctgcaaagtacttggtttggaatcatatgggtaatcaatgaaatcctcctcatgaagaaagctgcctagcttaagaggagaaacagtcttcagagaactcaggatcctgctgtagagctttggtagaccaggcaagacctggggccctttactgaactcctttattccttcccagagagtgatcaccctccctcctctctccctcaccctcaaagcctaggccaaagaaaatatctgtgtttggaaagtttatgtcctgcatacacagcaggcctactacaggcaagctaagttgctagtagctgattctctgtaggcaagcctctttcttagcaagaaggaatctggacaaaggagcagtggagactttttcctctaaagcaatatataaatactctctacagtgtctttggcaaccattctttggtaattcattttctgcttaaacctgtctggcgtgaagtggctcttgcttccttccaaaatagactcatctatcactacactgtaccaattacaagaaagtcctacgttatatggaggtgaaccaacacccctctcatgcctcccattcattctgcctaattctgtgctctgaggttacccagagtatgtccacttttcttccacaagatggccttctagagatttgtaaacaaccactgtcaaggtacagcatagttcctgacacaagagtatgtactcagtatattttactattattattgtcatcatgtatacactattttcttcttgtatgttaaatatcctacacagactttcaaccattcttaaaaaatctcacttttctacttgttctcatttggacaagcaaataaataaaataaaactttattgatgtccctcttcaaatatcatgcttagaactgagcagttactccagctgaggtttgaccaacatggaataaaggtggtgctgtgacttccttgttctagacactaattctgttcgtttaccttaaggtgatatttgcattttggaagccacgtcatactgtttgttggaccacttttggtcttttacatgtgagctgtgtttcaacctgatgtcaaatatcacatatttttataatagctatttcttgacagttgaagcataggagtttgcatctatctctattggattttatcttttaaaacatgaatttgttggcatattcttcaggtagttattttgctccattcctttggtgccagaattctggtcctgctgttacattgatttttttttcagatccattttctcttttagggtttctggccttggaatccagtttaacatttgtttgagatgtttgaaaagtcacccagttaagtagattactatagtatagtaataaaagtggaacttagttactagttactagcagagtttcctgaatgatcatcctatatgctctcacttttcttttccattatagtttattacaggatcttgaatataatttcccatgctatacagtaggaccttgtttatttattctgtatataaagacttgcatctgttaaccccaaactccgactccatccttcccccactccctcttccccttagcaacagcaaatctgtctatatactctctcttaaattcaatatcatagattactaacagtttaatttgtagtattttgtcccatggatgagggactatataaacctatttctaatctatagtagctatgatgtcctatatatttaatacattgtgcctttgaattgtgatttgaaatgaaagaaacagggatgattccctaacaagctttgcctcaccacatcactcttgccattttaaccttttagaggagacagtaaaagaagggaatgttgaaaatataaaataagagaagaggaaaagaggtagtgaaaggaagcacagaaactactgagttggccaaaaagttcattcatgtttttctgtaacatcactttttggccaacccaataaattaaatctagaatactctatggcctgtttaccagtcctacctcatgtgctatgtaaaatcatgtctatacttctactgtctttatcacatattaacaaatcttttttttaataggtgatatgtgggggagattttggacaaatctgtactctttgacagtcccctttgaacacaaaccaagcatagatgttactgaaaaaatgaagaatcaggtagggagaagacaccttgaaaactaaatcttcaacctcattcctttttatgctacctttctcttcttatgttataaagtcgtgtaaatgagaaaattttcaagcaattttaaatttatttcttatgtaggtgtcctttcatagaaaactagtttacaatgacagtgacatctagtacctagaataagtatggcattgatcttgctgagagtaactaaaagtggagatgacctggttttccattaagcaataagatgtgaaattgtgaacttataattctttctaaagttagtcattgctatgtagtcagtaacctctatgaataggggaaaaaaggatatctttaggagatttttacatattaaaaatcattattgttaaagatacgataagagtctgcaatggtttgcaaataaactttttgttaccatcttggaataattgttttaattctctgtgttcccttccattgatgaaagcatattatagctgtaattatatgtttttctttattgagctaatactctacaattttgggtagaatctataatcatacatctattagctgtgtaaaatttttccgaatcattgcactgtgatttacgttagtatttatgcattgcttgtgaacagttttaaatctgtaagcaactacgcaactaacaccttaacttgcgtaacatattcctgagataagtccacagcagaatgaaaacatgaagcttcaagagcccccaaactcctgcagctgttctagccccattttgcaattgagtagcagcaagggctcatttttatgtacctccatagcctgtctatggtgttttcacacccaccatctctcctaatgttatgtttacaacaaatctatgggactatcagggcaggtattgtgatagttccatgtcgtaggtaaggaaactgaggcttgggtaaatgattcacccaaagtcacaaagacaaccagtcagtggcaattaaggttggaacacagaatttgcagtctggttttctacccattcattcttcattcaacatatattaactgtgcttgccagtctacactcttctggtatacgttcgttttccttaagaataccatagtcaccaatagcaacattgtctgacgttaagcctttaaaggtaaaaaaaaaatccatagtgtctcttatacccagtttcatattttcaaggcagacatgagagaagaaattaacttgactggtttttaagatcagaggaagttttctgtgtcactaaaaagtgattcattaactatctaccaattatacaaatttagtttgactgatatatgcgccttatcgccaaagaagtcttggtcagctccagggacactggttcccagaaagatttgctgaatagcagacaccttctgctgcccttctgcagttccagaatattctgaaagtttaggttcctatacagactatgaagccaaggcccagctacccattggctgctgggtctcttgtgggcctttttgacttcgaaagcatgtgacttcatgtttgctttattgtttgtgtcttcctctgacacagacactaagaatccccagcctaatactggggccttgttcactgaacgaactcaatcaagggttgttgtctggagttgaacagtttttagcaaagagaaggtcattactacttgtctttatacctggagcataaaggcaaaaaaattcatacataatcgcagtctactcctgacattttaatgtacttcttcattaaaattatactatataagtgttttacatattttatcttctcattattattttaaaaaatcaataaaaattctttataaatccaatttatttaggttttctattccacaaaggcattgttatttacttagctattctggaggcttttttccacttttccctctattaaaaatcattttgtaacactttacaatttgtcaaatatattttagttgaaaaatagtaataaaaatcatttaaaatgtaattctttgacctaatttctgaaaatttcctaggttagttccctagagactggattactgagacaaagagtataaacactgtgaaagctgtctgtacatgttgccaaattgcctttcagaaaggctatgcctttgtacatacccaacaaaaaagaatgctgtgattttaatgctacaattaaatgctgttcttttttttccccagtcctgggatgcagaaaggatattcaaggaggctgagaagttctttgtgtctatcagccttccttacatgactcaaggattctgggacaactccatgctgactgagccaggcgatggccggaaggtggtctgccaccccacagcgtgggacttggggaagggtgacttcaggtagtgagactgacgttcacactgccagaattcgaacaggagacaatggagggatgaggatgaatttggattccttgtctgattctctgagcactgaagagaggagtgaatttttcttgaatagaggctgggagtccaggagaccacgtctgggtttctgaggaaaaggggattgtcatcaggccctcaactgcacctttagacagtttacctcgtctgaaataatatgcgttcattagagtttcacggtcataagtatggtggtgcccccattaggaaaggcttggtgcaaagatttatggaagataaaatatatgaatcagacattaatcccccctccccatttctttcttctgagtgaactaggacaggtggatggaaaatctggtatgtatcataggagaaatgcagagagtacttaaatcgtttctttaggctttgcaggtctctgttgaaattactcgtctctgcccttgtggcatgcaagcagccagagacaatacagaaacaagtggttggggctgtgtcacagtaaagtctaatttatcacaacactggtcagctgcaggccagagcttactgactccagtactagggtaaggttgaaaaatgaggaagtgtatataagcttcctagcacaggctcttacacacagtagacattaagtaagtacctattcttataattgtgtcaaagagaatagagaaaaaccaaaattagaaaaagaggtcatattgggtgtataaaagagattgagtttgttcctgagcagtgggagtccttaaaaggtatcagggggatggtgtgctcagagtggtgggaaaatgacagcacctactggaatatgacccctccactcacctacctgaaactgctcttgccaagttgaaaaggactggtatctaattgccaaatgcagtctttgggccacagcagcatgagacagtgttggttggttgtctttgacgtgttttttttcactagtgtctgcatggtcctcccttccggacttctctctctgtccccttttcctctctccaccctgtacatcctgggacctcctggggcttgtccttggccctctttccttgccatcctacactagctccatgggccatcacatccactcccctacttacatgctaatgattcccaaatgtcaatttctagtccctcccccctcccttttttttttttttttttttactgcttctctgtcttagctgtcccaaacttctggccgtgttcccattcttttctcaagccatcctcattgagcacttctatgaaggtcagtctcttgacccttcctgccatctaccgggcaaactgctgtgctttaatcaaggtccagattgctcattgcatcttgagtcatgccattcctggtgcttctagaagactaggcctgcatttactcatcattatggccaaggccatgtctgctgatcacttgtagagcacttgcctcagagtttttgtagtagaagactgtcttcctttctttagtctgtgagtaggaggacaggattcagccctgcctatcactttatattgagcacctagaacagtttctagaacatggaaggtaggtcctcaagattcattggtcaataaatcttggaaatgtgatccatgctatagaaatcccatataactattatgatgaataaatgaaattcaatgaggttcacgttaatcttgcccatttttgttcaggatcaagatgtgcacgaaggtcacaatggatgatttcctgacagcccatcatgagatgggccacatccagtatgacatggcatatgctgcacagccctacctgctcagaaatggagctaatgaaggtttccatgaagctgttggggagatcatgtcactgtctgcagctacacctcactatctgaaagcgcttggtcttctggcacctgatttttatgaagacaatggtatgaacatttttcttatggcttcttttgggtattctttattctgacatgggcaaaggtatttattgtcatgcataggatatatttaatttttgccatataaaatataatgtaattatgggtaactggggattgcttctggttaaaaaaaaccagtatataacataacatgccaacttttgtttttgtgtctttgagaagaggtaactaagtgaatgatcttgggactctaagaatcatctaggagaaaacttttattttattttacttgttgttgtttagttgctcagtcatgtctgactctttgtgaccccatggactgtagcccaccaggctcctctgtccatggaattttctaggcaagaatactggagtggggtgctgttttcttctccagaggatcttccccacccagggactgaacttgtgtccctgcattggcagggggatttttttatcactcagccaccagggaaacccagaagattttttaaaagatgttaaaacagacccacagaactgaaatggcttatccaaggtcacctagctaattagtgtcagagctcagattgaattcccccagttctaggtaaaaacctcagtgatggagctggaaaagattctaaaaatcactttgtagaggaagcaagctgaaggcatgagagggaaaatagctagcccaaggccaaaaagcagcatggcagaaccagaaccaaagacctaatatacaacttttcccataatattatgggaatattatgggagttcttagggagcaggtggtagaatatgaagattggaagagactgaaactcttttttcatctagctgaagcatgaatttgccccataacatcccctcagatccaggccatcattcgaggcacctttttctctttggatggcctagacttgatggaacccaacaaattcatgagatccagattttttttctgtgaggattcttcgctcagtcgtgtccaactctttgtgaccccatggactgtagcctatcaggctcctccatccatgggattttccagggaagagggctggagtggattgccatttccttttccaggggatcttcccgacccaggaatcgaacctgggtctcccgcattgcaggcagacgctttaccatctgagccaccagggaagccctgtaaaaggacacttagaaccaaatatgttcttcttttccatgtttttctctcccctcattttagccatttgggacataaacatcagttctgctgactggtacatttagtcaatgaggtcaaggtcataagctccatctttgtgtggacagttcactttgccttgacttctgactccagaccttgataatctcacaagtgcctgggagtaggtcactgtaaagccatcatcatgtctgaaaaagtgtgagcacagacccagtgggtaatagacaagtagcagtatcctcccagaagtgagcaaccaaggaaaggggtttcacagtaaccagacctgtcgcctaattttaaatgatcattctcaagtcaattcacagaaaagtgttttatcatttttaatattccttgacagcaagcaaagatgattgaatcactggtttgaaaaattcctgcttctttccttggctctgctcctgatctgtgaattatatttgacaaaataaagtccttcattccttcttttcctctttctttctccctctcttcctttcttcttccaaaagtgtttactgagcacttgctacgtgtaaatcatttttttaaagacactagagagatacagtgataatagccccctgtttacattccagtaagctgcatttatacaacagatatgagctccactgcccttttacaccactgctgctgctgctgctgctgctaagtcacttcagtcgtgtcctactctgtgcgaccccatggacagcagcccaccaggctcccctgtccacaggctcctctaggcaagaatattggagtgggttgccatttccttctccatttataccactaataaaggataaatgaaataatataatttgttaaagcattataaactctgataaggaagatatttgtaaggcctgaggaaaccttacaaatagctgtgaaaagaagagaagcgaaaagcaaaggagaaaaggaaagatatacccatttgaatgcagaattccaaagaatagcaaggagagataagaaagcctttctcagtgatcagtgcaaagaaatagaggaaaacaatagaatgggaaagactagagatctcttcaagagaattagagataccaagggaacatttcatgcaaagatgggctcaataaaggacagaaatggtatggacctaacagaagcagaagatattaagaaaaggtggcaagaatacacagaactgtacaaataaaagatcttcacaacccagataatcacgatggtgtgatcactcatctagagccagacatcctggaatgtgaagtcaagtggccttaggaagtatcactatgaacaaagctagtggaggtgatggaattccagttgagctatttcaaatcctgaaagatgatgctgtgaaagtgctgcactcaatatgtcagcaaatttggaaaacagcagtggccacaggactggaaaaggtcagttttcattccaatcccaaaggaaggcaatgccaaagaatgctcaaactaccgcacaattgcactcatctcacatgctagtaaagtaatgctcaaaattctccaagccaggcttcagcaatacgtgaaccatgaacttccagatgttcaagctggttttagaaaaggcagaggaaccagagatcaaattgctaacatccactggatcatggaaaaagcaagagagttccagaaaaacatctatttctgctttattgactatgccaaagcctttgattgtgtggatcacaatcaactgtggaaaattctgaaagagatgggaataccagaccacctgacctgcctcttgagaaacctatatgtaggtcaggaagcaacagttagaactggacatggaacaacagcctggttccaaatagggaaaggagtgtgtcaaggctgtatactgtcagccttcttatttaacttctatgcagagtacatcatgagaaacactgggctggaggaagcacaagctggaatgaagattgctgggagaaatatcaagaacctcagatatgcagatgacaccacccttatggcagaaagtgaaaaagaactaaagagcctgttgatgaaagtgaaagaggagagtgaaaaagttggcttaaagctcaacattcagaaaacaaagatcatggcatccggtcccatcacttcatgggaaatagaatgggaaacagtgaaaacagtgactgactttattttgggggagctccaaaatcactgcagatggtgactgcagccatgaaattaaaagatgcttactccttggaagaaaagttatgaccaacctagacagcatattaaaaagcagagacattactttgtcaacaaaagtctatctagtcaaggctatggtttttccagtagtcatgtatggatgtgagagttggactgtaaagaaattgagtgctgaagaattgatgcttttgaactgtggtgttggagaagactcttgagagtcccttggactgcaaggagatccaaccagtccatcctaaaggagatcagtcctgagcgttcattggaaggactgatgttcaagctgaaactccaatactttggccacctgatgcaaagcgctgactcatttgaaaagaccctgattctgggaaagattgaaagcaggaggagaaggggatgacagaggatgagatggttggatggcatcgctgactcgatggacatgggtttgggtgaactctgggaattggtgatggacagggaggcctggcatgctgcagtccatggtgtcacagagttggacacagctgagcgactcaactgaactgaactgaaggaagatatcagtaaatttaaaattcatgatacttctgattatccactggataattagaggagggaggctgttttttctttgttttctttcctccctggtttactggcttttggccacatctgtttaatatccatttatttagcaaaaactcacacagggcctcatgtagcagacaccagtttaggtatatagtcttgaatgagacattgacagtcactgccttcatggagcttacaagaataaatagtatgactaggaaagcaggtgaaatagccctacttagctctgacaagaggtagttaaggaaggtagtactgaaactaatgcaaaaaacagggttacttgtggatttatttaacctattctatccaaggcttcaccctacttcaaatccctcagctgagaaaatgaataaatacatattattatgtccactgtcaatatttctcatgtgatcatgcttatagtaagtatatcttgaggaataatatcttgagattaggaaattattgaacacaaaatgtctactgtcatcctcatcttaatatttatcctttcccattttcctttcagaaacagaaataaacttcctgctcaaacaagcacttacaattgttggaactctaccatttacttacatgttagaaaagtggaggtggatggtctttaagggtgaaattcccaaagagcagtggatggaaaagtggtgggagatgaagtaagtcagtgaatatgcatgcaatcagtaaaatgttttctcatgaatttgctgtttatttacaagcatctaattggcctgtatagacatatacacattcacattaactacttgctttttattaagtctccatttgggtgccttcttctcagataacatttccttggctttgcccaccccctcagaagcagggtcaagtgacaaaatttctcatgctctatcttcttgcatgttgaggcacccgttaaactctgatattatttacgaagtaatcagtatgttcattttcattttttattttgtccattctttgaaacaaaaattaataaccccatattttaggtaaagcaccagggatccaagactgatcgtttgcaccagggatctgaggctgatcgattttgatgttctctttgacttgcaagagcttttagtttatggagggatgtggaaaatgaaaccactgcagtgtgctgaattgtgatggagggtgtggggatccgtgagcatccaaggggggatccaaagccctggccagtgagtcagatgaggagaggcatccaagctgaggtttgagaacaatgtgggagttaaccaggtgtacgtagaagggaagggagagaattccaagcaagtgaaagcctgccatatttgggcaacagatggtgatggctttcaatagtttcagtgctacgtcattcatcactatatcccaagtgctttgcacagggcctggctcagacacgtatgaaataatgatcaaagtactactgaagaagacggaaggaagaaaagcgacctccccaccatattagtcagactcctgttaatgatttttctttgtttttcctttttggagtgaagatctacaattataacatttagccccacgtccataagttgaagtcagtgccactattctgctaagattctttctgttgacataaatcctccttgggaggaaggagacagcatctctaataactgtctctagcatttaagtattaccaaaattatgtctctcatgatcccacaatcagaaaggacaaatgtattcaaacaatgccaaatacatggtttctgtacctttttatcctgattaaatttttgaccccttttagtttatttccagaggtacatagaatcaggccctgaaaatgattcattgtgctctattcatgtaataagtccacatgaagtcttttcttagcattgggcattgtggctggccctggaactataaagatgaccagaacacagccctgtccgctaggtgctcaagtctccagagcaagaaggagctgtatgtgaataattataaaacagagagagaaatggcaaaggaggcagagctagagaaggcctggggagctggagggcttgctgtggtggcaggtgcttggggtcaggggcagcacttacagatgagggggcatttgagctggccttgaagaatcagatcaatgagaagaatcagtgaggtttcaattttagaaaattctgcctaccaagagcccataaaatatggtgcaggagaggaatttttaggactttcactgtatggctttggtcacataatatactttatgaaattggtgttttgatgatacagctatttttcaatggtatagactggctgaagtaacaaaaaacagagatgattacatgatgggatttattctgtaattctttacactgtttcaatttcacctgaccacaaattccaatagaaatgccattgactgatggcactgcacaatggcccatctatactttctctcagtgagtgacccacagctaatataccttctttttcctccaaaggcgagagatagtcggagtggtggagcctctgccccatgatgagacatactgtgatcccgcgtgtctgttccatgtggctgaagattactcattcatccggtaagtgacagttttcttctgtttcacttctagaatttgtagacagggtgacaactttaatttctccatctccattcccctcccccttagaacctcaaaatagatgatcagtttcaattctatgtaactgaacatgatgtattgagttcaacaaaagttatatgagatccttttctccaccaacagggaatttatagtctccttgggagcaatagaaatgtttttgtttgtctccttgttactggcagagttcagggtggtcataatagagcatttttaacttgaagtcccaaaatctatgttcttcacctattagctccagatcttgaatttgttgagtctcagtttctttatttgtaaagtagaaataatattgatgatttgccaaaaggattgattggcatcagttatgtgaagaggctataaatcggtaaaacacaatacaaatgtgagctcacatttaacaagataatgctgcctttttatcagctgatacataaatgcaagtatcagctgatacataaaagaggtttaacggatacttctttggttgctggggcctcaaaatttaaatatatgtcccaatctatgactttaccacagaaactacacatgggacaactctttttttttctttatctcttttacaggtattacacaaggaccatttatcaattccagtttcatgaagccctttgtaaaacagctaaacatgaaggtgccctgttcaaatgtgacatctcaaattccactgaagctgggcagaggctgctgtaagagatgcttcaaaaatattgaacctctcatcctatttaatgttactcatttccatgcctaggttggaatttgatttctttgatccaaaaaagaaaatttggggactcaaaatgtcttcgtccatgaattaaatgtttgttttgtgatcacacaggaacctgcatcctgtgatggctagacaggccacctcctctccccatgtcataactacagagctctctgggggagggagattgaaagatgaacacatcttttaccatgctttcttgtcttatttgccaggagcaaacttagtcaaaccaaagaggagtgaccatagattgtacatgtaaacagatacgcatctggaatccatccaaaggccctgaacccaccttcccctgcctttttttttttttctttctttttttttttttatgtagccaaatgctgcgccttggaaaatcagaaccctggaccttagcattggaaagtattgtaggcataaagactatggatgtaaaacccctgctcaactactttgagcccttgtttacctggctgaaagagcagaacaggaattcatttgtgggatggagcacggaatggactccatgtgagtagatggcgttgacacatttctaatggccctttttctgcttccctagtcctctctggccctagtctcacgggactcacacagttgagtgtgttcttcctctacttatcccctgtactgtggtggcagatgccattttctctgggaggaaacacatttgttgagcacctactgtgtacccgacacagtgaaaactccccccttcttgttttcagtctgctttactagcccatatttaaaataagagtctaacagtttccaacccactgtatgtgaatcctgcccttcaaaggcaaatacgtttaacaattttaatgcaatcccctcttctttctggcagttacattcatatttctaaacagcttctttatattgtcatttctccattgctcagttttagacatgcatttctgcctactcttctgcctccatttcccattctcccaatgcaatttaatgtaatttttagtaaagaaattaccaacatttgcatcattatacctgtaaaacctagtaatatactattttatatattttttaatgtagctttttgtttgtcctgaagtttctactgtctcacttttttgcatgcctaatttgctgtctatactatattcttctccaactattccaatgtatctattcttttcagtctcattttttcctaaagaactccctcttggagtcctcctgtctccatctggaccacagttttcatcccaagttacccctttgctgctgtcctgggttgaatcctctccttcctggatgccatatcttctttcatgaattgcctcctgttttgctgcagcacggcctccaggtgactttctaagcaagagctcatggggtaggagcatcagctgttcccctaagtggctataaccagacctagattttcattttccttgttttcagtccagtatcttcttcccaccccctgctgtacctgaatcccaggcctttcctggattctctgggggtctctactgcttgtgtgtacacattacaccatgacttcctgacccttgggaaagcatttaccactcctccataacttctcattttccaaaggagtgtttatacctttaaaaaattcctgtactatcactttagtgggatcttgggaaaggaaggaaataaacacacgtggtcaatctgctgtctgtaacaacagtctgttatttctctttaatcagattctgaccaaagcatcaaagtgaggataagcctaaaatcaggtcttggagaaaatgctgtgagtattctagatagcacatctatgacttttcaatgcattcccttatttagggcacaacaagcccatttcagtgcagttgaaaagatgaaagggcacatgattctcttaaaaagccatagattctggcctctggcatttgagttggttttttcagtaatatattccgtattgaattggctatgcctctgttttccttgtgactctgaaggtattatgaagatgagtgggaaaacatctaaagtatcaaatacctaccctccaattcactctaatcacaattacttgtattttttaaaaatatatttatgtggctgtgctgggtcttagttgtgacgtgtgggatctttagctgcagcatgcaaactcttagttgtggcatgtgggatccagttcctcgaccagaaattgaacccaggccctctgctttgggagcctggagtcttagccactggatcaccagggaagtccccactgcttgtatttgaggaagaggacatgtttatatttttagagactgcttttagaagtattgtaggcaatttggctttgtttcgtcttagtcgatcatctaggtactagaagcttgttttaatcttagaccccagccttggacctgctttatcagaatctgcactttaacaacccccaaggtggtttgtagacacaataaagactgggaagcaacaattcagaccactatttctaaagcttggctcacactggagtcattcaggatgttttttaaaatattaatgcttcagtcccattcccagagattctgacttactgttctgaggtatggcatcaaaacccactccagtattcttccctggagaattccatggacagaggagcctggtgggctacaatccatagggtcacaaagagttggacatcactgaagcgacttagcatgcatgcatctggcatcaagtcatcaaagttccccaggtgattttgattacagcacagcttgagaaccactgagcagagatgcatttctggacaacaaaaagttttacagaaaatcagattacttacaccttcatgtgaattactttaatcagctattgctttctcctaaacacctgtctcaggttatccagtttgaagcaatttgtttctggggggaaaaaagagaggagagagttgcctcaggcagatggagatcaaaagcatggatggaagtgtggcacccaggaggctttgcaggattagagaacaacctggcattattggataaaacagtccaaggtgctacagaaaattgttcttttcgctggagagagtcaaagatggcatttctacccccatacttttcttgggaagttaactattgtccaaggctccacagtagttgtagtgtaattttcatatataagcaaaacatctaaatataaataacatgtcattgttgttgtttggtcactaagtgatgttcaactatttgccaccctgtggaccatagcctccaagctcctctgtccatgggattctctaggcaagaatactggggtgggttgccattctgttctccaggggatcttcccaacccaggaatcaaacctggtctcctgcattggcaggcagatttattaccactgagcacccaaggaagcccatagtaggagtaaaaagtgaagatttaagaaacaagtataaaatggaggtgtatcatttctcaaactctgaaagttcaagttcctatttcttagcaatcattgtctctggggttatttctccttctgtcctatttttattagctcttccttggactgataaaatttaattttaatttaaagtatccagtagatcaggattcttttcaattatcttcttttttcttgacatgtttttttcccatgttctctttccatgcagtgagggattagtaaatagtcttcagaggggtggatggtgtaatattctgaggcccattcacagagcaacaggctgctttgatgacagtggagttatacttttagccagaataactgtccagttcaagctacttcatagcaaagtccacctggatctttgatactatattgagaacttagcctttacttttttaatatagaaataataaccagaatattagtcgccatgttcagttcagtcgctcagtcgtgtctgactctgcgaccccgtggactgcagcatgccaggcttccctgtccatcaccaacgcctggagcttgctcaaactcatgtccattgagttggtgatgccatccaaccatctcatcctctgtcatccccttctcctcctgccttcaatctttcctagcatcagggtcttttccaatgagtcagctcttcacatcaggtggccaaagtactggagcttcagcatcagtccttccaatgaatagtcagggctgatctccttcagaatggactggttggatctccttgcagtccaagggactctcaagagtcttctccaacaccacagccatattaaaaatattattattactattaaagcaactttcccaataaatgagtggtatcaagctggactcaatgtagcaatcctttgaaattttttttttatatacagctaaaattttcttttgaaaatgtaacattttcaaattgaagtgtagttgatttaaaatgtgtttgtttcagaggcccagaatctgttcagttatacacatacatatatatttttcagattcttttcccttataggttactacaaaatattgagtatagttctctgtgctatacagtatgtccttgttgtttattttatatatggtagtgtctgtctgttaatcctaaattcctgttttcctcccccctttcccctttggtaatcttaattaggtttgttttctatgtctgtgggtctatttgttttataaataagtttctttgtatcatttttttagattccacatataagcaatatcttatgatatttgtctttgtctggcttgcttgcttcacttagtaccatcagttcagttcagtcgctcagtcatgtccgactctttgcgaccccatgaatcgcagcacgccaggcctccctgtccatcaccagctcccggagtccacccagactcacgtccatcgagtccgtgatgccatccagccatctcatcctcggtcgtccccttctcctcctgctcccaatccctcccagcatcagagtcttttccaatgagtcaactcttctcatgaggtggccaaagtactggagtttcagcttcagcatcattccttccaaagaaatcccagggctgatctccttcagaatggactggttggatctccttgcagtccaagggactctcaagagtcttctccaacaccacagttcaaaagcatcaatttttcggtgctcagccttcttcgcagtccaactctcacatctgtacatgactactggaaaaaccatagccttgactagacggaccttagtcggcaaactaatgtctctccttttgaatatactatctaggttggtcataacttttcttccaaggagtaagcgtcttttaatttcatggctgcaatcaccatctgcagtgattttggaccccccaaaaataaagtctgacactgtttccactgtttccccatctatttcccatgaagtgatgggaccggatgccctgatcttcgttttctgaatgttgagttttaggccaactttttcactctccactttcactttcatcaagaggctttttagttcctcttcactttctgccataagggtggtgtcatctgcatatctgaggttcttgatatttctcccggcaatcttgattccagcttgtgtttcttccagtccagcatttctcatgatgtactctgcatgtaagttaaataagcagggtgacaatataccctaatctcctataattgtttttcctaaaaggtgggagagaggcaagctttgtgctattcatgatctctactgccatctactggaggaaagggtgaattttttttctctttgaacaggtttttcctggactacacacattttacacaagccattggtttagcactggaaaacaagaattaccttgtctacaaaaagctgttttttcctttgaacttgaagtttctttttcttttacacttacacatctgagaacttgctataaaaatagtaaaaggtcagcatacttgtctacagtatatggatgttttaaccaaaaccaatggcacacataactcccatctataaacctaccctagagtgcttatttcagcttactttaagttaaattcaaaggaccagtgagccctgtggttcttaaagcattggtgctggaccagcagtgttagcaccatgtgggagcttgttgctgctgctgctaagtcgcttcagttgtgtccgactctgtgcaaccccacagatggcagcccactaggctcctctgtccctgggattctccaggcaagaatactggagtgggctgccatttccttctccaatgcatgaaagtgaaaagtgaaagtgaagtcgctcagtcgtgcccaactctttgcgaccccatggactgcagcccattaggctcctccgtccatgggattttccaggcaagagtgctggagtggggtgccactgccttgtccgtgggagcttgttagagatgcagaattccaggtcttctctgaggcctgggcccagaattcagtgatttgacaagccctccaggtgatgccagggcacactcaagttggggatcaccgactttatgcagagctagaatctttggcatattagacagtttaaaattaacacacgtcgggaagtccctggtggtccagtggttagaactctgagttctctctgctgagggtgtgtattcaatccctggactgggaactaagatctcacaagatgcatggcatggccaaaaaaaaaaaaaagcttgtggaatatcaggttttaataaccccatgatctctactgagcagtgtttttgttgtgaatttgcagtatgaatggaatgacaacgaaatgtacttgttccggtcgtctgtggcatatgccatgagaaagtatttttttaaagccagaaatgagaccattccttttgggtgagttgatgtgctgtgctctcaatcagtatttcccttactcttggatcagaaagttttatgcttcagcttttattcacgtgaaattgagaaaaactcctaactactattaaacctcattgatgtcctggaattagggccacctttttttagggatgcttgtgacttatttgacttgtagatggaagagctttgttattattaaatggccctctcctcacctcttccccccctactttctctcctctccctttcttttccccaaatgctctcatgcaccctcagcactgaaaacaaaaggcagaaatctctgctttcattgagcttgtattctaatgtatctgttttgtgtgtgtgtgcgtgtgtgtgttatagacagtcaacaaaatatataaatgaaatatagtagaatttgatggtgataagtgctagggagaatagttcaacagaaaatgggcaagggagtgcttgctggttgtgtgtgtgtgtgtgtgtgtgtgtagggttccattttaactaaaatggtcaaggaagaccttgttagtatttgaacaaatagctgaaacaggagagagagtcagaggtgcagaccatggggaaaaatgttgcagcttgaaaaatagcaagtagaaagatcccgaggaacaagaatccttcacctattgaaggaacagcaaagaggccagtgtggctggagcagagtgagctaatagaagacaggagattcggtcggggcagacagggccatgggggtggaaaggcgagaagaaagtttgtgtgcgcctccaaagccattctaaggccattggctttccttctgcgtgagaaacgctctgaaccacgtgatctgtcttgggtctttgttttgtttttttcagtaaacattcattgttttatttatttttggctgcgctgggtcttcattgctgcccgtgggctttctctagtggtggcaggcaggaggctactcttcgttgttgtgcacaggcttcttcttgcagagcagtctctaggcatgaggcatgtggccttagtagttggggctggctggctctagggcacaggctcaatagttgtgggtcacaggcttggttgctctgtggcatgtggaatcttcctggaccagggatcgaacccctgtcccctgcattggcagacagattcttatccaccgtaccaccagggaagtacctgccttgcattttattaggatcagtctcatcagctgtgagagcatagtcttgtcacatcctactataaaccccactcctcaccctcacctgtggaggcaacatgacgagttttgccaggaggggcccagttggaagatatcagggcaccgcctctgtccatggaagggagccatcgctgcccgccatgttatcacaatcctgggtcaccagtgattccttgctgagtcttccgccgctttgtttgaaatatttctatcactgaaaaaaactgtggttcttatatggtagcagaaccaatcatgccaagacttgctctcataccttagggaattgagttcatgtgctttgggcagtgtcaaggttattgggacagtgacatccttccgtgacaggccctgctccagggctctccactctaccctgtgactgtgccccgatctccagcagtagaagtcttcattctcttcacagtgtcctctgtgccaccaggaaaaatgtttcttttgtttctccacagggaagagaacgtgtgggtgagtgacaagaaaccaagaatctccttcaagttctttgtcacgtcacccaacaatgtgtctgacatcattcctagaactgaagttgaaaatgccatcaggtgatattttactttcaaatgtaggatagaagggtgagggggtcccaatgcaacaacagtaacgaaatgatttgtgtgttcctaaaggtgccaggcactgttctgagtcatttgcgtgtttttcctcatctgaaaaacttgggttttaattccaaaaggatcgcatagcaaggggattgccttcattgggtttcttcagatgcaggtccttagacaaggatttgaaagtaagtagtttatttgggaagtcacctcaggaagaatggattgagtgtggactggagacagaatggaaggaaggtaacctgacatgttatgagcaagttaccactgtgggcagctagaactccattgtgctgggaattctgggagatggtgtggaacatgcaccagaattgtcccatcagagctggggtatttattcaccacttcccattagtcactggttgagaactgtgtacaggggacagtagttccccagccttactggtctgcagatagggctgaatcttgtagcctgagaatgctctcaggcaaaggcagtaggtcctggctgaaggaagtctaaccagcacgcccggaaaatggtaaatgcagagggtacatgggcaggtgtcgccatcattgctgtagggactttgatgcagaattcatttaaccaaagtctgaaacaaggcaggcagggacagggttccttagatactaaataagtaagtgttagtcgctcagtcgtatccgactctttgcgaccccgtggattgtagcccaccaggctggatagatgttgatgtttccccttgtcattaaaaaaagagaaaaaaaggcttaatataccattgctatgggaaatgctactaggtggcgctcttgagctgcttgtcgtctttagaagcagaaccaagacttgccgggcagagttggcctagaaaatctggcttagtggggtttacaacccaagcacacccagactcagtggctgcctccacaagacttgtcttgggggaaagtgctagctgagatcatcacgaaggagcccagcattcctgcaagctctggggagtcctcaaacttcctatttccagagtgacgagactctttcaggtggaggttgctgcttggatggcgctctctctctctggctggactctgacttcctgacctgcactgtattcaacggcaggagaatgggatgccagacactttggttttcaatctggaatactgaacatttcactgttttttgttgtaaaaataaccttcatccttttttcctctatgaaattcggccatatcccagcacagtgctggagaatttggcaaaggctccttccctgtgttcctccccagagctgtcacttattaggatgtcaacaccttttatttggaaaatggcagctgttgagatttgtgtatagggcctgattcatttgtagaagaggtggatccgattgtccttttccattatttgatataaagtcattgtagacatacctcaacagaaaggaaattcttaccaaacgtgcaacttcgcctttacaacacagtagtcacaaatgaacaaatgccagccatctgcacatttccacacttgcaacctaattttccagtgaagctgtttccaaacctaatctagatcacacggtatgaaagaggtataattgttaaaactcaaatctgtcagtgaacctggttattgactttgatttcattgcttctttgggtaagccttatcaaatccttttggagacagtgatataggcagtaaatcactgcactgttttcttttgcctgagtgttttgcttttgggaataggttgtcccgggaccgtatcaatgatgccttccagctggatgacaacagcctggagtttctggggattcagccgacgctgggacccccttatgagccacctgtcaccatatggctgattatctttggggtcgtgatgggagtggtagtgattggtattgttgggctcatcttcactgggatccgagatcaaaggaagtaagtgacctttcttggacttatttatcctaaaacagaacagtttcatgaaaactaactggaaaatttgcagtaagtggtaggttgtacaagccaattacatatgtggacaattccacagctaaatattcttgtgcacccgctagaagtttaccagatttcatcagcacgtcaccaccctagcaggccccaccatacaggagatctccagcctggggtttactactggtatgccccggtaaactccatcctggccacagcatcatttccctactgctaaaaggcactccaagttctgcagtggtgagtgggctcggggcggtgggcgggggggattatccttactgaggagtcctccttggtctagaagtgatcctagagaatgcattagtgacagatttgaactgtgaaatcgttcaagaatgagctctgaggtttgctccaaactgctatgcttgaatcctctgcatccctcctcctatggcctggacgccttactataccctcagttcatgggtcatgcaccctctaaattgttctcgagttgaagatccaagttcactgtggatttaaatcaccagaggcctgatgtatagttgtgccctgccactagatttgttttctgatcttgagacagcatttacttttgttgggctggtgtaattgaggttaattatattttataacatctaacaaaactctttgcacaccttaggttgtttaaatgtgttctttaatttttatatgcactagtctgttttgctcagtcttcttcactatattgtttccacaaataacttcatttttaaaattaggcattgacaaaaatatattcatatagtaaaaatgttttaaatacaaaaggatgcatagagtttccctgtcactctttgcttccaagttcccttcctaaagttgacaaaaatggtcagttaaaaaaaaatttttttttaaattgtatagttgatggacaatgttgtgttagtttcaggtatacagcaaagtaattcagttatacatgtacacacatctattctttttccgactcttttcccatagagattattagagagtacagagttccctgtgctatacactgggcccttgctggttatctattttatatatagtagtgtgtatctgttaatccccaagtccttatttatccctcccctccctttcccctttggcaaccataagtctgtgactctttctgaaaaatgatcagttttttagagacccagtgtatcagaatctacattttagtaaggccctcaggtgactcatacgcacattacagtccgagaagtgctcttcttcatagtacaggtttgcatgtgagatgctattccaaagttcattcatcaaagaaattctttttgggctcctccttcatgctatacactgcattaatagaagctacacacaaaaataagactgctaatgtatttcttacattaatgtattcagtaattgtataatatattcctatgtaattatgttcatgtatatataagacagagattcagagaggccaagaaaccctctcaagtttgcacagctagtcagtaacgcatgaagatatgcactcggtttctaaagctggttgttgtagtacaaagcgggcctatcctgaccttcatactttggaaagtggtaatttagtagggaagttttttataatgaagtgattggctaaatgaccactgagttcctaaaaataataataatggttaatatttattggagattatatgccagatcctgtgagtactctgccagcattatttcactgagtttacatatctgccatcattttctgaatagttagactgaggcacagaggcccccactctcagacttcagagcttataccctaaccagtctcctactctgccaaccatcgtgccaactgatcatcaggctaaagaagtgaattcaatgcactctgggtgcccacagtccattaaaaggggactggtatgcaaatgagtacaggtggtaagatgctgagatggaaaagatacccgggccattggagtccaagggaggccgtgtcactctaagatcatgatattaaggtgagttcactttatttaacaggaaaaatcaagcaagcagcgaagaaaatccttatggctctgtggacttgaataaaggagaaaataattcaggattccaaaatactgatgatgttcagacttcgctttagaaaaatcttttttatttcctcttgagatgattttattgtatgtaaatattactttcacagtacagaacataggcaattataagaatgtcattaactgtcaaagctctggctctgttcaggaaaagctgtccaaagaaggcatgcctgagaagagggcatcttcccttgcatcacttttagtacttgtttctgcctcagcacttgacttctgtttccttaaagagatgtttctgtttgagaatagagacagtctgtctttggcctcacaggctgttcaggggtaatggaaatggaaatttccattgtgttgctggagatggaaaaaaaggatacagggtaggagcaagtgtgtggaatctggacggatggctcttaaggacgtgcctgtgattggatggagctgcgaggtggagcccggcatgcattgttcacttgggtttacttcaagtgtaaaggaggacatgctctcttcacgttaacttaatctaagtactctagtgattctccccagtcatgattggaccagaacatgccttcttcagagtgacagggctacagaagagagaagaatccagacagccattggaggacattgcctttttactttcaagctgcttggccaccgtctttctgacatcaccctagccctaggggccgccatgaaccccctcccaagctgccatgttaggaacttgctcccgttgctctctaactgtgaagtgcatggggaccccaactgaatgtcgcttctgaagtgggctcccaatctcttgaatcttctgtatttacccataatgtttgagtagtgctgagcacaaagctcacaaagacaataaatacttgatttacacactcttgtggtctcgtgtgtacttctgtgctcggccttccgtggattctctctgcttttcacttccagggacaaagctgcctgggtgtcccgacctcccacatgtcttgaagtgcatcccagtatgttcagttactttattgtataaagtgattatgttcaataaaatcagttgaaaagagttgtgttaagagcatctacactcttaggttaggagccaaacctggcaatggttttacaaatctcagagctcctagcccaattctgagcacagaatccaatacagacctgaaaactggtataaaatggattatgtagattaaaatatccaaactctacctatcagttcactttatgtggtgaccagcatactgtagagtaacttagtcaagtaagaactagcagcttgtgctcaaaagactggaacttcctgctcgcttttaggaaagggctgttaaaggcaacattagagctgagggttgtagggtgcctgatcagcttgtggacattcttctgatcggctgatggtgaggtagcttgggtggtatttcaagagtcagcatcatcaaccttctggttgtaaccagtctggggtctatgtgctggtggtcaggatgcagttaaattcttccacctggtagggattttagtatctgccaaacagctcaaggacatagctcaggatattatctgtaacccctgaggaggaactaaagttcctttactttgctttatgactaaactatgattattttgtcttgattgactgtttttctttgtttctgcattttctcttttatcttatgaaatttgccctttagaatgcagggaaggtctaggaagctaaagattttctacagacaagaggcagggtgatgggaaaaggggggagtatctttccccaggaaggtcacacagagtcctgctcagtttcatctttagaagatcaagtatataaaaataaggagaagaaagaaaaatacccttcggcaggggagaccaggaagacctagtttgggcatgagaaatctttctcatgggggcattaagtctgtggtgcaagtctctggtgaatggaatcagagctgcaaagactggcacccactcctgacaatgggcctgttgagcgggaggggctgtattatttcttccttttctcttggggaggaaggaacctggcacacagtacctgctaaataaatgctcactgaacatataaatgccctagtggctgtttcaaaagttccatgagatttgtgtgcctctgttaagagggaaaaaaaaaaggaacaaataaccaagaacaatcattcacaatagctgagggggagtggaatgaggaagggtgtgaacatctctaaagggagattgttctgtctagaaaacagtagcgtcttttcactgtaacagagcccttcacataacctttctctctcccttcttgacattacagacatgacaatgatggactccaaaatgatgaaaacctaagggttcagcagcaggccgtgaaggtggacattcccaggaacagtttgaaagctacagtaccttttagtaatagtcctgagaagctcaaataggactcctgtacttctgtgtcaagatagaagacggaaagagaaagttcagttatcaaactagccagaagtcctcgggctccagacttgaggattttaaatggttacagtaggcctctcttatccccagtttcacttttggtggtttcaggtacccgtggtcaacaactatatgaaaatatttagtagaaaatttcagaaataaacaattcatgagttttaaagtggtgacatctcgtgacgccaactctgctcccccaggatgcgaattgtccctttgtctggtgtgtcccgcccattagtcgcttagcggccgcagttatcagatctgctgtcccagtctcacagtgcggtgttcaggggacacttgttttccttaatcctggccacgaagtgccagaggagtgatgctggtgatttggaaatgccagagagaagccctaaagttttagttgcctttaagcgaaagggtgaaagctctcaatatggaaagaaaaaaatga

SEQ ID NO: 47 - DNA, 237253 bp, Hippotragus equinus
  source 1..237253: mol_type = genomic DNA
ccaggaaattcatagaacaaaattttgcagataaattgttgtttctgaatttaattctaagaagtacactaccccatttttcatagaccaagctgagaggccatgtatactatttctaggctaatttttgcttactgtggaaaggaagatgatttcctgtgaactttaagtatccagttcatgtccatcattgttgaaaaagggaagggagccaagagggccagaagaagtagcaggacagagaaaatgccacatggatttaggaggtgagataactgacagtaaaatgtatgttctttggttagcaaagcgaaaagggggaaagtactgcattcacgacagacacacaccagcattctaaagcaggagacaagaatgtcaagagtgtattcttcccccactgccagatggaagggctattattataaatgaaaggcagcagtagtggatgccaggcacttttgttgtgtgccagattctgaagtccagatgtaagcaggttacccctgggacaggacaggcttcagctctcgcagcagaacagaaccaatcacagttttctcagtgtttatgatgagctgtgctgtagagccttccttcagttccactgtgactagcatcagtgacccactgtgtacagttttagctgcaaacctggaagaaaaaaaaaacaaaacaccagagaccttttatcatgagggggaaaaacagagacagcacatattcaaataggtttaaaataacttttttcctcaataatttatcacaggttccctacagccccaaacccaaagacaagcattctcccaaaaaatcaataaactgcccagcacacgcttaccacaagcaggtgatttcagtatcttgggaacagaacagaaaaaggagttctattttacttattagtttgaacaatagatgcatgtgaataactcttgattactacatatttgagaatcatttattcatttgatatataacatttcaccagccatagggccatttaaaatcaactgctctattttcatctttaaaacatgttaagaaaaggtttacctttctcaagtgaaagtgaagttgcttagtcgtcaccgactctttgtgaccccatggactgtagcctaccacgctcctccatccataggattttccaggcaagagtactggagtgggttgccatttccttctccaggggatcttcccgacccagggactgaacccaggtctcccacattgtaggcagatgctttaccatctgagccaccagggaagtctatctttctcaaagagctcgaaatttttatttctcatatctgaaaatgattatgcaagaaattagataattttatgaattcatacatgttaaaacattcaacttcagtctctaatgctgaggacatggaagaaaatcacgtgacagccaagtgtaacaccacactccctctgtttatattttttttaaatgttctgaacattagatcttctttctgctttagaataggaaagaggaaacttgaggtctaaggctcacattactaaattccaagacacgaagaacctactaattacacggagttaaaagcagaactagccttttaagcactgcaattgactgcagagccgctggagacgcagtgaacctctctgtcaatcctgctcattcattctgcctgcacagttgagccccagacacgggaagaggccaggcccctcccaggcccccgttttccacatggagcgtgttccacagtttttgagggggctgaggggggtttgactgcagggatgactggagaaaaacaaagttgctgcacatgagcctttgaaaacactaacaagtgtggagcaggtctgtaacctgctgtgaccccactttgcagggccaatcccctttcccctttccgtgggacacgtgtctgaacctgagccatctgcctcaatttgcacgacatctccagccacaatggcacccagttagccctgacaacagctcacaatacagaaaatcagaccgcggcgctgccagcacgctgtgggccattcaagagcaagccaactggtcagtgtctcctgtctgacaattagcacgggcctcgcacggagcccacagcctcctcagggatctgtttaattaccatcaacataaaagagggagtttatcaggagacactcagaaaaacttccctcccgacttaattaaaatattagccacttaagcaggaagcagattctctttaaatggaaagtaatttcttttttgaggttttttttttttttaaatgacaccaagagctcataatatattagattcttttttttatctttttttttgggggggcggggggggggaggggagtacctaataagccatttttggcctaaatagaatcatgaagatcagttttccaacaattataaaaatgcatcaaaagcaaaacaaatatgctaattttactaagttgaaaatcttttcaacacttttaagccatgttttaaaatgttagctaaaaaaaaaaaattagctaatgggtggtagatgtatttgtgtagtctctccaaacatgctgaagacttgcaaggaatctgatagagcagtttttccactgagagaagcaactgtaagtaagcagtttaggaacagaaatcatagaggtttcataaaagctttgaacatacacacccatctgttctttagatgcccatacaagagattcagaaacgggcacctcagctgcactttttgtgtgtgtgtatgccattttatttttttaattgaaggataattgctttacagaattttgtggttttctgccagacatcaacaagaatcatcataggtgtacccatgtccctccctcctgaacctccctcccgtgtctctccccatcccacccttctagattgtcacagagcccctgtttgagttccctggtctacaggaaattcccactggctagctatttcacatacggtaatgtaaatttccatgccactctctccatacatctcacccgctccctccttccctgcccccatgtccataggtctgttctctgtttctccattgctgccctgcaaataaattcatcagtaccgtctttctagattccacatgtatgtgttagtatgcaatatttatatttctctttctgactcactccactctctatagcaggccctaggccatctgcacctttgggagaatacaagatcacccgccctcaaatgacctctcttttctatcaccttttgcaggcttctgcattccttttgtcccaattttcgaggttcttctgcttcacaggagaaccctatttctgtatttctgttaaacccatgtcaccagatgacagattctaggtggctctattgtctcacctgtttatgcaactttccccacagatgtggtcatcaccaaattgtcattcaacaaatacttcggcagaggtccctatttctgacaggttatcattatgtcaatggcagtcttagcagtctctttatttacttaacacttatgccttgggaccatgaagaagactgtgtcacacattgtgaataggaaggcaaaaagtgctgctatttgactgtcagggctgcacagccccaaagcaccttttatctcttttctattaaaacttaggtttgatgttacaaaaatacaaactcagcagagacaactgtcaactctgatgtcagtctgtttacagagattaaaactactgtcctgttgtccggttacgaagtcctgctcaactctctgtgaccccatgtctacagtcttgtaagtctttttaaaatatttattaccgcaaaattatcaatattgtaaaggatacaaatgtagaagaaaagaggtatttgcttacactgcagtggaaacacgttaagcaaatcatcctagcaaatctgtcagctggtgtgaaagctactgtcttttaactagttctctgtgttctaatgggcacaaatggtagaaacaatgttttaaagcagaggaccagaagatcagatgttctgacattctcatttcacagttcaaaaaggatgaatttaattgaaacacagcatgattacaattggtttgttttggaccatggaaagcagaagccacccaacactccccgcccccacccacccaatttcttaatcacttaactcccaaacaggctatgctttaatgtacatttaaaagatagttacggaaagagtactaattagtaaataacaaatagctagcttgggggtgtaagaaacactgaagacagcttgcttcaaatacttgtatactaaatttaatgactgacatcagaacctttgaacttgcctcaaactaagatcacaccgtgatacaatgtttttcagaagagctgtgaagtttctgatcatggaaatgatgatagcagcatttattaagtgctgtgtgcagtgggtgctaagtacctcacttacattatttctcttgatcctgagtcacatcaattcacagatgaggaaatctgaggcccgcagaagtggagaaacttgctcaaacacctggctagtgaatggctgagcaggaatttgaacccaagctttctgatttgagatgacacaattctaatatatgcaaaatgccagctgagtatttgttttttatctgtcaacagataaattaaggtttttctgatttaccttttatgcatacaatctattattgttctagaactttaagaagaaagatttttctcttcaaaaattgtgcatctgatttgtagtgttctgtaattcaaagcatcttgatttgatgctctgtcatgacatattttaaatttgtctttaaaggttaaaaaaagaaataaatattctcctagaccctactccttcaaaagagacaccagcaatgaaaaatacaaaaccttgaatggagctgtaatgtaaggaggggcaagtggagaccaaccaacctcgaacaccagtaacaccacaaatgagaacaaataagtgtatgacaggtaaagaagtactgcctatgtatgatgggctccttgttattaaaagaataccatctaggtatttttcattttcattctaaccaccaagcacttgttgtctgtaaccactgagaaggtaaaactgtatggatatatttgtatttcatcttattaaatgtctttttgtttattatctctagcaactgacatttaatttttgaagtctataagaatttctaaggtatggcaaaacccactacaaatattgtaaagtaaattagcctccaattcaaataaataaaaataattcctaagatttaaagaaaaagacaaaataggctggttgccaaacctaaatgaacgtatgtactactcttctaaagaagctaatttgtaactattgagaaaatttataactattatgagaacaggtcaaataacacatttgaacaaatatattttctacaatgcatgaacttattccttcatgcacttaaaccgtactttttttagatttgtgagaaaatggctatggaccttaaatgctctttgttggaatgagaaagaaccctgcaactcagttgtttttaataacttaaatgttaacagaacatgaatttaaaaacagtgatctgagaggctgcatccatccgcagggtattcacaaacataagatttttttatgcagaatcatatttgctacgcttaatgcaacagctctaagacatgcttttccttctcttggatagtcttcctggtttctgatttttctattctgagttcaattttcttgtgttttctgttctactggttaccagaagctgtgacaatggcccagtcaggctaaaacttttttttccctactctgtacatgaagccttcaattactgcctgctgaagcagacagaatcctattagtaagaaagacgatcacaagatgcagtgccctgccctagctgtgtaaaaataattagtccaaagttgacaaatgtgtaatgaagtcacacaataattatatgtaagaaatactggtttgaataagtttcctaacatcaaacaccaaagcatgttgatttgtagtatttattttctaaaggatttaaatgataaatccctataattttgagttaatatagcataacatttttaaaaggcagagagtttgtatgttgtaaaaaatcctattttgttgactataaaaatgtaaaagttaagcccactaaactattgaatccatactgagaaaaaatttacatgtgattcaagtttagagaatttatctgaagcaacgtatttttccttattatttttttaaaaaaggccagcaatattgtaatgtttcctttaacattctgatgagaatagttgaaacaaaagaattaggtgccatcataatttaggactctattttccattctaatctttagaacttgtataaaacatgattccccacgctaccctgtcaatgatgtgttctcttttctttatataagaaagctaaaaatatctaagcgcactttctcaagaaagatacaaaacatcccagttattctagagaatttttggtttgtctgtttgttgggggtggggtgggatgggacttaacagaaaaccagagagtaaaacaaatcaattcttaccccattctgattacttacaaaattgtcagccagaaggaaaaccatcaagaatacctttctttcatttttatatgaaaacatttatatattcctatttgtaaaactgttgcattgtagaaaattatctcacaaacagtagaattaaataaaatttaaatatagactatcctaaaacaaaaattaactgcagtttggttatttctgaaatatccaaatacgcctttcgtgtaaaaattaactgaggtccccatttgtttttcaatgaaatgctgctcagagccttcagagatcaaagcagtcagataaaaagcagtgctgccccctagtggataaccaccaaactgagaaaaactgatcacaaaataggtttcaccaatcttagtaatgtttgagattccaatttgtttttgcttttttaggggggccatgctgctcagtttgtgggattttacatcccaactagggattaaactgggccctcagcagtgaaagcaccacagggaattccctctgacttgttatagagtaagactgaagcctggcatctttatattattaacaactgtatgtacaaacttttgttttcagacagatgaagtttggtgactatagtaccaggcttataaaattcgggcatcaagacatcaaatgtcattcttttccatacggtccttcaaatttacccggtatttaaatattccatagttatcaggggaaaagaaagaagacaactagcaaagacaaacagtaacttaaagacggaccaacctgagaaccaaaaccaggaaaacagcgaagacctcaccaaaatataaaacgtatctgtgtcgctcatgtctgtaaccccagcactaacaaaatctgtcacaatggtcttcaaaaaatactgaattaaggagttacacaatatggatattttaggatacaaacaatggtacatgccaatacttaagcattaaacatgtatacacagtttaaggactagaaatgaaccaagttgttctttacaactactctaagtaaaaaaaaaattattttaatcctaaaacaataaacggtctttaggtgtgttgataaatttaaaaagtcggctgccaggttgccatggattcacagttccattcacagcatcatatttttctaatagttaaggacctaagtcataacagtaaaacaatacttattttattaggattgtaattattcacaggttgtacatgttcaaaatttgcaaattaaaaaagtgacacagtaaacaaaatccaaaccatagattaagaaatatagggggtaaaaaggaatgttaagtcctgaatacaagttaacaatgaaagctcttctaaggttttactgaataacttaagaactaaaatagaatcatgacagagacatggctttctgctttcactcaaatatcacattttccccttataaggtcaatttgttgttcatgaaagggtaaaatgagtaggttgtacgttataacaaaacaagtatgttgtacgatacttgtttttaacaacattactgtatatgaatgtcagaattcctgaaactgggttaaaatgtccaatgctgagactgctgaaagacaaacttttacttatggtctaagactgtttcacagccaccactgcaatgtgctcctaaatggcaacccaacccagcattcttgcccacagacagagaagcctgtgggctacagtccatggggttgcagggaattgcacatgactgtggccacgcagctaattcctttcttgcgggagcacacaggacagaaggaaggaaagcttaaaccaaacatcttgtctactggcattccttaatgactaacctgcgaaaaagaaacacacaaggaaaaccgttttttaaaaatacaccatgcggctgtcattaaccacggacttctggaacacccgtctgcagctacctggagtactggctccagtgcagattcctgggcctgtcccagtggccctgaatctcaggttttgggtgtgggtcgcaggaatctgagttttacaaaaactcctacctggtttttttatacagaaaaaccttagagattttgaagggacagatttttcggctttctgcattttgatcattataccttagtttatcagaggacaaacaatgtgattaaggcaaatgcacttaaaaaaaatgcagtttttacactgttgaataagaatctcctttaaaacctctgaatttaatttctttcttagaggagaacaagacattttttctggccctagaaaaacctagaatttccaaggctagtgtctctaatctcccctaaaacatattaaataatcctttaacttttcagtctatttgtatagtaacttactgctgttcattctgctttttgtatatattactttatttgttgttgtttagtcgctcagtcatgtctgactctttgcaaccccatggactgtagcctgccaggctcctctgtccataggatttcccaggcaagaagactggagtgggttgtcatttccttctcaagggttatcttcctgacccagggactgaagatgtgtcttttgcattgcactgcattcccacctgggaatcccatattctttattagtattgttttaaataatatgcttttaagactttcagtgtctcatatgacactgtattatgcgtatctaaacaggacatgaagacatttggctgtatatttagtaaatgctttgattcttttgattctgatgtctatattactccttatcatgtggtaacggtaatttggaaaatagcaagattggcacaatgaccataactctgcagatctcagtaagatggttttattctcaaagagcagcttttttgatatgtaagtacctaccatggaaatgaagatagaaattaagtgttttaatagtatactggttgggtttctgattctatggctcatttagaaaatcaaagctaaatgtcatataatctaaaagtagttatactttttcaactgatctttaaaagtggttaactatacttaaaatgctcctggtttttgaagtgaattccataaaacttgtgctcctttaattgacttttccttaatggaggtattttctgctaatgtattagaagccattttctattatgtattcaattaaaatgtctactttatattattacacacttctgcatattaatgaagattcatttttttattagctaattcttatataagtatttttaaacttggtttttaatgtaaaaaatattcaaattgtaaagcatagtaggaacaaatgatcctaaaattagacaacaggaacttaattcattgaatggtcacaaagaatattctaatgttaattcaaaagtcctctcagaaataaaagaccctgaaaaattaaatagaacataataagtaggccagccaagaataatttaatttcttaaaatattgatggtcaaaatgcttttcatgcatattgttttttttcaagtaattttaaacttattaccattaataaatacaagaatggttttggtactatttttcataaactcaaaaaagcaactaccacagaagaaaaaatctcatagagtttcaattttattatgacaattaatatataagcttagatatatatattcattcatcccacagggtaatacactgttgaacactaccattaaaaacattaataaaatttaataaagtagtaaacttaatttttgttattatgaacagtaattgctatttcattttaaatgaaatgaagatagccatcggtacagattttattagtaattgtttattttggttttaacttactgggcataaaagagtggcaaaaatgttacatttgcaggataataatttttgttattttctctattaaagaccacaagtatcaagacctctagatatttattacctggaagccttctaaaatttaaaacattattatagccatacctaactataaaaaaaaagcaaatgtaaaacattttcagtcagtaggatgatacttttgaggcaagtcaagatagcacagcctgttctgaattagatacagccattgcattctcttctggctctctagtcacttggacttccccatcaagctacagagccaaatgccaggctgctgtgataaggcttcattataaaagtgtcaacacactgcagaagtatatgaatatgaggaccatggaccacgacgtctaagtgcaggcttccctggtagctcagcggtaaagaatctgcctgcagtgcaggaggcacgggttcaactcttgatccgggaggatcccacatgctgcagagcaactaagcccgtgcactacaactactgagtccacctgtggcaactcggagccgctgcgtctagagcctgcgctccgcaactagagagcagcccctgcttgccacgactacagaagacccagtacagccaagaataaaagcataacgttattttttaaaaagtgcaagtgcaatttctgcattccaaagttgaatagaaatggttcctattgtgtacctcccctgtactggtatggataactgagaattgactgtaacttaatcatctgaacaggcattaaaccactctaaaccaccaagacaagttacaggcaaattttgtgctttaattgagaattatacaattgtgttaataagagtctctctgtttcccaaaaggaaaatagttttcatgtttgttggctttgagaaggtattttggctattttcttctaagaaacaaaaatatggaacactctcattgctttcagaaaagttaaaaacccatatacgatgcaaaacaaaattagaagttccagcataaagaagggttaccctgcgttgtttcatctattatgaaagaacatattaaagtaagactgaagtattgctggatactagatgagtcatgtaaaatttcataaagcataagctaaaagttacagatgacatacaatactttggtgttttagtaatttcaataattcaaaggatccataagtaaaacacaacttctgctaaagaaaaccactcaggaaaatggaaaaaaaaaattcaaagaagaaaacaaaacaagaaagacatagagttaaaaattttcactgaaaagtcttctttttgttcatttttccccctattgaataacactgatggataagttgtatttgcatagctccctggtggctcagtggttaaagcgtctgcctccaatgtgggagacccaggttcaatccctgggtcaggaagatcccctggagaaggaaatggtaattcattccagtattcttgcctggagaatcccatgaacggagaagcctggtaggctacagtccacgaggtcgcaaagagtcggacatgactgagcgacttcactcactcaccaacaagaagaccttctatccattttattattttatcatcaacttatgtgagaatgacagggcttatcataaagaaagggaagcagatcagatctcagacggaaggtacatagatctcttgagcaatttacctagtgacctcccttaaaaaaaaaaataaaggcatagggtaaatttgatttgtgactagtacatgcagctttcaatctgccatgatgagtaggtgaagtcaggcaactctgtaatggcagatccagacttgaactcagctcttctgatgtgaagtcagcattcttccacagataacataatttcatttcaatcaccttcctttccctgccatccatttccaaacagatgaggaacttaaagcccataaggagaagttataaagcccaataatggcagagttgagtctaaaaaacccagataacccacagaaatctttctttggggcctctcttgcccctgtattaatttaaaaagatacattaaatttctaaaggtttgaaggcactctctttgattttaaattatttcctaaatgtaatgatggaagtatgccattggcagtaaaatgacagaggaattaaagatagtttgcaatgaatttccttaagctcacagaggactaagtaatcactgcatgtttatttaaggattaattattttactttcatttcaagtcactagcattcgtaaggcaatggcaccccactccagcactcttgcctggaaaattccatggatggaggagcctggtgggccacagtccatggggtcgctaagagtcggacatgactgagcgacttcactttcacttttcactttcatgcactggagaaggaaatggcaacccactccagtgttcttgcctggagaatcccagggtcgggggagcctcatgggctgccgtctatggggtcgcacagagtcggacacgactgaagcgacttagcagtagcagcagcagtagcagcagcagcagcattcgtaagaacacaaagaaggcacatactaatcacgttttctgctacctttgagggcaaataacttggacctcatggtttacatggctggcagtgaagatacttcctggtgtaagaaacagacgctgcatttgaccccataatggttccttgttactggaagcagcctcaggggattgctgtcaaaaggaaatctatacccaaacttcccctcttttaagtaaaaaaagttcaaatccactgctttataaaacagttcttcctgaaattcaccgactgtagtgaagtaagaaattttcaaccatatctcacacaagtacctttacaaatcactaagctattataaaatgcaggtacactatctgtgtctttcaggaaagtccacatatatgtactaaagactgtacaaaatacggaagagggaccttattccaaacccatcaagcaaatgtattatcataaaaaagaaggcatagatatgttattccctggtggctcagctggtaaaaaacgcacccaccgagacagtagatacaagagacacagctttgatccttgggttgggaggatcccctggagaagaaatggcaactcgcttgagttttcttgcctggaaaactccatggctagaggagcctggtgggctacagtccacgaggtcacggagagtgggacatgaataagcgtgcgtgcacgcacacacacacacaaatgtttaggacttaatattttcaaggaaaattatgaattaaaaattatatatttatacatgtatacaagttacctccacatcacgggtcagtgaacatacctgtgtacattatcttgtccagaagggactacacccacattggctacatttactaccttctgaaggatcacagaggaagcaaaattctgcggggcagcaataattgtggtggaagtttcgttcattccagagagcatgcctgtaaaagcagaaggaggctctcttttactgatttctttatgaaaactacattaaacaattttaaattcatagtcaaaatctaaactttctaaagcagaagaaataccacttcagaatgtgatttacaagataatttatcataaaattaaaataaactgcaactgattaaatttttttaaaaaatactagtggtgttgaaaaatgtataaaaatgcaattgaacatcactcttaataccctgattttaaatactatgataaaaacatagaatcacaaagataaaattttaatttcagtccctttaaaatatactcaattaatttgggctccataaactattaagtttttactatttaagagctctccctcctccttttcattcaaagatctttcttgccaaatgctgcctgagaacaaaccaaagtgtttctggaataactagcagcattatatgatgaatgctctcaatataatggatcaaagttaactcaacagtaactggaagtcactgaacagctgtgtggttctaaaaaatggacaagtatctaagctacactgagcggtaacagtatttgcctagttaatgaaactatggttactgacaaagataatcaaaatttctgaagcaaaaacatctgaaaacaaagggaacaatgtaaattggaaaaatttaaaccccagagacatttcaaataatacttaataaagatcacaaacaaagcaaaatcatgaacaaaaaccatataaaactggttataaaatgctgttaatgtcagaatcttatgtacaaatgttcaaaggacaatttcaataacccgtgaaatacttggaacaaatactgacattaagtacccagttaaaaaaaaaaagctataaatgttaaatgccatctatctgattctgtgatgttaagtcactgacatccaaaagtatctactaaaaatgatgatcctttgagacatctgatatgtgtgcaatagttgacaaaatttataaaaaggtaaaagctgattttgtagcctcaaaaggccctccacctttaatttttgctatttaattttgctatttattgctaatgtaacagaaattaaacaaaaaaatccctatgattagtagtatgaagacactaaagcctaacactgtaaaaagacttatttagctttaacaaagaacagtttttactaaccactttcaaactcggggacactatgttctgtcttagactgtttaactttaatattaggcaaaagctttaaaaaccacacaagcagtcaaacactgcttttaaggaaagcacagcggctgctgacataacactgctgagagatgtgtgtactcatttaggatttaaaccttctccattaagctctattgaagagcaactgctgaataaatgaatgcaactatgtttatgttaaaagcctgtttcccgcagcatgtaattaaaggaaatgttgtacaaagccagtacttttgtcaagctcctgtaaatggaaagatggatagcactcagagaagtgaatgcattgcttcatatttaaccttaacactcttgtcattaatggtttgtctaacttggtctgtaagagacaaggtactgctccattgaagtaaaattaaaaaaatcaactaaaccatgcttttcagaacagaagattcattatcgtcagctaatgtattggcataaagcaaagtaacatcctatcaagtaaggcacacattcaatctgccttcccacccccctttatttttaactcatgctgttttattgttataggcaatttgtaccactcagcatgacagtgtaaactgaatcaagattaatttacatgcaaaagaacacttaggagagcagcatggtaagcaaatgtattgtctcgattgctgaggtggaaaaagaacctggaaagaaaaaaaggtgctctaattaaggggcatcaaatatgattgcttgtggtggttaagggccagaaaatagtaaatgtctgaccatttaaagaattagcatcttgctagctaggaacccataagatggaggcataaatcataataaaattgagtaaccattctaggtttcttaaaccagagattttttcctaaatgaaaatatatcaggtattcttaaattaacgaaaaagaaaaatatgccaagatatcattaaaagtttcttctacaaaaacactctttaaccactatacagcctgctcatacctaatgaaggtcaggtaataggaagaatgttttaaaattctcagactgcagaatatgctgcctcattaaaatttacctcattttggtgaggcagtggacagcacttaggttaatcagctgtaacggactgctgaaatgtaaataaaataagagaagaagatctaaaaaattttctgaatgttttagacttccgatttaattcttaagcagaaagcaaataagaagaggaaatttggaataagcactttccttgggtctcacacaattaaaactgcttcaacaaacgaaattacattttcaaaaataaaacatctcactttatagtactaaaatcatcccacagctagatcatgaactaactttgcaaggatcaaaattcataatgatgaaacaaacacgccttctggttaagactcataatatgaatactctggataacttcaaaatacagactaaaccaatcttttgtttagcactttgaccaccaaccttataaaaacgcacgcctggtcatggaactctaaaggcaacaactgaggaaagcgacagatcctgctacatactagaagcaagacattttcgctttagaaaatattagtctaatatgtacaacctgacagaagtattcttaattagcattatatacatttttcaaatatgcacatctgtagtataaaaatagaatcatattcctcatgtttttagtttataatttcttcagttaaatcctagttaatacagttaatacatttcttgagtcttgaaatttatgccctgtgaaatgagatattaagtgtataaattcattttatttaaagtagaaaaaccagttaaagctagcatgtaatgacacacacagacatttcttaaatttaccggcattgataaaatctgaggaaactgatttttattctgatttagaatttccagttaatgagtcatttctaggtatcttctgcaaaataagctaagctcttcctagagtgatgtaagaaacaaatacatgtgtaaagttgagaattgagacctctattaccaaagcagctgaaatctagaactaaaacgatgctattgaaaagactctttaaacctgtggtacatttgccagcatcaagtcccatatcaaagaatgaattcaggaagacagaaagaatgatacagaaatgccgagagacttgcaaggatttacaaatacttcatataaacaaattttcaaatagctttattcagagtagcctttctgctctattaaacatagcaaacagctgccagatttattcagacaaataatcaacaaccatagaagtaaaatggcagaagaaaaaggaattttggcaacaactccacagaggaccacagctgttctccaagcacacctctctcacgcgattacggttctgtatggctagtcagggaagaaatccctcagtcacaacagagcataaaaaaacttgatcaagtatcaagtatatattctaaaccaaagctgaggaagagaaaaggtatacaataacctactgctttagataaactttagctgcacttttcaaaaaaggactatccccttcacaataaacgtgtcaaggcttactcagctcctgtgtgccactcacctgggtttgctgagcaggtgtaaagcagagaggcaggctttagccagcaaagggtaagaatagcaaatgtaagaatcaattcaatttggcaatggaaaaataaaatcacagatatgactttcttctacagcaaaaaccaacttccaagaaaagtaaatgcaaagatggatttagtcactctttatcacttaaaaataaggcagaagaataaaagattaccattaatttacagtcttatttgagagtttctttgtgagattcttctacaacaggtcttctggacactgaactgcaaaggttcacggtaaaaccaaccaacctctggcactataatgatgcgatgccaggaagcaagcccttctccttaggtataggtatttgtgggcgcctagtacttcatgaaagcttgacaggtatgaattaatgacctcaagatgaagggaatctttgataactccttccaaagaaaaacatagcccggattcatataaacttaaaaaaattgctgactatactatttaaatacatcctggctttataaatgctattcttaattaaacacatagaatgaggcagttgtttccccttatttatatacgaagaaaattatttttaatagaaagtatgcttaactctgggtcaagtccaagatagtaacactttcattctgctgaaaatattttcttttttgttgcttattttaatttgcttcagctctgatacagtcttacagcataacatttctttaatacagaataaggtcaaaagaaaatagagttattttaatattttaatgctacaattaggactttattttgaaggacagggcactctaacagggaaaaatattattagcagaacacaaaaaaacagtcctatagtgaaaggaaatacgtacacataacacgtacggtgatgggactttgctaagtcctaaattcctgacattttcactaatacaaaacacatgaatacatcattagattgataagccaaaattcccaggactgaaaagttaattaagaatcaatttattatttaaaagacacagtaatcaatttttaagtatgccagggatgcagacaaacatatacctttaaggctactttataaacacaaagcattagcaaaacttggaagattgcacactgacatctgttaatagctatgtgcatatggtaatttattttagagctcagccagaggaatgagcacacttatctgggatgccaatttctagtaaatggtaatgatctctcaccttgctccttcttaaaatctttctctgacatggccacaggtaaaagcagttctccaacaggaggctgaatattaacattgaagcaatcatccttggtactaaagaaaaaacacattaaagctgactaaatgcttaacaaatagacattcttcttaacactatgcagttaaacaggtacaattaaagcatataaagatgtttgccttaaatatcacagctaaaaaagcttgaaatatttctcatcactatttgcaaagaaatacatctgttatctcaactggaaagcctattatttgcagttatgataaatatgccatttgacataggacttttaaaaacaggtaaggagcagaaacacctaatgcaacttaccaaatatctatgcaacttatctggtagataagtgaagtgaaggtttccctggtggttcagaggttaaagtgtctgcctggaatgcgggagacccaggttcgatccctgggttgggaagaacctctggagaaggaaatggacaagtgaagtcgctcattcgtgtccgactctttgcgatcccatggactgtagcctaccgggctcctctgtccgtgggattctccaggcaagaatactggagtggattgccatttcattctcaactttgcagtaaaagtgtacaaaatggagtgctttagtcttaaagatatctttttaaagctatcgatttttaaataaagaataaaatggagtgaccataccgtgttaagatgtgtgctaacaaaataataccaagtgttaataagtgtttatgcactataaaaagaaaacctgtacaataatattaatcacagttttattattaatagccccaaatgaaaaacaacccaagtgcccacggataatagaatggataaatgaattgtgatacagtcagtgagatattacctaacaattaaaaaaaacaaacctactgttacataaaagatgattccacagacctaaccttgagtgaaagaagctagaaacaaatatacatattatatgataccaaaactaactcatggatagagaacacagaattgcagtcacttctacagaaaaggtggtatctatggggaagaatgggagacctttctggagggctctagatgttcaaaactttgatttggtggtacacataaaaattcatcaagctgaacactgaagttctgtgttacagatgaagttattcttcaataaaaacaatgtcatatataaagaggagaaaagcaaagagtaaataaaaatatttctatgcaagcaaaaaacccccaaaacccaccaaacacaaggttaagaaaaacagtttcttgaagggtggggtagggataaatattaaaatataaggaaagagaagaaaatccacttcgattttatgctattattatatactataatcttctaagctgccattttctttaatggaacaaggtaaggactagactaacaaaaaaaaaacaaacaaacaatgattctgaattattcacacatggattgcccaaggcaaatcaataaactcaatttatttattaattcaataaacatttactgaatataaacttgatctcatgtactctctgagtgtctggggatttaaagacaagtaaaattggcccttgaagttcacaagtttagtgacagagaaagagttcaattatgtttataacagaaagataagtacaatgttagagatatgtggaaagtatcatagtccaaaaagaggggctgattaattctgcaggagtgagctagaggtacgtttacttccaaaaggagggagagtgacattctacggattctagatctatattttgggaatggtgagcagaaggtgtgtgaaaagactggctggggacactctgcagagaacagcacacacagctgtgggcccagttccccatggcagctgtcctgggaccttgttcagatcacgtcttcctgtcactatctgaagtgtcctgatctgtatgacaaagtatatgattactttactctcataactcaggccagtgtgcttcaaagtatcctgggggaaaaaaaaaggaaactaccagagccttctgacataggaaaataaacaatcaatcacatatgtatgttatagcctgtgccggccctgtatgaaggtggtgtacaagagaaacccaagccagggagatcagaaggagacgaatcaacagtccaagcaggggttttcagcactgactgtgcgtgtggcttcagtgcatcctgacagtgatcctaagaggtaccctctgttacccctaattcaccaagagaagctaaacaatatgcccaaggtcacacaactagtatgaaggtctgaacacagcagcactgaaatgtgaaccgaggtctatcctattccaaagtcagctatataatgtttgctgccatatatatatatattttatatgttttataaaatatatatatatattttatttgactatacaaggctgcttccctgggaggaaacgcggaagacaggggtgttttagagttaaaagggacagatgcagtgatggacgggaggaagagaccttgaaccatttaacgtgaatgactgggaggatgactttcttcaatgaagaggagtttggaggattaaacaaaatgatttggattaaatcatgagtacccctgtgtcactaaggaagagatatttagcagataactagaaatacaaatcatgaatcagaaaacaggtcagggcagtacacatgagtttagaagcaaccagaatgtacagggaaggactgaagccttttaagtaggtaagatcgcataggcaaagaggatatgccaagaaaaaggataaagtggacacctgcatgtaaataaaaacagaagtggtacaacttgcagaagagaattggaaaaagagtggctggggagaaaaggtgtgagtcaaaaactgcagggaggaataaaaaggatttttagcaatgcagttcaaactggaggaagaatgcaggatgcaatgagctgaagttcagtggaaagactggcagcgaaagacgcgggaccgggagcagcagaggcttcctgaggatgcagaggcaaaagaaaaatgcttaaagcagctccaaagtaattagaggttggtgcaaaacagacagagagaggtgttacccgaggtaaacgagactgggatcaagagcataagaactaggcgaatggatcaggcctggaagggagggagatatttcttccaaaaacagcacagatggagtccttaagatagaagtgttgagagcaggatgctcgaagggtaagagcaggctgaggtactggaaggctaagccacattaagagaaatactcagaggctgatagagtagtaaatggataggtatatatattatgaactaatttagtgttaaatataagctcccagcttcaaataactagataaatcagtgcgctccgaagtgggcaaggacatggcactccactgaggcagaaaatccattgaggaaaacaaaactatcaatttatttttttctcatcccatctgaagttctatttttgcttgtacataatacttcagtatatacataatatgtttgcatagtgagacacacacagtacatatcgggagtgtgtggtataaatattttactaagatgtatacaattttaagagttatggccactgggttaaattacacatactatactatctttacttgtgatttcttttaaattatagatgaagtgacttctttccaacactcctgaaaaggacccctagacctcttggttaagcagctgtggggcaccgatgcccagggagaagcgggcaagagcacagaaagaaggggaagtagagctgccttctaaggcatgtatggaaatcaaggtggctaaggagcaggcttcaggctagcgggggtaaaggtgactctgaaatgcccccacaagcaacaaccaatgaattagagatgaatatacatgattcagcttgactggatatgtttcacttctgttactttttgataatgcatattttattttattatatatttattatttatatgttacgttttatttgtatattatatactttattcttatatttatttcattatatattttattcattattctgtgattggtaaaatgattaccatgtattcacatatgaaaaactaaggctgtaagttcatccacaatgggtcttgtggagcaaataatgtaatgaagttggaacacggctgcggcagacacttaactaagtaacacttttctttttcttctttcctgagatcatcctgagtctcttcagggagacaacgtgcccctgcacatcgtctctctcagcctcttgtattaatgacagctggactgatccagtgacccagttatgaccagtgacgcctggacagaaggctgctggggactcctgggaaaggtctgcttttccagcacacacgggctcctccctcccagtcacttcatttctttgttggggggagggggctagaatgcagatggaatcctggaattacagaagccatcttgtgacccctaggatgactggcacttgctaatgaaattagctcatggaagaaaaagttgggaagatcttctactggaaggcacgcggagaagccgtggagacagtctagctgctcttaactgctgaccggagagtaataaacaaaaccctgcgtggtgaagtcactatagacaggtttctgttacacacaaataaatgcaaaatctaattaatataactagtacataaaatactttataacccagtcttagcttctaagcaagatttggcttagtagggagtaagaaggaatgtttcctctttattttgggggaaaatttactttcgtttatattagtcatttaggatgtcctccagagtttcctgtgatcctccttttaaatattttgtcttttaaaaaaaaatgactctcttctctctccttatagttcttttcttttgccgtcccaccttttcttctcatctcctttggttgaacatggggctaaacacagatgtcttgacatagataggggaatggtgaaaatgagaaatggcagatgtaaatttaatagaattaacagattaccagattgacaaggtactaatacgaggcagctctaaacagcctagttacaagggatcagatgatgtaatagtttaatgtaagacaagattctacctgttctacaaagaactgtaatgcatatacttagactacatacaatctcatttcacagattcctaggatcaaaattgtgagactcaagtttccttatctatgaagtaagaaaaatggcacttaaccttgtaagctagcttcgacaactaaaggagttatcacaactcagtttagtgcttaatgcatagtagatacccaaaacctacatacctaatagggatgcaatcataatttgtttaagcattcccccaataattctcatttgcaaattttctctaatataaacaaagcttacttaacactcttagatctatttcttcatcacaggttaccatacttccccacgcctgacaccctaaaaatgaaatcactaaattgaagagtttagtttatgaatatttaatacatgataaatactgccaaactaacctaaaaaaaagtggtaccaacttgaaatcccacaaacagtaaataagaatacatatttttctgtaccttccttgtcaggcattaaaattatttaagaattttgcaagtcttcttctatttgaatgaatttttttaaatttccctattaccaatgttgtatatattattgttattggctttctgcatttcattttctgcaaatgaactattttcaaactttctccaccttcatattagattcttttatattgaaatttgcgagagttctttatatattctggtaactaaactttcgtttgctaaaaatgctgtaatactttctcactctctctcacctgttataacatcaatattttcttcttttgtagagaagcttaaaagtttcaatgtcactttttctctgtatctttccggatattgtgtcttgcttgaattttgctcgctcccccccctccacaaagagtataaaattatttgtttatattatttctaaatactttttatagtttctatgattaaataataaatccatctggaatttactttggagtaatctgtgggaagaaggttttttccaaaaaatggtccatatacaattgacatgaaatctcaccctaatatgaaatgtcaccttcatgatatacaaaatctctaaattgttttgtttcactaactcctgtgccaatagccaattacactgaataaaaatattcttgtgaccttaaagaatactttgaagttattattgaaaaagggcttttttcataaattttttgttttgactttacttggacatccttttatccaggtgaattttagaaatttgtcaaggtccttgaaaaggtttactggaatttagctcagaatcacagtgaatttaaagaccaacaagtgggagagtccgatctcccatttaggaacacaggagatttattacttttatttatatcatctttttatggccttcaggaaagtttcaggtttttaaaaaattcccacataggtatcatgtatttcttgttaattgattattccttttgttgttcttataaacagaataattttactcataatgttttaaaattggtcattcctactatatggaaatgctaatgattttcacataatgattcataccattgccctaaactcattgattctaagactttgtgggttggtaattacatgttggatagaaatgataatcttttgtctttccagatttatacctctgactatttttacttgtcttttttattggctagaacttccataaaaatctgaaagtgctgaaaaagagggtaaaactttgtttttctgacttaaaagagaaagcttctgatatttcatgtggtgataggtaacttgtatgtctgataataaacacacacaaatatacattttatttttttattttcaatttttctgtggcaccctcttttacgtggggtttttataaatagtatctgcttaattgtgtttttacaagctcagtatatttccacttggaaatcaacttatggacctgaattctgataactagtatgtgtggcccctttcagtcatcttattttgttttgtatttactatgcttttttcttttcctgctttgttaaactggtcaagttttaagcactccttttcttctttcctttcgtcatttagatgttataagcatcatatttctgttaatttagaggttagctttaacattttaaaccatatttaaacttctttttgccatcagtcaattctcttgtgaagcatgacaagaacaccatcactcctcctcatacttgttcatgttgagatttttttgccttttttgtttgtttgggttttgttttttttttttgagattttttttttgttccagatcattagtttattttttacattaggtatgaacaattatttttacatatcaatggattttacaggtagaattctttctctatttttttattctatttttctctgtcacagattaaatttttttttttttactaactgtatctttgagtaatcctttcaagaaaaggtcgttggggggtaaactgatggaatctttgcttttctcaaacatgtccatttggcttcctcaaaattttcaaggttatgtcctttgcctctggtcaccagaactgatgacgctattgaggagaaatctgattccattcacatttttgttcatttttaggtaagctgcttttcatctctctgaaagatactaaagtggttttctccttatcaaaaattctacaagaatgtggcctttttgctagttgttcacattcatcctgtttggcctttgatggggcctttcaatctgaaggcttgtacatttcacttgcttgggaaaattttctcctctaatttctgtatttcttttctccattgtctctcttctttccttccagacctattagatgaattgcttcttttaacttttctttcatattttccatccctgtctttttgccttctgttctacttgatttcactcactgagaccctcttatagaatactaaatcagacttcagctgcatccagtctatcatccacctactgaactccttttggaattatgtctttaaatccctaagaataactttaaattgtctaattactctttctcaaagtaagcaataaattcttgctttatagattcctctggaatcagatagtagttataatttttaaagatatcttgtctccttctcagattgtctgctcccttcatgactggttagtctttgttagtcattttgagccttccctttcaaactgatgcctttcttgtaaagtctggtcatcctaagctgtctgtctgtatttataatgaaggactagctttgattaatgaacacagcaagttctgcatgttagctataagattttagataagttttcttcctatgccttagtttatttatctctaaaatgggatactactactactcacttcataggaatgttctgagaattaagtaaattaacacacacaattccaagtgtttagaatagtgtgcagcacgtagcactactccatacatgtgagtgagtggtatttctatggatctcttccaccctgctgggctggctggagttttcttaagtgggtgagacatgactggttacctggtcgtgaagctgggaggcaggtaggcaatggccttatctctctaccaacagatgcaagattggctttatcctagtgtagatgacttgagaatatccttctcttgggtagaactgcatttcatctcatctttgactatcctgcttccttcctataaactcaacccttgctgctctcgtaggcccccacattcttaccaaaagtccttcccaggcaagtagctgttcactttctttacaggggaattcttaggtctgattaaatgtgtattctgcctgctgctaggggaagggttggggaactggggtttggaagtagctctttacttccctaacactgtctcaccctcccttttcttttcacttgttcactttgtgtttgagattctgccagctttgttcttaccattatagtattttctcccataagtgctctgctccgtggtttttattttctctgttattgtatatctgctcccatttgctttctaactgccaataattcttcacaatttctggtcagctaatagcactctttctctttttagtgctcattttctattaaagaatgtattttctgactttttaatgatttggggcaaaaagaggggtggatgttagtgctcagtcctctaacttgagccaagccatataagttttcatactagttaatacattaatatctgctggtaacaagggtgagacctgtttatgcactgcatctacttttagaaagacacatttatgtatattatacacatttaatcaaggacttaatttgatgaccatttaaaatgcaaagccaaagaagagacattaatacttaccaagtatccatataactatgcagttatatataatagctttatctgtctatatgtgcatcatataacaatacagagagttaatctagaagctaaagtaggatcatttcacttttgttccttctctataaataaacagaagagtacctgaagggctcataatccaagttctcagtatttctgaaggcttcctatcaaatatgctcttattacccacaattttatatattgagttggattacatattttgaaggaaaaattcaatatcagccattcttgctttcccctccctttttattgaactaccaacactaatacagcacatcactaagcaaaaagtgctatttactatgcaaaaggcacagtcagtgactggcatctaagaccaattgatctacccattaccattatctccctacctccactagcactactatgaagctattgatttaaacactgtcgatcggtttccattttctgattttgggcaggccaattaagaaagtgagtaattgtgattacattgcttcaggatcaattacatttgatgtaagacaaagtgttcttttggaatacacacaaaaataatttttgatatagtatggttatgtacttaatacaaatctacaataaataactaattcataccttcacaatagaaaaacatattaatgcagatgcttataatagctaaggctattttctgtctaaaacaaattaatcattttcctaaaattagtttaagagaatctgagaaaaaattattcatatatactttccaatggaagatagaaatcaaacattatctaaatacttttccctaaagagacttagttaattgtcaaagacaagatgtaaatcttatctaatgaactaaacagaaaatctttgtagtgaaaaaatatttttaaaagcccttcactgcacaaatgtatggcaaaaaccactacaatactgtaaagtaattagcctccaattaaaataaataattttttaaaaaaaggtttttaatataaactgaagagaaaaaagaatttttttagttcttaattttgccctaacttagtgcataagctttgtcattgggttcacattgtcgaaatcattaaaatgaatatacctctggtgttggaggcaaatctatttagagtgatgttactcatagtcttgtgctcagtaatattgatctgtgttgtttgtctaatagaaaaataataaacaattactaggcaatgttgggaaaagtaatcagtttttatatatcactaatatagcagacctcccaaaacataaaggtgataatctgcataaaatcaatgtgttatgctacattgcttatattcatcattgcaggttctcagcaataaatggtataatattaggcctgacttactagtattgaaaaggtatatgaaaaagaaagattcattatacttaacctataaacttatttaaaagtgtctgtatatttcctaatctggaggtttttatcataacaaattctgttagaagctacctaaaatttagataaataaaatgtctcaattcttctcagaataagaacaaaggacttcaaatcaaaataacaaattatatcttaaatcagaaaaatataaaagaaatgagttcaaaagataattcttaaagacacacaaatacagctagtttgctaacagtttctggatttcatcagaagtgtataaaacattatataaaacaataacaatgaaaaatctcaatcctagaaaagctctttaaaatagtattcacctatgaaacctttgccaactgataaatgttctctttcgaatttcatcaaaaagcagtttgtaaattaaagtgaaaagggaaaaatgtattggtttttggtactgacagaatcagtaatcctccactttaggggcttaagataccatataaaatgtttcaaaaggtatcttccctgggctagccaacaatattatgaaatttaatttctcctgagttctcctcatgaattttctcataaattttacaaaaccatagagataagaaaaaaaaaaaagaaaaatatttagcaggctctagcaaactgactgtgtggatcactataaactgtggaaaattcttaaagagatgggaatactagaccacctgatctgcctcttgagaaacctgtattcaggtcaggaagcaacagttagaactggacatggaacaacagactggttccaaataggaaaagaagtacgtcaaggctgtatgctgtcaccctgcttatttaacttatatgtggagtacatcatgagaatcgctgggctggatgaagcacaagctggaatcaagattgccgggagaaatatcaataacctcagatatgcagatgacaccacccttatggcagaaagtgaagaggaactaaaaagcctcctgatgaaagtgaaagaggagagcgaaaaagttggcttaaagttcaacattcagaaaatgaagatcatggcatttggtcccatcacttcatgggcaatagatggggaaatagtgtcagactttatttttttgggctccaaaatcactgcagatggtgactgcagccatgaaattaaaagacgcttctccttggaagaaaagttatgaccaacctagacagcatattcaaaagcagagacactactttgccaactaagatccgtctagtcaaggctatggtttttccagtagtcatgtatggatgtgagagttgaactgtgaagaaagctgagtgctgaagaattgatgcttttgaactgtggtgttggagaagactcttgagggtcccttggactgcaaggagatccaaccagtccattctaaaggagatcagtcctgggtgttcactggaaggaatgatgctgaaactgaaactccagtactttggccacctcatgcaaagagttgactcattggaaaagaccctgatgctgggaaggattgggggcaggaggagaaggggaagacagaggatgagatggttggacggcatcacggactcgatggacacgagtttggataggtgctgggagttgggtgatggacagggaggcctggtgtgctgcttcatggggtcacaaagagttggacacgactgagcgactgaactgaactgaactgatgttgaagctgaaactccaatattttggccacttgatgcaaagagctgactcatttgaaaagaccctgatgctgggaaagattgaaggcaggaggagtaggggacaacagaggatgagatggttggatggcatcaccaacacaatggacatgggtttgggtggactccgggagttggtgatggacagggaggcctggcgtgctgtggttcatggggtcgcaaagagtcagacacaattgagtgactgcactgaactgaactgaataaactgaagtttaactatgtatggaagaaagaaaagtgttagtcattcagtcgtgtctgactctgcgacgccatggcctgtggcccatcagtggactgcagttcatacagcagactgtaatggctatctgtgtaacaaatactaaaaatacatatatcacatgtaatacgtgcaactatttcagagcagtctaaatactgccaaagaaaaacacgattgtgtaaatattttctctcatagaaaaagcttttgaaagtcttgattttgatctgctattgtttatagtaacaagaaacacagaacaactgaacttaccacaactggaaactggcagtctgagtggaatcacaaaagtcaatacccattgaaacagtaatggatcccgcaggctcaagagattctaggaaataagataatttagacatgaaaacacagaggaagtgaaaaagaggcaaactaaacactgaaaacatatgtaatatttgtggtttggttaaaatagtcaaatataatgataatttgtaagaataatttgaaactaatggtattaaagcaaattataaagtaatttcacctcaaggctttgtttttcacaacttaattctgcacataactacaatgaacatattacatctatttgtttcagaaatagagctcatcctgagaaattccatgttttacaattgtgtcttgataggaactgaaggtgagaaggaaataaatgttttcccgtttcgaacatctgtactagactctgggttttacaagagattatgtacttaaaactatgaaatatttagtctagatatgaaaaatacattttcagcaatgtcctaaattttcacaggggaaaaagtccaaaatttaaagcacgcaaattaaagcaaagttggaagaagaaactgacttgtcctcaggtattactgaagataactggcattatatgaaccaaaatagtaagtctaattgtattatttgaagaattactcaaagaaaatttagtagcagattatgttatcttgaaaaaacgaattataaaatgacattttgtagatgtgtaatttctgaaccttcaactatcaactaatcaagtgtgggaaataactgcttcaatatacagtactggttgataataataaaactcaagataaacaataacacgattttacactgcttatggctccagagtcaaacagtaacactatacattagaataataagggatcttaaacatatacctatttagtataaatatttgtatatattctatatttaaatagaaaccattcgcttttgacttctactttgtttaaagtctccagtataactgtggttgtattgttagctgcattactggatataactatattttagcaatcacacaatggtccaatagactgtgattatcctagggcttgtgataggtataatttcccatttaatgctaatcattacagaaatcatggtacaggtagaacaaaataattcaataagcttaaaatattaagaagtatttttatatctaaaagcctaaatgaagattaagcactgtaagaaggtatttgatgctgacttttaaagtgctattggtgtgctgattctagttggaattccatttatttgtaaacctaacatttaccaggagggtatgtaagtaccccagaagccttgctacttaatctttgacaaacaggctttactgtaaatactacaatgatagttttcttgcatttctcctaaagcctaaaccttatcagttcacagctatcagtcacactgttcagtgctcttcttcactgaatccttgatgctttcttctgtgccacagatatactggggtttggtcttgtttgcacctgacatcacattggtagcaaatgctgtcatctccaaaaaacgatggcactcgggactacatctttctatatcatgtatcctcatatctcatttgaccaagtgacagttcttaggatgccttgatgatgtcactgtctgacacagtttcataacatcctcagtcttaattaactgagagctgagtgccatactgattctggaggctagttcatgatcaatggtatgttttattatataaaagcttcagcagcagaggggcttccctggtggttcagatggtaaagcatgtgcctgcaatgcgggagacccagttagatccctgggtcaggaagatcccctggagaaggaaatggcaacctactccggtactcttacctgcaaaattccatggactgaggagcctggtaggctacagtccatgtggtcaaaaacagtcagacatgactgagcggacatgaattcggacactttaactttcaagagcaaagtgatcagcataaaattattcatataacagatttttataatatttgaagcctactataatacattggaaaagtttattcaggcaggggtctacagttgaatactggttttgaatcatcacaatagacatgagagggttatgcagaaatggctgaaaaacactggttctattataccactatattaataatgaaaaatgaaatcacacaggatgctgtctactatgacggggcagttgtgtagtaactagtgaaatcttagctgaactcaaacttgtcaagtgttaacatagagttgctgaatatagtgcagagagcctaaggctactcttttgggggggtgtgtgtgtgtgtgtgtgttttaaatttcctgtgtacatgtacctgatctttgtgggaaaatggcactttattcctatcactcttgcaaggaatccagtttcatgctaaaggaagggcaaaatcctgacaaaaaagttttctcatattacagagaaaaagagaacagactggtgacaaataagaaagtcactgactccttaacatacatatatgtgcttattaaagaacacaagtatcttcctttatttcacaaaaatatgaaaatgcagtattttgttgcacccttaggatgtttctggaggactaattaagatatatcatactctgagctctactgttatctactgtctgggaatctatactgcatgggaaagagctctgtatcttgagggtatccagtaaatgccaacaaaatgaatgaaaccctacggtcaggaaatctgcctaagaaaagaaagcctattactagtacggaggcaatgatatatattcatattttattttgatatgaaggccatactctgaaatttattatatttatttcttctattctacataggccaacaaaaggtcaactcatcaactcattatgccagctcaaagaaacgttaatactgttctactgttttaacctttggataacattttcaaccttcagacaatgcatatatcagttgcttgatgcttcttaaagtaactttttaactagattaaaaaaaagctggattgcaagcaataaaaaaagaacacaaattgggataatcttaattccttgacaatatgttaaccacaaaataaataagaatcagcacactgtattctttaaatggtgtcttaattaccaaattatttttttttaaggatattaagtgggttctgaaatcaatttactttaactctacttctctctactttggctgctaccaaatttcatctaaatattaggaactttttatatctttgtggaaaaaatataacacaaaggatgattttttaactgaatgtctcattaaaatgacagaggagagaattcaacaatgtcaaagagctcactcaggcaaagatggagaaagacagaataactatatgataggaaataatgagtaaagaaggtacagttacctggtcaaaaggctttgctcacctcaagtatcataaaaaaggaactatgtagacctgattgtaacacttcaaggattcaatgacagaaaccttatatcacttttaattaaggtcttttctgaagcttctttcaactaaactgtaggactgcctccactcacacacaatcaaaatagagctaaacattctaactactgtaccatttaaaaaattcaaagtaagccatacaactgttacacttaatgctaagaaggtgtatctcctgtagcagctggggagacagtatgatgtaccgggcccggaggcagcctggaaggcgcatggtacacagcaagggcagcctactcggtgtcagctggttgtgcagcaggtggggataaagcacgggcaccgccatactcttgtgctttatccatgaacagcgagatttctgggttcgtcctttagtgtgaaaagatgctgatttttaaatggtggcaacagattaaaacacatgatgtgtgaaaataccagtgggcgtttctgccttcagaaacataatgtgggctttctgccttcagaaagaggaaaacagaattggtatacatcctctcagtctttctccctttacatttcaatctacagaacgtgaaggaaaatggggaagaaaagatgcaggaggtactataaccaaaagggaaagtaaaatcatgcagggaaggaagctgaccaggaaaagaggtgggggtaggtgatgcaggtaggaaaaatgcaaagcaattttgattctccagaaccattctttcatcagtactggttatcaccattgatggcacctgatttgctaaggcaaagaaatatatttatcttatacgataaatttggtttaaaaaggaaaaactaatgttgggttggccaaaaagttcgttcaggttctaccatgccatggtaatgaaaaacccaaatgaactttttggccaacccaatataaaccgagtttggtaaaaatcaataaaataatatgtattctactttatttaaaaaaaaaacatttatcaaatatagttaaagcaataaatgagaattaatatttacctattggattaaaaacatgcatttgcatgcctataggaagcttttttccccctacgtggatattttctatcttctgatcagtggtattattcagtgttatttgcacagagaccatcttatcaccaaaaatgcaaggctgtcttggaaagaagtaatgggcagcaagtcctttcccactcattcgatgaagcagcacatgagttttccctggtacaaagacaggagtactgacctattgcacattggaaaaagaaaaaaaaaagtgaattagtgaatataattactaattcttagaaaatatgtaaaaattcataacatttaactcctattttccctaaagtattaaataaatcacaataagatacaatagtagggtactgcatagatagatatgaagtcagaaattataaaaattcttctgtactctccaggcatatattaaaatattttgataatctacatctaaaaaagaagagaataattgcagttatataaatatatatatctttcagagtttataaactttattttcttcctaggtatattttggacattttgccaattttctttttatttttaataatttgtcttttgacttccttgggctttcaaactataagatataaggcagaacttatatctgcctataagttcattataggcagattataatatgtttcattatagtagatacttacactttcatttccaatcttgagtcctttaacttttttcatcttgaatttctttcactgtaaactaaggactataacttcctttttaagtggttcttcctttgctttaatgattcaaagatttcccctgcctcaagatcaggttaactattcatttacattttcttccagagctcttatggttccaatttttcaatttatgaggaactaatttaggtagagagtcccttggactgcaaggagatccaaccagtccattctagagcagatcagtcctgggtgttctttggaaggactgatgctaaagctgaaactccaatactttggccacctcatacgaacagttgactcactggaaaagactctgatgctgggagggattgggggcaggaggagaaggggacgacagaggatgagatggctggatggcatcaccgactcgatggacatgagtttggatgaacatggagttggtgatggacagggatgcctggcgtgctgtgattcatggggtcacaaagagtcagacatgactgagcgactgaactgaacttaactgaatttaggtatatttactctatatttaatcattttcctccaaatacttaacatctgtacatgattcaatgattagcttttcctcaattatctgtaaatgcaaacattctaattatttagttggagacatttttgaactttgatagaactgctaaatcagtaccacactgtttcatttcttaaagccccacaatatgattcagttgtttgacaaaacaaaatgtccttattcctccacccaccccgcccccctgccaatattttcttggctaatcacctgtttttgtttccactgaactttagactctgagctaaattcaattgtgactggaatcaatggcagcatatgaagtaaaaataaccccatctattctaaaatcataaggtggctgtctttcctttcaaagtactgcatgtgacttgacataggaaggctttaaaaacaaacaatttgtaattaaacaggcccagtcaagatctgttcctaacaagtgtactctctcaaactagatttcctattataatttaacctgttcaacaggttcaccatgccactgacatctgatatataaaaagcttagtaataatactaatcatttaaaatgaaccaacaaaaatctaagagttaaatagaaaagcagaagagaagcaggaatctggagctataagcagccaagaattagcactcttcatataaggttctttgaaggcaggccttatgtcatttaagagctatcaacttgtctgagttggtttattgaattctctcaatctagttctaggacacatggtccactttgtctcaaaattctgcacctttattacgatagttaaaatgatgctaaagcagtgtgcagcaatggaataaaaacagtgtaattgtcttcactcattctttccacactcagccaaattcaagaagcactctttaatgaagttagcatctaaaaaggtcctctgtaacaatcctccaagcttatctatgataatgcaaaaagcctacgttttctttcacagtaaatagctcctaaatggcatttagagggtaataatacagctttttttttttaactatagagatggactaaatgagaatgactattttttctaacctattttctaagttcatacaagtcacatttagtgaatctcctctaatatcttaactacacagatgatattttgttcaagaaaaccagtaggttccataaatcctttgccaatttccacatgtagtacaattaatcctgacaagaaaacaaggctttagttcaacgttttgtatatcagactagttaccgacactccagaagcacacatatggtctgcaggtgcttacattccaagatggcttttctgactttacaattgataaataatgattattttcctaaatgttaaaacaacagtaaaaggtcaattaattagagaatgacctaggctgcggctgtgaaaatgaggatttaagtttaaggatacttgaaaaatctgaaccaaacagaccatctttggctcacaagccaaatatgacctgctgccggtctcgttaagttttattggaacatagacatttgcattctttgacatactgtggatggttgctcttctgctctacggtggaagagctgagtacttccaacgcctaacagatttaccatctggacccattatagaaaaagttggctgacccctgacctaagggcacaatgtcacatccttctttctccagttgttgaggaatagttctccatattctctcacagttctgcgcagcttctaaggaaaggcattaacaaacagctttgctcctgaaaatcttttctaggacgtatagcaaacagtctttggaaacggttcagtgcctcccctccggcgcaaaggttgaacagatttaccaaaagacccttataaaaggttgggatcttttatgctaaaaatcttcttctctaaagcaacacaccgcatgtgcagtcatatctagcattcattgtgtcaccctgtgaaaactggggaagtggcaagaacgatgttcctctggctactgctactgagtaataaattgtcctctgcctttgacacaggagtctgcgtcttctatcagtagccatgaaattgtctcaggctaatttgttaacctgcaagtgaggcaacatctcatacccttcacagttctttgatatctattcatttctttattttttggtcactcaacaattcccagatccacttactctaaacagctaaattaacactgagtaggactatcatgtacagctgtaactgcccgagactggaatatgagctaaacacctagcttacacttaagggcacctttacagagtgttcacaatggtaccgcctgggctagcgcacttcgctaccgagaagcctactttacatagtagaagctacttttttcttttcactttcctttgtaaaagttgattttataacctggataattatttctatgggtttctgatgtcttataatgtcttctgatggctgacaacgaagtatcaaggaagttttatgacagacactgaggaatcagaattcagtgtttcaggattgcttttatctggttgaagactaaaggctagtctttcaaaggtgctttctccccagtgctccacctatagaggtcatgtctgggactgcctaacacatccgaccatcttctaagaatgttgccattcagttcctaatgcagctggcatgttctcatgacaacccatgatctgaccacattaaggaatggctcaggaatggacgcctggcccaatgagtaccttttctaggatttttggatttggcacttgggaagtagagtcaatctctctcaagtggctaaaagtctgagatttaaaactctaatgtctgtggccacatttcctgccatattgctcagcaagaaataaaacaaagcacagatgagacagagagcccggctggtatctttggtttggatggttcttaaagctgacatattcctaccatttctgaagtgtggctttctgtaaaatactctaggaagtggaaccctctgctccttttccttggtttaaaccagttcaaattcagtttctgtcatttaaccctcccaactcaactactaatcaggattagtcagatttgaggatgctaactgggggactggggaataaaattataatgggagaatgtactttctcattctttcccctaaagccctggtagagatgttatggcgaaactcatgcatggaatctgattaggttcaagcatatgaatctaccaattctgtagatcaaagagttgaattagagcaaaagaaataaaagcaaaaacaaacaaatgggactacgttaaacttaacagttttgcacagcaaaggaactgctgacaaaatgaaaagatgatctactggacgggagaaaatatttgtgaatgatatgaccgataaggagttaatacccccaatacataaacagctcatacaattcaacatcaaaaaaacaaaccacccaattaaaaaatgggcagaagatctgaataaacatttcttcaaagacaacacacagatgtccagctggcacatgaaaagatactcaacatctttaattataagagaaatgctaattaaaaccacaatgagatatcacttcacagctatcaaaatacacaccacgtcttctctatccattcagctactgatggacattttggctgcttccagaccttgactattttaagtatgttgctatgaacactgaagtgcatgcagtttttcaaattagtgttttcttttttggggatgtgtacccaggagtggaatgtaatatggcagttctatttttcgcttttgagaaacctccatgttattttgcaccaatttacactcctaccaataatgtaggtgggttcccctttctccacatcctcaccaacaattgttgtgttccaccaatgtaaattggtggaaaataatatggaagtttctcaaaaaactaaaaatagaactaccatctgacattccactcctagatacgtatccaaataaaaaaaaaaaaaaaaaaactaatttgaaaaactacatgcactttatgttcttaacaacatatttacaatagccaagatctggaagcaaccaaaatgtctatcagtaggtgaatggatagagaagatgtggtgtgaatatacaaatacacacacatatagatacagtggaataccactcagtcataaaaaagaataaaaattttgccatctgcaacaacatggatggacttggagggttttatgctaagtgaaataagtcaaacaaaaaaagacaaatactgtatgtagaatctaaaaaagaaaacatactagtgaatataacaacaagaaagtagactcacaggtttaagaacagactactggtaaccgatgatgagaggaaagggaaaggggaaagacgggagtaggaggttaagaggcacaaactaatatatataaattaaataagctccaagcatatatcatacaacacagggaataccgccaacattttataactactataaatggagcataacctttaaaaactgacttactatattgttcatctgaaacgtaaataattttgtacatcaactatacctcaaaaaataaagagaaaaaaaaaaaaaagagtggaattagcaattcttatggttcaatctaaaagcctgctttggaattcttgatatgcccatactactcactgaagctctatgttgaggctacagagcaaaagcccggctaataaaggactggtttgcctgtctttgttctcttactctatgtctcccttgggtatcttggggagaatggtaagcgaccacaacctcacatctggattactcctaaagccttctagttggtctccttgctcctattcttgcatccgacagagcacatactgaaaacagaggccagtaagaatcagttaaaataaacttacatcatatcacctctctgttcaaaacccttcagtggctcccaatttcattgaaaatgagacctaaaaacccttataaaggccgataaggccccatatggcctggccccattgtatttctttgacctcatttcctgttacttttgaacccacaactcccttcactccagccaccctgaacacccttcctgctccttgcacacaccagtaagcctcccacccagggccttggcactggatactccctcctggaatgcactatctccaaatactcacatggctcagtgccgatatacctttgctcaaatgtttccttcataatgaggtttagcccatttgcatctcttccttctgattcccctttcttctttttccataatcacttaaaataccttctcagatacaatacacataatcacataatttgcttatttgctatgtttattatctgtctctccatttattccttgattttatgttcaatttataaaacacaattgtacccatttttagaactcaaagtataatttttccactttagtctacaaagatctacagataatatactactagtattggtcataactatacttaacagatgctgagtgctcaacactgttcctaaaaatattacagtctttccaggagcttactgtgttaagtgaagattatcaatattaatatttgtcggttttaggatatgacttgaccaagaatttcctagtacacatatgattatgcacaaatgaaaaataccatatttcttaaggtacacacaaagaacaatttaataattagaaggatttctataatacaaacactaattcttaaaagtatccagttcaggtaaaagcattattttccattaaatattgaaacttgtataaagaggatactatgaaagacagtatttttaaagttttgatttaattacttaattgccagtgttccagaattaaaaatttagctgtattataagcaaatgatttgggttatcctcactatgatttctgagaaggtaattagctcagtaactgtaataactctaaaatataaagctcccttctagagctaacagaacaaaaggcatcaagtaacagtgagataatcctcacaaatctttacacagcgtatgtttaaataataaaagtcatttgtgtacctttagatggtttatgaaaataaccaatcaattctgcagacacaacgttatttctaaaggaaatctatgtgactcatgatgcctgtagatacacagagacaaaccacacatattttatcagtttattacagtaagcaaataagcgtggaatgagagtgcacataactgtctacttagcgcttactgaaacatttataagagctgttatcttcctaataacagacagacagcgtgcaattttagagaggagaaaagcttcatattttttaacacttcactaaaaagtaactgaagagtgtaaaatgaaaaatactctgtgcagttagctggtaatggaccatattatcaactcaagttagatttataggatacaaactagtcactaatagttactttatgacatagcgtgtctgctttttttttgagattattaagattaaagttgtaaaacttctttcaaaatgattgaattataaaatttaaatgagaattgaaaataaaacagggagttatcaagtaagtgcctaagaataaaccttgttcaacatctgcgttactatttcagagatgacacttccacataaagctttatgaaaacaatgtcttctagtcttttgcttcaaaccacattcagacacttaatcgtttttaaatattatcaatctactctgtttttggacttcaaaaatataaaggtctatagtacataaaatactttctttgtatctaattttgtttggtttattttacggtagtatatatttagatatatgatttataaaaaatgaccagaaaacagttgtaaataaagatgcagtttcatctttaaaattagcactttttaaaccagtgtaaatctcaactggtaagaaccgtaatgcagaaagctagagtattgatttgcccagtaaactgtagaaagtgagcccactttaatatttagtattgggtccaggtggcacagtggtaaagaatctgcctgccgatgcaagagataagggttcaatccctgggtcagtaagatctcctaaggaaacggcaacctactccatattcttccctggaaaatttcatggacagaggggcttagcaggctatatagttcagggagtcacaaagaccccacacgactgagaatacacacacactcacacacctagttgttatttagttgctgagttgggtttgacccttttgcgaccccgtggactgaagcctgccaggcttctctgtccatgggattttccaggtaagaatactggagtgggttctcctttccttctccaagggatcttcctgaaccagggatcaaaatggtgtcttcttcactgacaggtgaattctttatcatgagccaccaaggaagccccttagcacctagtacaggatttaaaaaagcaaacggcagtatacctatggctgattcatgttaacgtctggcagaaaccaacaaaattctgtaaagccatcatccttcagctaaaaaaagaaagcaaagggcaaatttgtttaactgttagctagaactatatacataagactcaaataaatatatatttttccatcaaatatgactttaaataaatggtttataattttaaagataacttcttccttgtatatgtaaattaaggtattctagaaagtatcaatgattgcactaattactcttattttagtcatcagtatattcatctcttattttgctaataaataaaagtgtatttgcagaaagagctgagtacattatcaacaaacatttagtgagaaccttacttcatgcatggtgttaagcaggctccagcaaacttggcctgtcaatcaaaactaatccactgcttttgtgtagtctgtgagctaagaatggtttttacgtttttaaatgtttgaaaaaataaaaagaaataacattttgtgacactaaaatgataagaaattaaaattcaactggaacactgccacacttcattcatttctaaattgtctctggctgctttgccacagtagcacagttgaacggctgtggtctgcaaagttgaacatatttactctctggccctttacaaaatgttcactgactcccatatagcatgtgttctgtttccacagctggtgagaggaaggtaaaatcagtttataatatcctattctttcctctccccaaaggaaaacttataatcctgtcaatattctactttttaataaatctgaaatccagaatgatgtatatttacttttaaatagttgtatatattatatattccactttcatagaggaatagttccagaactatggacacagatatgttatactattctactattttttttttcatgtttcctttctgacttctggcttaaagtgatgtgaaagtgaagtcgctcagtcatgtccaactctttgtgaccccatggactgtagggtgctaataaaaccaaaataatctggtttccaaagtgtttagcataaaccttccaataatgggctacaataaatttcgtcagaaccagagcattctacacgagaacaaaacaattatgtgtggttatctgacaaatctgagaatcacatgatcttagtagttcacctgctttctgacaatatcaatgacatcatatgaaaaaagaaaatggtagaccctcttcctctggaaccaagctcagaactgaactatggcattgtgtttgacatccttatttccctccaacaactacttgagaagtctgatgtcttttgtattcattttcttcttttctgctgtctaccaccagcttagttcaagtccatcagtgacacttaaaacattaaaaaaattttaaatttgaaattgtaaaagaagtgcagtttattgaaaacaatttcaaacagtatggaaatctttaatcataattaatgatttgctgtacctcccaagtctttgctcgcctcttatttctgcttgctcattcaaactggcctccccgtctcttgactcttccctctgcaacctgtaccacagactgtcgtagactgtacctcccttatacactcagtgaagaagtgggtagaaagtgttgagctttgaagccagacagatgaattgaacctctggctctgcaacttactaagcctatgacactaaaaaagttactcatactctagagacctcaattttcacatgtgtgaaatggggaaactaccatctatctttcagggttgttgtaaatctaggctaaatattggaggagtgaagggcctgaaggtgttaacatgataggcacaagtatgggagtaagacataacttcacagttgaaataagagtatctggctgaaattctgtacaggtcaaaatttggaatggaacagatcaaagagtctgtgaggttacatatgtcacaggttgatagtatacacagtgagatcttcctgggagatgtggggctggagagattatgtgaaagacaccaagatcttcactgaatggaggcaagtgatgaatagatcccaagacgagaataacaagggaaggaagagggtgtaagatgatggaatgggcctcagaagaggaaggaacagaaggatggaaagggaatggccaaatgcaacatctgggagcttcacacaagccatcttgctattaataatgattttgtcaaagaattttctagagaattctgagtgaggtcatgctgagaatatctactataggacagcaagatccaaagggagaccctaagggggaaagccaggctttataatagtactttatcaaagtatgtgaggggagtggtagctgttccacacaaatgaaattaggggccaatggcatctaaaaactggccatgctgcctgcactgaaatgaactgtaacttaggagacagagggacagggatgtcatctagatgaagtcagcaaggatgggaaagaaggatgtcttagctgatgtacaaactggaaaggcacttttattactacccttttcaagcagcaggtctctgtaggtacactttctttgaatctaacaaagaagaaaaggatcctttttacatcagagatgccaatcggacaaactgtaagttgctgaggaattcctgatgtagggcaagtttggggaaatgggttctctgagagcaaagaactaggcagctagctctccctgtcacacacacatactttttcctgatctgtgtacaaatactgggttagccaaaagtctgttcaggttttcctgcaagatgttatagaaaaacccaaacaaactttttgccaagcctatgttttatattctccagtgaggaggtagggatggggagaagaccatgggttacgacacaggaaacctaaaagcctctggagtccacatctgtggcagcaaagcctctggtgagagagactgtgggttacgacacgggacccttagagtctctggagtccatgtctgtggcagcaaagcctctgatgatccacctttactttcagtaaagtcaactgaggatgaatttttctggctgaagaccgaggaccggggcctcagtgcctgtatctgcaccaggccaagtgttctcaggctacccctaatgtttggcatatgaaacctttctctcagaaccaagaaaggctatggttcccttcttgtcaggtagagttactgctggcagtggtaagaaagaaaacactaaattttaggttagaagaacttaaaagttattgacgagaagaaacttattaacttctttgagccagaatttgtaaaataaagggtgctatgtgccctgggctcagtcatgtccgactctgtgtagcccgccaggctcctctgtccatgggattctccaggcaagaatactgcaggggtggccaattcctcctccaggggatcttccccacccagggatcaaacctgcgtcccctgtgtctcctgcactgcaggcggattctttacccattgagccatcagcaaagaaaataaagggtcatactacttaattagtaggactgtttcataaggattcagtgagatactacacatgaaagtgttttggagctgaaagtactcgtctttagttatcattaaaggcaacgtttattagcaaaaggaaaaaaacactggcagaacaaagatcagaatttaccacttttaactgtcatttctgttaagcaataaataatttatgattctttacctttttcaaaaaccagaaagtattgcttgtgataaagagaaataaaggtcagtcctgaaagctagtggggaaacttcttcctcttcttcagagaactacaggaagtgggagcaaccagcatttatgatttctttcaaagactgatgataactgagagaatcttatgatcttaattatgaatcagtatccttagtcagcagaataacttttagaagcaaagcaataaaaggagattagatttttaaattatcagttatataataaactagatacctgaaagtgaatttcaagcgataatttcataagcacacaaaatttatgatgtgatgcacaatctcaggtaagtctgaatgccctaacatcacaggaagactactatgctttgagatatttatacttctttacttcatcagaagtaccgtattgataagacccctaccatctaccttgagtactgaaattatagaattccacttttatgctaattatgaagaattaactctcagtgtctgtacatgttgaaaagagcaatggagagtatcacttaaaaacaaatgtagtagaggtagccagaggcactggatggggcactggatcaaactgttaggaccggggttacggcttcaacttcagccatacgttagcagtgagaacttggctaaatccaacctcacttcgtttctggttttctcttctgtaaaatggggctaattatacatatcctgtctactctgccgagctgttctgaggataacaggagattgtatatatgaaattgatttttaaactgttcaataaaaggcattactgggattattagtaaattgagttttcaggcaatgttaaaatatcaatctgtcagatagcatagggtcttaaggttaaaagtacatatcaaaaaactgaatcaccattggaaaagggcttttaaaacaatattgctgtatttattgacagtaccatccaaaggcctttaaaaaagtaatcccttcccccacatcctttttttttttttggttagttgtgggtgacgaggactgttctctaaaaggtttctaaatgatgttgatattaaaaaatatagtatcaccatttaacagccttttaaagagcaggccctagcctggtctttgttaacaactgagggggaagggactatttgttcaaaggcttttagaggatgttgttaaaagaatatatagtgacatcatttaaaagccttttaaataatagttctccttccctcccaattgtaatgtccttggctttcatttattttgtactacaaactgaaaatggacaagccaacgtattactggctatggcaggcatttgctgggtggaggatgatgcattgctttaaaaaacgttgatgttcaggaataagttcagctctttgagaacatggcacagaacactgtactctgagcacagttctatactggccacccacctttcactgagctatggcacctttgcttgttttctctgagagtttcctaaagaagagaccatgcaaacaggaaaggagtcataactaagccattacaagagctccaacggcataaacgttatcctactgcccactgctacttaagctaattctcccacccaacttacagcaaaatccaactcctattctgctattgtattaaattatttctccccactatccctctaattttagactctacttcactaggagacagcagtggacacttaaacagttcctttccttatttagctctcagggagaagaaaaactaactcaactatttggctcaaagcacagtcagtaagctttgagatagataggtaagctttgagatagataggttagcttgtattatctttcacctaacataccagccccaggggtatcatcataaaataggaaaaaacttttaatttcttatgctgcgtttttttataagcatcctttcattttaaaaacagaaattcctacaacactttgattaaaaaaataaacctttaaaaaaacctaagcagagtcctccaaacacactgcactttagttctaaatttcagtgtatccctatttttttgccaatcttgcacaaagaactcacttgttagttctacgatttgcttaaatcatttttatgtatgctttactctaataaatcatattacttgattaaatatcaaatattaaccataatacaatgttcagctcaagttccaactgatctattcaactgctcctgaccaaatccagtccataagtgatgtgagtcccattccattttgacattctttataatttaattttcatatgattatttaactttataactttaataagattacttaagttttttcttatgaaccatgtaggcagaaaagtgctgtctagacaataatttctttgcatgatttttaaaaatataactttagaattctgttgttttaacagcatgattatttgtgcctataattatgtgataatacgttttaaaatgtcttaaaatttctgcattaaaagtcatgtcatttgagacatgcttccattatctattgagataaatcaatgtttcacagagaaatgctaatataatagattctaataaatgaacattggtgaaaactttgaaataaaaattctgacttaaagaagcatcaaaaagacagcaacaggaaaatacagatgtattaaatttaatttgatatgactgatttgaaaaatttcaaatttctcttaatttgagtgctcctgggtgactgcagccaagaaattaaaagatgcttgctcctgggaagaaaagttatgatcaacctaaacagcatattaaaaagcagggacattactttgccaacaaaattccatctagtcaaagctatggtttttccagtagtcatgtatggatcttaagagttggactataaagaaagctgagcattgaagaactgatgcttttgaattgtggtgttggagaagactctttagagtcctttggactgcaaggagatcctaccagtccatcctaaaggaaatcagtcctgaatattcattggaaggactgatgctgaagctgaaactccaatacttcggccacttgatgtgaagaaaactgactcattagaaaagaccctgctactgggaaagcctgaaggcaggaggagaatgggatgacagaggatgagatggttggatggcatcaatgactcaatggacatgagcctgagtaactccgggaattggcgatggacagggaggcctggtgtgctgcagtccatggggtcacaaagagttggacatgactgagtgactgaactgaactgaccagagttaagtaaaaccgccataaataagaattgcttggttaggtagctggccataatccccacaggagggctccatttgaattttaggaatagtgagtgatcaccatcaacatcaagatctgggagtacatgcttatctgtggcattaggctttggctctgcatcagaatgccctccataatgccatggccttacccttctactcttcctcaacttgaaacatgaggaatgaatatcttcttctccccaaaggtgctatacatgaggtgatacacagataatggacccccaaaaggatctgagtctcccccacacaatctataaatatataatgatgcatggcaggggagaattaagatggctgaacagctaattttgagatgagattttcctgggttgtctacgtaagggaaagcaggaagcaggagagtcagtgttatagggatgtggtgtaaagacaactcagtcattgatggctctgaggatacaacaggctatgaactgaggaatgtgggcagcctctctctagaagctggaaaggcaaggaaaagaattttcccttagaacttccagaggaaaacacagctgtgctaacaccttgattttggcttggtaagtaagacccattttggactttgacctctagaatcgtaagataataaatttgcattgttatacaccactaaattggtggtaatgtagcagtaataggaaactaatacagtaattatgataactatttggaaactactgttttaaattcttgtgttgtaaaacccatctgtggagtctatggtatatttatttgcatacctgtttcaatggctgatgtatgatctgagaggcatcaaaaaattctgctttccctatggtattttcccattggacttaagatccaactagcatagacattaataaacttgaatggctttcaaacccgatagttacttgtcagaatcatctggaggactggtttataagaaattcacctcccctaagagtttctatatttttaatgacttttatccatttggttaacatataggtgctgagaaccagtgaaaaaaataaaagtgaactgtcttccaaaggctccaatttaatgctctgaatattatctaagactacttcttaacactttttggttagtatgtgttagtttttctcataaaatatacatatagaaacattctgtatgagttctatacaagcagaaacggattatagtagtcagacacttgagagacaattcccaaggcagacaagtttccatggaggaaaatgaaggaaccaagaaaaatataagagggtggggctaggttagagaaggagagggtaggtattacaagagtgataattctggagcacctctttacaatgctaacaattttttctatcaccatctttttctgaaacaagtacaataaaaattcagatttttcaaaacagctatactgagtctctgaatcaggattcttaacccttttacagtactcatgtaaaagttaacaacataaaccctgggataaataatggaaggtgtaccagtgggtgcttatgcaatcaggtctacatgagaaaagggaaaccactggaactacaagcaaatactgttcagaagaaactcaatccagtccatgttggtttgacagaaatatatgtatgatgacagaatgtttcttggtggtaattccacatctaaattattttatggaaggcattcagtattaccatgcaagacaaaaggattcttccctgaagactgggcagcattagtgacttcctctgtcagtgacctaagacaccttatacaagcctcccatggcagctctgttcatgctccatcgtactcttgtttatcatctgtttgcaaaagactgtgagatgtgttcaaaactgtaaccatggcttactctcttaatttgatgtagctcataccataatgttcagaatgtggaagtcactcctttcatgtttattaacagaatgctcacagttaaacaacaacaacaaaaaactttcactaagaaaactataacctccaaaacctttcactaggaacacaaagagaactagcacccatacagatatggagtctgcaaagaatgtaaagaactttaacctatattaactattctatccaaactcttcttgcagatctgagatagctaagaaatttcatacaatcatgatatgtaatttttatgtttaatctgacacctgctcaaatcatttcactgccacttgatatataatagcacttctttggttgaaagatttgaaataagtattgagccacatatctataaaatatactcttgaagagcacactggtgagtttcagaatacacaaaatctggtcaagtaataaaaaaaaaggtatgttatgattttctctacctatttattgaaagactgatgaattgataaccttctctccagatgtgcagcattcttttaaaaattaattaaatggtattgttttctaaggaagaaatattaaaaaagaattcagatactaacttctgaattttctttaaactgttttactttttccctaagtgtttaaaatgagcaaggcattcaaacttgttgggtggtacatctaagagttttagcaaatgaagctacacaaaacttcaaattcttttcttgctttccaaaaaacttgggcaagtttctgattcaaatcaaatgatagagggtataagattaaattgacagtggctgacctatattcacaatctacctataatttgctcttgtgactaagttgtttgatgcaatccccagaagtaaaacaggcgtttgaacactttctggtgcaaaacacatctctgtcacaaagccatgtcttaatttcaaattcatattgagaatcactactttgagtagccctgccagtgcacaagacctgtgtgaagccatcgacaaacttgacgttttatgaagggccagccccctttcacactgacatcctctgtaccctgagtaaataactaacaattcatttcctaaccttgacttcagagtccagcctttccaccactctttttttttttcctcccctttctttccaaacaagtgacaaagaacaaggaagctgattgaaggggtccattatgtatcaacttaaagaaaggcaaagtgattgatgaaactagcagtcaccttcactgctagctactgcacctgtatcctttttgtcaaatgacctgaaaatcctgctgacagtttaacattcactacaaggatacacactatggaactacagttttcagttatttctattcgcagtgaaatctttagggatgtgatttgagaacaaaagttaaactttataatttcctaagctccatattttcctcttacatggtcactgattactattaactcgctttgcaaaaatactgtcatgggggtataaggacaagtaggtgtggtacgggaggtaatgaatgtttattttaaactttacctttctgtgtgttttgttggcagagacaagactggtaactcagcacgattccttccgccaaattattgatgaattacaattaattgtactgacagaagaagaacttgtgatttctcattttttctctaaaggtagtcaatatctcaaaaagtgattaattaaaacaaaaagtaaatatgcagcattaaaaaaaacagtattttacctaaaccatctaaagttgtttcccaactttccataggtgggggacttagtgaattcacaggataacccagtaactaagaatttcttcggtggatggataagtttgcctaaattaaagaactcatgttcagttataagcttcctgtgttagaaataaaaatttcactagtcaacagtgacacacttgagagccagcaaaatctcaaaagaagccaccgttctctatgtggacatagcaccatttcctctgggcatttattacctgttaaaaaccaatcttttggtgagtggcagttcagggtttttgagagcaagctgcaatatttcttcaggtctgcagagtcataattaaagctgaactgagcggaattggagagggaaggtcagcgaggtgccgtatgagagatgaggctgggctgatgggcaccaaatgaacaaattatgatgggccccactcaatgtgatgaggtcaaatgcttgtttctacccactgacagttcaatttccctgaaatgtctctcggttctctatgagctaattatgaatgaaaagttatcaactgcccacgccaaagggggcttaaatactattctgtggagttcttaatgtcaaaatattgttcaaaacagcatgctgtcccactccaaatacaatgtgtgggttaatctaaataccagtgaaacaccatcaattttcctcagttttttcacaatgtatacaacaaagcaaattctccagtacttgtcagcacttacaaaaaagagagagagatcattttatcaggtaaatctgcattatacttgcaactcacttccatggtaatagcagtacagtgcttacagttttgcatatcgcaggctacataatcttcaaatagcactgtacgttttgggggtgggggggaggggttggggaaataatgctattggattattagctcctaggcatcaatactcagatttaccccggcatacagactgattacagaaaatcagctcaagagtgattgacaaaacgtaacctccatttatggaaccagtttttgagaacaattttccacaggctgcctttatgatggacaatcattttctttacatctatataagcctaagtgcattcaacttctctctgaaatcttgtgacagatgataaacatttgatacaaccaaggatcctactaattaaaaacatgtatattgcttcaatcaataatacaaaaacagatggacattataaatttgctgtgaccctactatgtgccaatcactatgcaagggacttccatgtaaggctgtttaacacaataagtagttttctagcaatatacaacacatataaaagctggattcaatgaatgtcctgaggttaaagggtacatcacaatgaaagtaatatgatatgcataaaataaaaattaatagcactgagcttaaattgtaagaaaaattataaaatatgtgaacacagtgcacatgaaaataacacatgtcaactttctttttctccactagatgaaaaggagttttggaatggctctataaggatagatttgaggtataaacattagaagtacttggtggaagtggagcagagagagaggaaaatcagttatgattcaggtaaaggaaactggacatcaaaaaatgagcctggagtagggaaaaatttttgtcatttaaagacattatatgcaggtatgtatacattatatttttggtaacttaccaaaaatgaaaaagtgtttaagcattgtctgtacatttgacacatatagatatacaacatcaatttatatgatactttaggaagtattatatatatattcatgtttatagagatcaaatttaattcgttcattaaagaatcctttctagaagttggttttttctaattcttattgtaattgcattgttctaatcttgtattataaaggcagctgcttgcctatcatttgtactttcctcgttaatcctgactcagtgaattaacctttaattacagccgttaaaattgaaatgagcctcttgtctggctggggctgccccctttcagagcatgattctgatgagaatttttagggtcaatgaatatgtcccatgtcatgtctgatagctgctaaagatgtgaggaggtaaatgttaccttagaaagatgtgctttaaatttttaggagatctgctctattgatgggaaaataaaataaaaatgttaattttagtttctcagtttaccaggctgtatttttagccaaattgagagcacataagatatataaagaatgggctattaagatacatttagtcaaacaaagtaaaacaataacttactctccatttcagtcttaaatgttacatgttataataaaagaaatatgtaaggatcatgactacttttgagatatgtgcttcataagaataattctcacaatgaggtagtaaactagcaggttaacaatagtcttttaagctgacatcagagggaaaggattctataataatgaaactggaaaacagaaaagattaatttcattcatttaatacacttttgatgaatttctattatggactgagcagcgagaacagaaaggccaataaaaaggccctgtcctatcttccagggacccagagtctaagccttattagattaatatatttctaatataaaagataaggcacctttcccctacactgacactgatgtttactaaagtcacttgctgtctccctcttaatttcccacagacttctaaagagctagaactgagggatgttagaaacaatctattacatattacagtcttcttatttcacagatgacaatctgaatggaactcaaaatttaacatactatcttaaatttacaagataactttggcaaggcacatacgtagtgaagcacggatgccaaaatcttcagtgaaaatatgaggtaagtttctgaaactgtatacttttaaaataaaacttactaggaaaactttcaaacataaacaaaagcagagagaataacataaagaacaaggcactcatcactacctttcaaaaaactatcagtatttgtccaatcttgtttaatcttttgttctacttcaaatgtcagatgatacagtaatttcatcagtaaacagtttggtttgtattatctaacagataaaaacttgtcaagaaaacttacaatactattatcacacctaaaagaaaaaaaaacctcccccaatttcatgtaaaatacagtgttcacatttcctcgacagtcatatatatatatctttttagagttggtttgcttcagtcgggattcaaacaagacacattttgttggtatctaacctaaattatgcatgttaaagaacacagtaaaaatctgttttgctatcttttttagcagaagtgtatagtagacctttagtaataatttagaatttaggggagatatttatatattcagtaatgtggaacagttgcaaatgtagagaaataacccatattgataggcctataaaagctgtctgtaattatattcctgaatgatttgaataacagtgtatctgatatattctaagataagtggcttttacttttctttgatattagggtcatagactgtacttatctatttttactccatgttctcctctctctggtaataaattaatttcttagtgttagtttggtgtgtgcctgaaagctaaattcattttcttttcctttgaagagaaacaaagtttctctaagtatcacagtaagatttttcatgtttagggaaagtttttcatgttaaaagacttaatactattaaataacacttaatggaatggaaaaccaattttccataccatgccttgtcctatgttcagaaaatttttggcaagcttttaaaagaggaacagaggtaacagaagttaacttgattgatacataattaaataataattaaaacatgactggccaatgcataataatctaagatatcttaaagcttaaaaaatatttttcactgtagatatcacaattcaacacaagcaacaaaattcacaacgtggcagttgacagtaatacaatgttcaatcagtttcaaatgtggaaaataaaattgccagaaaagattaaattcttttaaaataactggtactctaaaatcttttatttccgagtgtagtacatataattgtaattaatgaaaactaaaaataataatcttaggaaaagtctcaagtgaactgccttaagctctaaagatggaacccacagcaaggacaggaactactcaccacaaagtaacaggaaggcccgggccttctttaccatcatgtctttaatccttctgtttcttacaaattaatacacatattttctttgttttggtggtaacctttttttttgttttgccataaaaactactcttagcaattgatatagtggatttttcactgtggagaattcaagacttaagactgccatatatttgtttaaggcaaataaaaaatatttttacaataaaaaaacctatagctaaaattgataacaatatctttttaaaaagcagctccttttaataacctaggacagggagaaatgataatgatctgttactaactatgagacctttgaattaatacagaaataaaaagataaagcagtaatacagcataccttaaagattaatttaaaaattaaagcaactcatatgcagaagagaattaaataaaagaataagatgggacatggctgggcaatggaagcacaaaatactgtcagactttaattaaaaaatgttttcaatttaagcagacccaggccagtgatttttcattatttttaccacagttccatgactactgacagtttcatcagaacaaataaaggatttttcccaaatttaaaatgacaaaattatttttaattttaacttataatttcttccttctttaaagtcaaggaaattttcgatctgagctggacttgtcccttagcctgaggcttgattaagtttttaaaatataaaaaacacatatttaaaaaaatacaatttttccagcatctcagaaaacaatctttaccacagacatgttatcatttgtatgggaatgaggctatgttttcgtaatatctagcatatgacttagtaagacccttgtacaaaaactctggaagcaatctgtccttgtagacaaactagaagaaagccagcactctggcggtagaagacagcagattggaaaacaaaattaaaatgccctgctgctgctgctaagtcgcttcagtcgtgtccaactctgtgcgaccccatggactgcagcccaccaggctcctccgtccatgggatttttcaggcaagagtactggagtgggttgccactgccttctccgtaaaatgccctaacccagtatcaattttaaagaagtgaaaggcctagctaagatctaagtccactttcgagaaatggagatcaacttcagttacaactgtccatcattatgatgcgattatctgagtaattccacaggctgttttagcaaattcagactgagaaattcaggttctgcatcatgaattatggcttgttttttcttcatgttgttttaaaactgacaaagtgacttcagtgccaaaagcaggtctgttaggtactcttgattttccacttaatttcctataatacaaactgggtcaggatctcattcctaaccatggatagctgtaactcaagtagttgccaatctctgtcaatagcagaagctgtaggcctacttgccagttctcctatactcctttcagaggaactgaaacattatcagaactaatgataaacatgaacttcaggtagtaaacttggtttatatatttaggaagaaaaaaaaaaaaggcttttccttgtgccactccgcctgttcaagggcattacatacgggttttctttttcttactttcagcctgtaaatcctggaaggggttgggttagtccataagtcatgtctcactcttacaattccatggactgtagcccaccaggctcttctggattttccaggcaagaatactggaatggattgccattcccctcaccaggggatcttcctgccccgggatcgaatctgggtctactacagtgcaggcaggttctttaccgactgagccagcaggaagtcctgaaggggttgggggcggagggggccttagttaagtagcttcatattgataaaacaatgccatcttttggctgctcataggaaaattccatgctgactacccattataataggcacaaacctcaggttaatgttgctgctgctactgtctttacgggacattgtgagaatctatttcttcattaagtgatttagtgacgatccacagtgtcacttcaaaaaaagcagaggtgaacagcatgtactcaaaattatccatctactttttgttagagggatggtagttcagatatttaaattctaaactgtgttaaatgtcaaaagttaactcctgctagattttaagctactactgaaataggtggcactgtgtagtgtagctaatataaaataaccgtatttatgtatatagtcatagaaatgctgacaacctgcatttgtagaaatatcccaaagagcaaactaagttacaaaatgaaaatacttagtataccgaagttacataattttgaggaaatttttattttgttttgctcttactcaactgtaaactccctaagatctggaacatagccttgtacacaactacatctttggctcctcctcatattccgccctgaataaatacttgttgaatgaaaaaaaaaaaaacacttaactggcatatgtagtatggaatctggtctcatttaaagacagatctggactttgttctagctcttgagaggcagcctctgaagacttgtaatttccagagtgatggagtgccttgattattcctggtgggcccctagaaagcttggcgaagcagataacccaagatgggagctgaccacaccagaaagaccaaccatatgattatagagggttggggctctagggcgctgatatcagactgacttagaggggaagactagagagtgagttcagccatgaggcagttaattcagtcgacactgcttatgtcgtaaagcctcaataaaaactggacatctaagtttggtgagctaccctggttggcagtactcctgtatatactaccaactccaacacaagcaaagctttaagtttgggacacaaccagaatctcctccatagacttcttcctttggctgatgctaattttatcctattgttacttacaggtggcgctagtggtgaagaacccacctgccaatgcaggagacataagagacacgggtttgatccctgggtcgggaagataccctggaggagggcatggcaacccactccactatttctgccttgagaatcccatgtacagaggagactggtgtgctacggtccatgcagttgcaaagagtcggacacggctgatgcgactgagcatgagcatgccacagcaaaactgtaatcctaaacacagggttttcctgagttgtgtgaattgatctagtaaatcatcattcttgagggtagtttcagaaaacccttcaacttgcagctgccttagcagtcttggacaaacttagcagtctggaggactctgcataacatcatgtgcttagttgctcagttgtttgtgtccgactcttcgagatcccatggactgtagcctgccagccacctctgtccacaggattttccaggcaggaatactggagtgggttgccatttccttctccagggtatctttctcacccagggatcgaaccaacatctcttacagcctcctgctttggcaggcggattgtggattctttaccatcatgccacgagggaagccagtaacatcaaggaagcctgtaacatcaagttgggctaactccaaataacattgtatcaaactgacgtttcctttttgcaaccctggtttctctttcatggactgttcttggaattacttactaatccttaatatattaccgctgtcctttataaagattgcttttcttaatgaaccttcccacagcctcctaagttaaattccacttagggactgtgatccatgaggatcaaactggttatattacagcagctaagtcagcgcttcctcactaatgtaccacaaatgggtcagaggtatgctgtgctactgcctctgccattaacctcagaaatgtcaggtgttacctgtgaaactggagctccaggcctgggtacctcccatcttctgcagcatctctgtttactccagagcacaacacaaatactgtgtgtgtgttagtcactcaggcgtgtccgactgtttgctatcccatggactatagccggccaggctcctctgaccatggaattatccaggcaagaatactgcagtgggtaaccattcccttcttcaggggaccttcccgactcagggactgaacccaggtctctggcaaattctttaatatctgagccacctattatcacttttttctatgtaccgagatataagaaagaaatcattattataattttctcatgatagtatgtcaccaacattctccagcatcagacttggttattccaacctctatgttatgctttagccacattaaacaactgtttctccaactttccaacatttctaatactctaggtgaacaatgcatacttgtgctgtgctctacttagtcgctcagctgtgcccgactctcagtgacccgacagagtgtagccctccaggctcatctatccatgggaattctccaggcaagaatactggagtgaattgctatccctcttcccaagctagggattgaacccaggtctcctgcattgcaggtggattctttactgtctgagccaccaggaataattcatttttatttcacatttactcttaatacgcaaactttatccctcctcttcttttctcatcctttccaggggaccaatattctgaggattgctactactgactttggggggtctagggtataagaatttagaaactcttagcctaacaataatatagtaaaaaaaaaaaaaaaaaagaacttttctagtaattcactaaaaactcagtttctttactgatatactctcagttcagttcagttcagtcgctcagttgtttctgactctttgtgaccccccagactgcagcacgccaggcctcactgtccatcactaactcccagagtttactcaaactcatgttcattgagtctgtgatgccatctaaccatctcatccgctgttttccccttttcctcccaccttcaatctttcccagcatcacggtcttttcaaatgagtcagttcttctcatcaagtggtcaaagtattggagtttcagcttcaacaccagtccttccaatgaatattcaggacttatttcctttaggatggactggttggatctcctgcagtccaagggactctgaagatctctaacaccacaattcaaaatcaattctttggtgctcagctttctttatactccaattctcacatccatacatgactattaaaaaaaccatagctttgactagatggacctttgttgaccaagtaatgtctctgctttttaatatgttgtttaggttgatcataacttttcttccaaggagcaagcgtcttttaatttcatggctgcaatcaccatctgcagtgattttggagccctcaaaataaagtctctcattgtttccccatctatttgccatgaagagaggggaccagatgccatgatcttagttttctgaatgttgagttttaagccaactattttaaatttttatttttttttactttacaatattgtattggttttgccatacatcaacatgaatccgccacaggtatacatgtgttccccatcctgaacccccctccctgtaccatccctctgggtcgtctcagtgcaccagccccaagcatccagtatcatgcatcaaacctggactggtgattcgtttcttacatgatatcatacgtgtttcaatgctattctcccaaatcatcctaccctctccctctcccacagagtccaaaagactgttctatacatctgtgtctcttttgctgtctcgcatacagggttatcgttaccatctttctaaattccatatatatgtgttagtatactatattggtgtttttctttctggcttacttcactctgtataattggctccagtttcatccacctcattagaactgattcaaatgcattctttttaatggctgagtaatactccattgtgtatatgtaccacagctttcttatccattcctctgctgatggacaactaggttgcttccatgtcctggctattataaacagtgctgcgatgaacattggggtacacgtgtctctttcaattctggtttcctcagtgtgtatgcccagcagtgggattgctgggtcataaggcagttctatttgtagttttttaaggaatctccacactgttctccatagtgactgtactagtttgcattcccaccaacagtgtaagagggttcccttttctaaacaccctctccagcatttactacttgtagacttttggatcgcagccattctgactggcatgaaatggtacctcactgtggttctgatttgcatttttctgataatgagtgatgttgagcatcttttcatgtgtttgttagccatctgtatgtcttctttggagaaatgtctattaagccaactttttcactctcctctttcactttcatcaagaggctttttagttcctcttcactttctgccataattgtggtgtcatctgcacatctgaggttattgatacttctcccggcaatcttgattccagcttgtgcttcatccagcctggcatttcttatgattttctctgtatagaagttaaataagcagggtgacaatatacagccttgatgtactccttttcctacatggaaccagtctattgttacatgtttagctctaactgttgcttcttgacctgcatacaaatttctcaggaggcagatcaggtggtctggtattcccatctctttcagaattttccacagtttgttgtgatccacacagtcaaaggctttggcatagtcaataaagcagaagtagatgtttttctagaactcttttgcttttttgatgatccagcggatgttggcaattagacctctggttcctcttccttttctaaatccagcttgaacatctcgaagttcatggttcacgcattgctgaagcctggcttggagaagtttgagcattattttgctagcatgtgagatgagtataattgtgcagtagtttgagcattctttggcactgcctttctttgggattggaatgaaaactgaccttttccagtcctgtggccactgctgaattttccaaatttgctggcatattgagtgcaacactttcacagcatcatcttttaggaactgaaatagctccactgcaattccatcacctccactagttttgttcgtagtgatgcttcctaaggcccacttgactttgcactgcacgatgtctggctccaggtgagtgatcacaccatcatgattatctgaaatactctagcaagcaccaaaatattcctttttgaccatctctgggccaactaccaattagtctcatggaagactgaaataaacactttgttcatacacaatttttactagttcagctggtaaagaatccacctgcaatatggcagaagttggtttgattcttgggttgggaagatctgctggagaaggaaaagtctacccactctagtattctggtctggagaattccatggactacacagtccttggggtcgcaaagagttggacacgactgagcaactttcactttagtgtgaaaaaggaactgttctttggatttcattataaatattttagaaatttcaaaaaatgaaacttatccatattgtactaagctataagaaaataaaaactcactgaaataaaaatcacatatgacagagaatatgataatctacatggccttctagaactaacaccaaaaaaagattcccttttcatcatagtgtactagaatgccaaagtaggaagtcaagagatatctcgagtaacaggcaggtttggctttggagtacaaaataagcagggcaaaagctaacagagttttgccaaaagaatgcactggtcatagcaaataccctcttccaacaacacaagagacgactctatacacggacaacaccagacaggcaataccaaaataagattgattatattctttgtagctaaagatggagaagctctatatggttagcaaaaagaagaccaggagctgactgtagctcagatcatgaattccttattgcaaaatgaagaaagtagggaaaaccactagaccattcaggtatgacctacattaaatcagttacgattacacactggaagtgacaaagtgattcaggggattaaatgtaatagacagtgcctgaagaactttggacagaggttcgtgacattgtacaggaggcagtgatcaagaccatcctcaagaaaaagaaatgtaaaaaggcaaaatggttgtctgaggaggccttacaaatcactgagaaaagaagagaagcgaaaggcaaagagaaaatgaaagatatacccatctgaatgtggagttctaaagaatagcaaggggaaacaagaaagccttcctcagtgatcaatgcaaagaaatagaggaaaacaatagaatgggaaagactagagatctcttgaagaaaatcagagataccactggaacatttcatgcaaagattggcataataaaggacagaaataatacagacctaacagaagcagaagatattaagaaaatgtggcaagaatacacagaagaccgatacaaaaaaagaccttaaggacctagatgaaagtgaaagagtagtgtgaaaaagttggcttaaaactcaatattcaaaaaactaagatcatggcttctagtcctaccacttcatggcaaatagatggggaaacaatggaaacagagtttttattttcttgggctccaaaatcactccagacggtgtagccatgaaattaaaagacacttgctccttggaagaaaagctatgaccaacctaaacagcatattaaaaagcagagacattactgtgctgataaaggtccatctagtcaaggctatggtttttccagtagtcatgtatggatgtgagagctggaccaaaaagaaagctgagcgctgaagaattgatgcttttgaactgtggtcttggagaagactctggagagtcccttggactgcaaggagaatcaaaccagtctatcctaaaggaaatcagtcctgaatattcattgggaggactgatgctgaagctgaaactccaatactttgcccacctgaggtgaagaatgatgtcatctgaaaagaccctgatgctgggaaagattgaaggtggagtaaaatacataatatataatataaaatattataatataaaatacataattttatattatgtattttacctcaactttataaaattctatactcacactattttttaaatgtaaggagaatgaaggaagaaaatgctattatatgtagtattttccagtttctctaggcaaggagttatatatatatatatatatattacccccaaagcagtcattttgtaataggcatggtaagcatgtatatgaatgatatgtatatgaatggggcttccctggtggctcagacggtaaagcatctgcctgcaatgtgggagacctgggttcgattcctgggttgggaagatcccctggagaaggaaatggcaatccactccagcactcttgcctggaaaatcccatggatggaggagcctgataggctacagtccatggggtcgcaaagagttggacacaactgagcaacttcacttctcactcactcactcactcactcatcacttaattttatgccacattttttaatctcattcaaagatttataaaaccacttttattaaggctatacaacattctttaatttgactctgccatacttgatgcaaccatcattctcctatcaccaggcattgtggttataaataaccatgcacataaacctttgtatttctcattatttccttagaagaaaaacttacacgtgagattactgggtttcccttgtggcttggtaaagaatccatctgcaatgcaggagacctgggttcaatctctgggtcaggaagatcccctgcaaaagggaatggctatgcattccagtattcttgcctgaagaattccttggagagaggagctggtgggctacagtccatgcgactgcagagttcgacacgaatgactggctaacactttcactttcacaagattactgtgtcaaacaatatgcatattttgatgactctatacacagatgcccaaactgccatccagaatgacggtttagaccgacatcagtggagaagtgtataacgcctgttttactgcgtccctcatctgctttatggattaatccagggaagattcatccaataaagattataccacattccccacaactttcacctgtcttgctgggccttcataacgtgaaactctgtttaaaaatcacctggtcctagaacacttttcatatcagtacaaagtagtctttcatgggagggggggcccacattgcaaggttttaaaataatcaattttccaggaataactatgagaaaaaccattcaatgttttggaaaatcatgtaacaccacacctcatggcatttgggttgctaatacaatcatatagtttatcagtttgcatttagagttgctggcatcatttcactacttcactacatttctaatgtagtcatggtcaaacatttaccaatcactgtactatttattagaaagtaattttttctttctattgaatcggggtaatgtgttgatttttaaattaaggatgtactcatccatgaattttattttaggattcaagagactcttgcatttgttgaggtcccataccattattggggcttttaatttttgaggactagtctttgagtatttcctttgatgtctttagtctatttctttctaaatttgtacatctaatgagaaaacttatgctttggttcattcagttttctaaagcactgtttcgagggctgaacgtgagatcaggagccatgatattctgtatcagaacacttgatttatttccataggttctacttctcaaggctctacttttctctttgtttaaagttctattggtttctttattggcttgttgctggtgaatttctgattgccattcttgttacgattacttggttgaccatttggttagcttctggggatgaaggctgtgatcctgcttcacttggtagttcttttttttttggcatactctttgcatagagtgcttttgaagagatcatctcaataaatattttctttagtataaaaagatgagtccttcaattactttgtgataagtgaaaatttactacaagcttttctaatctcaactgcattcttcttacagctaataaagtgtgagtctactcagggtccattatcacgtattataccacttccaaaaatattagctaatatttattgagtgatgacaatgtgccagtcactgttctaagagcttcacatttattatctcattaatctggcaagaacctgtgaagtagatattatcttcataggaaacttaggtgcagagaagctacttactaatttgcctaaggtcacatagctagtgtagcaaggcagggatttgctttttggtcatctgatatcaaacccaagttattcatctaccaccttattgcctcccaagtttttagggtgctccctttgcctcaaaaacttactgtgtttcactatagatttttctgatgaccactttctccttacagcctactacagatgcttaataaatatttattacttaaatgaaataattatccactttcccctcatctcttctaatgtgccttgtccttttagcaacaaggacaaactaaagtcccaaatactgctttactcatttctgagtgataaagagataatcatgttctacaaactgaaaaacaacatgataaacttaagagttttcgcctgtattttctgagctgaccaatgctaaagggaaatgcatggagctcttttgggtgtttcattgcacagccctgatatcacatttgctttgaagaggagatctgttggtagcactgtataagaattaggtacttttctctcttatctctggcagaagcagttctgtgtttcctggcagttcaaatcaccaatcatgtaccctgctagccctggcaactactggtacagcagatcttttcaagctacccgtgtgcccatcagaacttgctgtgctattgcttagtttgtcagatttccaacaaaaaattaataggcggtcaagcatatcaacagattacacatcttaggtagcacgcctgatttagagagaaaggttagtggatataacatgctaacacagaaaaagttactgtagtttcagatactctgacaggctgatggctttggcattattttgagacaggtaagcctcttgccttgctgccaagtcagcccccacaaataatattaaagaattttcttagagacattaaggcatgtacatatataatgcaaatagataaaaagataatgtaaaaagaaatacaatcttgactttttaaataaaaccaggcagttttagtagcctatggtaaaggaatagtgcggtaggcatagaatgatgatgagaatgggagtctcttcatgtagaaaacaattcttcaagacagaatctatgtatataaactaattcaatgtggcaaagaactttcataagttagagatacataacagtaccagagaaaaatgtacacatggtaagtaagtgtggataacaaggagaaattgagacaacaatggtttggatacagctaattaaaaatatatttacaaaattaaaaggttaaatttgaaatacatttgttaagaggaagaactgtttgaggctaagaatctaattatttgtattttaataaaaaaagatgcaatggcatcatttgaaaactgagctaatacattttgaaaattacttacgctaatgactgatgaagtagctgacaagtttaaaccttcaagatcagctatcaggcttggagaaagagctggggtgggaagtgcaactggagtggacaccgggttgactgaaagtaaagggccaaattagcacatgtgcatgaaaatttaattcatattactaaaagcaacatttttattttgctggtaaatctaattaaattactttgattaataagtctatgacaattctatttaacatcttgatttagtcaagctattatcaagtcatggcagttattagtcttagctttcaaaacataatgacaaatcctataacaaaataagaatataaataccttgagtaatactttttgaaaattttaatctcctaacattatcactaacattaatcacccagtaacttaaccaaaagaaaaaggtaaaggaacattttttcagactaatgtaaaggataacaacagctctcaagagagttttccagttgggttaaaagccttaaaagagtgtttattaaatcttttctctattttattctccactgtaataattataaggggcccagactacctaattcacttctaattatactttgtcagcaaaagctatgagctagatagaaatatttgattctatcaataaaaaaatttgaaaatcttttttaaatacaaatttgatcatgtcactgtcatgcttaaaactcttcaaagatttacagttacgtacaaaaataaagtccaattccttatttaaatgtacaaggtcttctatgatctagctctgcactgcccaatagaactttctgagatgatggaaatgttctgtaactgtaatggccaacaggacggtcattagcctgtataccaactgcactcctgaaatatggctagtgtgatcaaagaactgcattttaaaatttaattaaatttaaacagctacatgtggccagtggccagcatactaggcaggtctagcttagctccaatttcaccagtcattcctatgttttagctctaccaagtaagtttccaagatcttgtttcatgtctttgaaccttgtatattctattccctttgcctaaatgtccttctctggcttgttcaccttgcaatctatatccattaaggtatcactgagggggaaggcacaactagactccctgaaacacagtttttgtgtgtcttctttgttctactggtatacttggatacacttctacaactatacttctcttgtaatacgaatgtgtgtctttaaatgttttcatttctcctggtctgtgtgagtggactctgacacattaattttcagtacttagtcattgttcaactgtttgttgaatgaaataaatttaaatgtggaaaaagttttagcttccaacaagttctcattctaccacaacactataaagtaagtaacatttacttcatgtggcatcacttttcaagcatctttttctcactttagtctcacataatcttataagttaggcagaacaaatattaattcataaaattatcattaagtattttttgaacaatggagcaagtgagagacaaagaagttcaagatatggtccctgacttcaagaaacttaaaacccaactgagaaaaaaagatatacatgcttgaagacaaaaaaaaaagtaacaatacagtccataaatgatattgccaaaagaagaaaagtttcaaaaaggaaatctgaaaatctcaacatgcccaagagaaaaagcagcgtggaggctgggtggaggagggagtggagcccctcagctgctcccctgctcttaaaggagtgtgttcttagcgtgaagcacagctacagtatctccatgcttccttagacatatgtcaaaaaccactaacaattagcaagtgccatagggaactgcaaaaaaaaggatcaatggggatagagtggtaagagaaggcttggtgagtaggagggaatgaagctcggttttaaattaagggtagaattcaaattaagaggaaaggaagaagctggttagttactgaatgagatgatgtaaacaaaggctgagaggtgggaatgaagagctcaggggattggatttatcttataaatcaaagagaactatgaaaaatctacaagaaagaggaacagtaagatatatggtactgcacaataattagtcagaggctagggtaagagacagactgaagaaacgtaaagagcactcaggttggcagtgaggaagaatttacgatagtttaggcacgatatgatgaggactgaagtaagataatggtatgaataggcagaaggggcatttatataaagacagtgtaaaatgaagcatacggagattaaaacttgcaagatcataaaacaagtgaatggaagaccactgtaggacaagaaattggttcttccaattggaataaaaatgtgttgcctttccatgcaacatgtaacttttccagtgggctctaagggcatgtttgtccatttgtttgtctatccaaccaatccaaaatattagatgaccacgtaagaaataaaaaactgagtatgaaatagcctctgattttaatcacagcttggccaaagacagagaagaacaattcacaccacaggtaagcctgactcttacaggaaaacatataagctttcagtatcatttcagaagactgaggttctggcattaaagaaatgattacacatctgtttacaggtctggcaagatggaagctggcactgaaagtttatcctaaatagaattctgcaggcagctgactatggtgaactaatgagtaagaaataaaatgactctatagtgcttttttttttaaggcatacaaattaaaatgagataccatttccacctatcaaactggcaaagtcaatttttaaatacaaaacccagcactggtaaagcagggtaaagggaatctggcactctcataatactactgtgtaagtttgtaccaactctgtggaaggcaattttagacagtagaattcttcatagctcttgtcctggtaattctatttctgggaatttatcttaaggatatagtcatggaaacaatgcaataacatacttacaaaagcatatagcttcactgattaagacagcaagaaatggaaacaatagttaattaaataataagttttatttccaacaatagtaaacttacagtataaaggataaccatacagtctaaaaagttgttcaggaatatttatggtaaagaaagaaatgtgaatgataaagagagaaagaggtaaataataaaacaatctcaaatctccaatttggaggaaaaaggatttgcctatgaaaagatgctgaactaatttgttaaaatgctaacccattttcttttcaaaaccttctacaaaacactttctttactaaagtatatttaataattagacagttgttcttctgatcaaagttatgcttcaaaatctcagtaaaacttttaatatataaaaatttttaaatgaataattactgggtattaaaaacaaacagaaataggtcctaggttgagttaaatgtaagttgggatgaaatttcccttaaaaaaaaaacttacatttaaattcttaaaacttagtttttaagaaaatctttatttctatatacttttaaaaaagctttaaaaagcagtaatagaaattgtatcattttataggtttctcttttctccttagctgccagaaaatccagagtcaaatgtaaggagaaaaggaatgagtacactctagtactttgtaacattgactcttaattcctttttaaaggtctgacttttaaaggttgttcttttacagtttaaaacctaaaactttacatataaatgtaaaacattcattgtctcagagagatacaacataagttgtttttttttccccctctcatctgtctctaggtcattcttagatcccatagggatcggagctaacattgttaagtatatcttctgtagccttccagaaatatactatgtataatcatatttgtatttgtctgcaggatatagttcttcttttacttctttttttacagaggagtcatactctacatgtatcttttcaaacttacaatgtttcatatacataataacataaactagcatattaaaaaggtgcttcacttttcttaattgttatatcacactattggtagacatttattttcagaactgggctgtaaaaataatgccgcagtgaaatttctatatacctttgtacattttattaattcaacaaatagttactgggttcccactatctcccagatgttgttctaggtgcaaagaataacagtgagcaagacagacaataaacaatacaaaaaaatatttaagataatttcagatagtgaaaaatgtcatgaagaccatcaagaataattcaataagtatgtaagagaaggtgatctttaagctgagatctgaaagataaacagcagcttgccatcagaagatcaggaagaggtgttcttagcaagggaaacagtagaacaaaggcccttggcaggaaggagtctggcatatttcagaaatgcagaggaacagtgtggataacaggtaggcaggagtcagagcactcaaggaatatggatattaagtgtaaaattaagccactaggttaaagagtctaaaacaaggatggaataagaatctgattttgctagtttatctacaggataaattcctagaaaagaaatcctaggtcaaaaggtgtgtggaatttaatatcttgacagacattgctcaaatgacctcaaaaaactacacttatttatatgcctatgaaaaacatatgtatggtatctgcttctccaaaccttaacaatattggatgttgctttaaaaatcttagccaagaggtaagaaatgatataaactttaaaatctttgccagtaagtgagaaattattcaaatttggttccaattttatttttagtttctctgttatgtatttttcagtattatatattttaatttctctacactaaggatttgccatgactattagaaataggcaaggtaaaccacatatatagaacagttctatgacagtatgacataaatgcataactcacatctggcacaggaaaactagactgcaaaatgacggcagtttaatattcagaaatctcacttattgttactcttcctctagtgcaaaacctacctacccacaagttagttctactgtctttctcacaattcaggagactttaaaggaagatgaatacacatctttgtaaaggattctaacttcttagaagtaaatttggtgcacaaagagtttttgcagttaaaatattgatagatataaattttactgtattccaaaaggtttgtgcttatttctgttcacaccccaagtgtggcaagtaggaaacagtgatgtcctttacatttccaattacatccctaattccctatatccttaagttagatatcttgatccccatagtcaacatttaacaatgtagaagttgtgaggtatggataattattcactaaaaccaaatagcttaaaatgaatttgatgcattttatttgaccaattatacttatttaggtgatacaaaactaactgatatacagaacagatgggaaaaaatactaatagaaataattttttatattttcttgtctatgtctataaatcttttgtaatagatgttgattattttgagacatgtaaatgaaagttactataaaaatgaaaaatattactgctaagcacagattaaaagatttaaatttcaatacttacaatcatctagatctagaagtgaaacatctttggtaagaggatttctatcttgctttgtctttttttctttctcctataaaataataaatattttatttattgcatattctatcttaaaaatctatgacatagtccttaacatttcaaaacaaacatttttcccctttgcttagtcttccagaaaaaaatcaaattaagtttttatatggttatgtgaaatgcttttttgaatcaaaaattcagttagcgcatgatatttcttcttcaccttgcaaacttcaaaaatattttttacttagagattataaaggaccttcagaaggaaacttaaagtaaataattattttatattctgacaacttttggtaacataaaaatctaacgtgactctttggtagaaagtgtacaaatattctcaaaaataattttaaaacaagttgatttaagaaaaagaaatgcttaaacaatacatgcttagctctgtgtttagcttaaacaatacatgcttagctctgggcttgggatagctcagcctttttgagaggcagtctgtaacaggcactgtactaggaactttacatttcaacactgttttgcatcagacttcttttgccaaagatattaattaaaaaccataaatattttcaggctcttgctctttagggttgcaaagaattaatttactttcttttctattttcctttcgggagggtaaagtattccaatatttctatgcataattagggcttctcccacctcaaatttgcttattcagtctattatagttttgaaatgtggatacctgtagattatagattcctaagcctcaaggtagtcacagtttgtttagagattcagaaaagatgtgtaaccatgaaaaaaaaaaaggcacagtactgagtagaagtataaacaattaaagaccaacaaggattagggtattaaacagatttatttgggccatcgttacctaactttataatttttttacattaaaccttcacaagttgaaggccaaaacttaagcttacgacaaaatgttgttgtacacctattcagtcattcattgattcatacatatgtatagaatttttaatagattctgtgctaagcaatggaagtaacacaaccaagacagacacagtctagtacctgccttcagatgacttataatccaccaaaggagtttatatcttattgctaatgtaagtaagtacaaatatttttgaagtagtcctttaactacagaaaggtatcactaaagcaaaaggtactttactgacatttaaagtctatatagtgttagagctcttatagtagtgaacatacatgaacaagagcaatatatcacataacatatctggtaacattttaaaacgatttaaatcctgttttttttccccccttccaccaatactcagaaaaattattttcaaggatcacacaataatacacattaaaatactagctagaaacatcagcactgattttcttcaaaatatttatttatgccactgaaaactccaaatcatctaggtgggttttaattttctttcattatttaaaaacaaagcaagcaatatgtgtccttctctccacacctgaaataaacaacaatttctaggactggaggaagaaaaataaaagaaatgttagttctgaagctgaaatgtgaaagttgcaggtaacaaaaacacattcagaatgaatatgccatctcaacaagaataacattcctgtgaagaaagcacataaaacaaaaagcttatcaccatgtgactttatcaaaatgccatgctgagcacaatgggtgtagcttcctataacctacaatggtgcatggctgtctttatggaactgtaacctccccacctgaaaaattagaaacctatcaaatcaggacaaagttaaatctggaggcaggtctatataccttattttctacttcacagctaagagtgtgtaacaatatctattaaacacacatcaggtcacatataacacaggacagaactgcatgtggaattggcataatctcttattataagcctaaaagaaaaagaaaaaaaggctctcaaaaggacagaatttcattgactttctgagtacagcaaataactggtgactgaaatacaacattagcaatagataacggtcattcctactgaattgaaaaagccttgcattctgaatcaaggctgtaaaaagcatcgtgatgtgtttggcattcctctcttatttttcatttctcattttaaaaaatccatagtaagttcaaaacattttcatacttaaaggatctactttaaaaataaaaatctgaattctaaacaaagaagttaagagccccattccatcaaacatttctccatttgcaattcatcttggtaatagagacagaacctgggtaaatgcatataggacttgaggcaggagatttttcttgctcaatgcataattcatgtgctccgcctgcaaagtgtgtaaaatgagaatttcacaccacagcatgagccatggagctgcagagaaaaggcagacgaaatcatattttactgtgtgaattttatttcttaccctcccaatatttatacaaaaccatcattgacaaaccaaacacattgacagatcacccactgtttccattgtgttagtacttgagaagagatcaggcagaaagatagacaatttgtttttgtatatttttttaaatagaggattaggtttttaacagctgagtgactgtattagacttttataaggacaacagtaactgatcttaaaatctcactacaaaaatacctagttatcaattcatcatcctaaaatctccatttgtttctatggtattcgattatacacctcaacacatcaacattttcaaaatgaaatacaaagtcacagggttaagaaactgatttctatttaacatatttcatttcaagtaataaataaaagattctggaaatacttattaagctccaaagaatacaaacaaaaaaatgtaataatataccttgtaaggattttttaaaatctattatgtatgtttatcttcatgctgatccaaaaaaaaagaaaaagggaagcaaaaagaagatctaacacaacaaacatcaaatatgcttcctaactggaaaccattataaagaggtttgaaatttaaaactataaaacaggataaatggtaatataagtttgtcaaacctacattatgctttggaagcaacaaaaattcaaggcttatttctagcctcacagggcaaggtatccacaagaaatattttcagctagaattaccaagcaaagacaatttaatgattctcttgccttcaagtcatctaacaaatctgattttaaaaatctgaggctcacacttacactttgctttaaaacaaaattacactgccagaaaattgagacttctatacaagttaaaaagaagtctaaactgttaaacaactcttccctattagattatacctacttcaataagaaagattgcttaatggcattcactctgatttaaagatctcaattgaagtgaaatgctatttctgttctggagaacttaaaatatgaactaaattggaaaagacataaattgaaagaggcaagcctttgaattgtcagagtaaaaactaatattctacagtcttcagagaagttatataattgcaacaatcataaatacctggaaaaacccaagtaaaccttgtttcctattcacagatagggcagaaaactaatcagaaaatagttcctttcacaatctattcatactacatctattcatctattcatactacatcccatatttactttatacccaagaatctttcacatggtagatcttttactgaggtatgtctcagtatttactgacatctgaacactactcataagacactgaccagtccaaagagcacagaaagatttaattagcttctgtgcacctctcaaaaagagactaacaaagctttgtgagatctctataaatgtgataaagaccactgacaaaagcatcttaaacactgctaggatatagagatgatattatttttcttaaagctggtaaacatattaaccttaattttgattcaaatatggaaatgctcttagtattaaatgctattaggtacaaatatattaaatatatctattttccatcaatggattattatgcttaatataaagtaaataattaaaatactactaatatttttaaggaaatacataaaattattcacaataaattaccattatgacttaaaatttttattattttaatcacagcttatttgaatatttagcaggtgctgcatagacattgaggatatcatcaaaactactgaatcacagttcaggtatgaatagtgggacgaataaggtgatggcagaaacaactatagtaagtgggaatgccctaacttatttgtgtgttagtcgctcagtcgtgtctgactctttgcgaccccatggactgtagcctgccgggctcctctgtccataggattttccagacaagaatactggagtgggttgccatctcctaacttattggctgattataaaaacactgaagtcatgttcaatgaagaaaaaaaaaaaccctggcaacttaagaaatatattttaaataaaatttttaccatctgttcaacacataactttaactacaggcagaataaaacatggtataaagtgatataaatgtgaatgtcttcctgatttaatatggcctgtattactcaattttttctccactcttctgtgtaaaaaaaaatatctttcctaaaaaccatgtgaaatatgtgaaagtactgaagatacagattaaaactaattttgttacaggcattatacaaactccaagagatagtaaaggacagaggagcctggtgtgctacaggccatgaggtcactaagagttagacatgacatagcagctgaacacatattatttcataaaaggattagactcaaattaaaatgtttattaaatttagttcaggaaagaacatctacaaataaaaatatgcttgcccatcaaaataattgtaactgaagagaaagataattttctttggttttcactgacaatatctgacttcagtggaggccatctcccaatcagtaagagaaacaaaccaacatgacatcagaacaaaccaaccgacaccagcagttttgagttttatggaaatgcaggggtatggtgctgaatagacaaacacttaggaacagatacaatttaacagcagttctcacctactgccctacaccattctcacctgactgtcccggcaccactcatgtgagtaaaaccctctagtcattaatatccttcagtccatgcactcattctcaactagaagtgaggaactgcccttgatacaaggccacttttctcctcagcttatattttctgtaataagggaaaaaatacaacaagaagatcaaaggcataggaatggaaaagcacactgtatgtcatgagagcatgaacagtccattgggattaaaacacaagaggggttaagactggagaggtgggtttggacctttgagcttgaggagttcactgaactcaaagacaatggggtaccattgtaggtgactttgacagtaagctggcagctgtctggaaggactggggctggttccaaggatgacaaaggcagtggtgtatggactacacaaggaagagatgacttgtgatggtgatggtagggaaagaataaacaggtatgagaaacaatatacaaaatctctaagacttggcaacagcgcatacaaataggatgaagtaggggtcaaagacagctgtggggctccaaatccgggagaacagaaagaatgccggtaccgagtgacagatcgcgtctctgggtatattaggtttaggaaaccagcagctcctaagaggtctaagaatctgggttgaataagaaaatctacagatgttatcatggaagtaattcagagaaatgttttagctgatgttactagagttaataagtctcacaacagtaaaatgtagaggaaataaaggactaaaattaatccacatcaattaatatttttgaaaaaaatgtgaactgagaagcactaactttggagcaatgttcacacttgggtgtcagaagaggagtaaaaagtgaaaaataaaaaaattaaagtgttagaaaagtcaaaagaaaaaggatgaagagagtttcaagtagtagggatattggcataaaaagattagagaaggataaactaagagaaggttcctggttttggagaaagatcatgggtgcctgttcagagagcagtacctataggaagtaagagaagtagaaatcaatttaaaagggattaagaaataattgggttaagaggtagtagctggagaacatctagattattcttctaatctctccctctcacacgtcctctctctctctcttccattcccttctcctgtctttaaaagaaggagagacctgaatgctttcgttggcagaggaggaactaaggaaaaaagagactgaaggtgcaatggaggtagaagactatcaactaaacgagtctaaaaggaaacaggatgctaagtggacagggagtacttactctgagttggattcaaggataaaggaggagggtaaattgagattgtgtgtcagagagtagagaggtaggagatactcatagtgaatggcaggtcagtcttctgcagatagcggatgagatcagaggcttcaggtaaggggtcacacctgaccattaatttctaactagaaaggtatttaaaaaattggaaaaatgcaggagacataagagtgacaaaatattttgggttccttttagcactggtgttctgtaaccctaatactggtccctcagagaactgatattcaagtttaaaaatgttaacactaatgttttatatttataaagggctttacattgatctttcacatctgatttttttataatagcactgaaagaagcagagtaggtataaagcatttctactttatagatgaggaaactgaagcataaagatattatcttccaacaaggagaacactatacccatctcataggacctccataaaatgaactgttttcaaagccatatattcaaggtaccccaaggtcccattttcacgctcaatatctctaaaacacattgtccaaatgaaagaaaaggttgagagagtaaaagtatagctttagctgggctgcagacttaaggtatatgaatttttagcactaacatactgtcatgctaaattaaggtaaaacacccaccatctgcctccattactcataatttagagtggaaaccacaacatggtacaagaagaacttttctacaattatagtgtggtccattattagaaaactggcacacgtgcaattgcatgctatgtttcaaatcactcagaaagaaataaaaagaaaaaaaaatagttatgatggcttcaaggtggagaatacaaattaaaacaaacaatcctataatctgcctgttaaagacaggaaaggcattacaacatatagaaaatgaactatataggcaaaacacatagacacaaaactatcaacaatgtgaataaaatctgaatttctcacgagtcttggatcactgcattactttgaaatttcataatgatgttctacagtaaaatattttcaactactaagcaattttatctgatcactgaaagtgacagagaagaaataaactgaacctctggcctggggcacctctgtgagattctaatgtccaactaaagtctgcaatttttcaacaaaacttcattagaataactcacttgtacccactggacaactcttaatttcttccttggttattttggaaaaaactcagtttctaaagctcttttattttgaataaaatcttaagatcattttgtaatttaatataagtaggaaatgagaggatatccaactcactgagtagtaaatttataagaggccagattaataaacctaaaaatctctaagattttatgtgaatttttgaaaaataaaatcccatgttatatactacatacagacataaattttaaatataaattcaggtttaaaataggtttttctataattaagaatatttaaagacagacaaatactagtcaatgtttaaagcacatttcttctttttcaaaaatatggttattctttaacaataagtctttgatggaggaggacaattattaccttgatgattaatttattttcatacttgcctactaaaatgatttattcaagaaattcatgttactagaacaaataaatgaaaaaaatagtgcatttaaaaaagctgaattcaataaaaaggtgtgatcatattttcaacatatggaataatacatttattcataaaaaccactgcatttgaaactgagcaccaccacgatccatttataggatgggaataataattaaaaatcaaaaggatacgtattaagtctgaattttgtattaaaaactacattttccaattttttttttgctgctagcagacaaggtttagtgctacagatactgttctaaaaaatcattaattgctcttttttttcagccgcacagtgcagcatgcaggatcttagttccctgatcggggatcaaacccaggcttcctgcagtggaagcttggagtcttaaccactggtccaccagagaagtccctataatcattctattgccacaagtggttcttgcatttgtttttaaatatgttactgcatttttattaattattaaagaatttatactctttaattaaacctttaaaaattattatccaaaatgcctgatatatttttaaaaagtatattagtcttaatttcttatgaagcatgtacatttatatttctttgcgcaacactacttctgtgagggaatagtactgagtaaagaggaagtcaaagtcccctctacttcccatctggcaaaagcttcccttgtcacatcacagccaagaaacaaaaggtcatactcataacactgaggtctctaactgtggttggaaaatgtgaagttttagttctaacttctctgcagagttgagttatgagggaagtaataattacaaaaaaaaaaaaaaatcaaaataaaatcacaggtgtggatgaacgaagatggtgttttagttgtcagtgacgtattaaattccttccctgctttcttgattttcaacaaaacaaatttttagaaatatttattcataattgtgaaaaggctgaagaatatttactttctgttataaaaatgtataatctcttaccttagtaacttttctggattcagattcactttcagattctgattctgattcagaatccgaagaactctcttctattgaactagattcaccactggaagactctgaagttttagagttttctttttccttatccacatctttagaatcactaatcagaataataaaatttgaaatattagatacttacattaaaaagtagtttgaaaaatcaaatgacaagtgttacaatttttccattttgcatatgaatcaaaatctttattagagaagtatatttcactgagaaccatttctttttagtgtatagacagtaaaaatggttttaaatttccaaaacatgttaatgaaataataataaagacagtattatctataactaaatgaatcagaatccattcaaaactaaaccatatcacacacacttcaagtgcaaaagataataaaataagactaaatgacataagtagaaaataataaaatgtttgatttactaggactacacattaggtgctaacaacttcagaaatacttaggcagattttaaagtaccatctcaaaatactcattaaaaatttaaatacttataatctacttttgctaatacagacttgcattttatagattattctgcccaagaaaatgatttacatatgttcccaaatatgcccctgtaacatatacgagaaaacatcaaccagttcaaaagagaattcttctaatgtactaaattttactaaaaatgtaagataatcagataaatactaaagttttaaaataccaaatgatcaaacctaactgctgatgttcattttgttcactcattcccttatttaacaaatatttactgactgccctccatgagctggcactatgttaggtactaagagtaatagtggttagtaagatacaggtatctccatactgctcctttttaaagtctacagtcagtccattgcaagatacagagaagttaaactggcagtgacaagaaagcatggtaaacaataaataacaaagtatatactgtgtcctgagaatacctgaaggagtatctaaacaaaacagatcaagactgggacccttcctagaggaagagacacatgagttgaaagagaggaataaggcaggaagaagggaaggggaaaaggtctccagaaagagatcacacacggtgttccctcaggggaaaagagatagcttggaatcttttttattttctcaaatttgagggtctaacttctctttatcatatgtgtatatacgtgtatattgttttaaaaatccaccttgtgccaggtagtataaggcaattcataaacaattatctaattcagatgttttaacacgttattcccaggtggcgctactggtaaagaacccacaggccagtgtaggaaagttaagagacgtgggtttgatccttgggccaggaagatcccgtggtagagggcatggcaacccactctagtttccttgggcttccctggtggctcacgttgtaaagaatctgtctgcagtgcaggagacctgagtttgctccctgggttgggaagatcccctggagaagggcatggcaacccactccagtattcttgtctggagaattccaagaacagaggaacctgcaaggttacagtccacggggtcacaaagagttggatacgactgagtgactaagcagagcacagcagttatgactactaaagggtggttttgaagatacttaaagctccttagctttgaaaaattatcacatagttatactggcaaagttttctaaaaaattataagagtcaagaggaaaaacacctggggagggtgagtggttaggcaactggaagaatcattatttccctgaactgatttttgtgcaggaaatatgtgattgctgtttattaaaaatggagtcatggtaacatctcagagcacatgtaattatatttgatgactaaaaagtatgttttttttcccctcccccaagatggcaatttattatctcccattagtggttaaaacatatacctaaaatataaggtttagaatgtatctgagatttccttttatataacaaaccatttttaaaaattcaaacatgagtttaaaaaagcctgtttctaaaaaaaaataaaaataaaaataaaaaaataatttaaaaaaagcctgtttctgaagaaaaaaataatgaaactaacacaatttatgattataagcttctagcatattgacttttgctatcagaaaagacacttggtgctctgaacaaaactttgccttcctaagacatatgacattcttcacaaactaagtaatcacagatggacatgagtttgagcagactctgggagacagtgaaggacagggaagcctgaagtattgcagtccacggggtcacaaaggtcggacatgacttagtgactgaacagcaacaaatcatagatattctgacattaaactagaagcacagaacctctctctgagaaaaggctactgcaaaccaagcaactggcttgctgcaacaagtgagtgactcggactatacttagcttctagcctttaagataagattttaaaggtaaaagtgttattttattatgcatcactcaattttgatgggtaattattgtttaccttactgcttagagtttcagatgttaacctaatgaaaagaatttactggtaactagctttttaactttgcatgatgaaaagcctgtattaatttaacctacagatttcatttgttctgaacaggaaaaacaatataaatcacttttaaaatcattaaatcctgacttaaattaataaagtcataattagggcattatgctgtgtttgttatggaagtggcagggcgagctgctttaattactgtctgtaataaaaggagcagagagcgtactgcgccccaatcagtgctgtcagccacgactgagctgggctgcaagctcatcaactgagcgggcagcaggcgcccagggaaagggccatcgtgtctgcagaggccactctctgacagcagtggggaaaacagactcagacaatccaaggtattagccccaattactcaaaattttaatgacactttaacacatgataatattgttgataatgggagatcttaaaaagtgctaacacttaaataccttatgaccgtcttccttcacagcccctgactctaatatttggatcataatctttttaatataacattatttagaaaaatcaattgtcttagttacataatggcaaagtgttgaaggatttaattttcactctcagcaaaattgctgcaaaaggtaattaagtgtttcataccaactgcatgatcacttaactcggctttccaaggttacaccaattttcaaaatgtaaccccaagatttgttcaagttcaaaatggaaactgatcattacaagtaggagaataatgtgaattagtattttaaattaatattaaaagacttacagtctgtttgggaaataaacacacactcattttttcactcaatgttagaccaggggaaaagaccgcagaatttttgtgaaggaaatagctcaccctttccctctggcttcggcatgcttggccgctcttccgctctcggcctccgactcacttccactctcacccgagtcctcaccgctgtccccactgtggtcttcttcctcgtcttccccactttcacttccagacgcactctctgaaaaaaaaaaaaaaaaaacaaaaaccagatgctctttgatttatagccacttaataaatacaagggatagaagcaagtatcaacattcatcacaaatgaaatgggatgctgaattttcacgtagtggaccccactggatccacagtgtctgtatctgctgtctggtcactcagacctccagaaccctgcagcagagtgagcacagtggggctccaatacccagagaaggaacagaaaagatcaaccaagtaaaacaatgtgagcatttcttgcttcccaaacccatacatgtcttagctacagcaaaactttttatttaaagactgattatgagggtgactcatcagaaaaggccctgattatggaaagagtgaaggcaggaggacaaggggaggacatagggagagatggttggatggcattgctgactcaatggacatgagtttgagcaagctccaggagatggtaaaggacagggaagtctggcatgctgcagtccatggggtcccaaagagtcagacatgactgagcgactgaacaacaatgaaggtgatgtaagaataaagaaataattttatttcctctacttataaagggaaattttatttagagaaacagaagggattattgaatcttaggaacaaattttgagagggaaaagagctgttcaaatcatcttcaaaaattccttaattcaaaggcaacaaagcaaaatcactaatcactagtacttgttttagctagtgtaagactcttctgtaagtgaaagaaatgataaagttacactgaggaactacacagtgaaaacttttatgtataaattatggcatactagggcttactgaagaagtgaagtgaagtaactcagtcgtgtccgactctttgtgaccccgtggactgtagcctaccaggctcctccctccgtgggactctccaggcacgagtactggagtgggctgccatttccttctccaggggatcttcctgacccagggatcgaacctaggtctcccgcattgcaggcagatgctttcacctctgagccatcagggaagccccatatacagcatgtttttgtgtattttaaacaggaagcataattttttggtagttgaaatgatgacacatgcagagttgtatcctggataagaggacacactgttttcctagcctatgatctatctgatgacatgtcctcagggaggaacatgttgctgttgttcagtcactcagctgtatctgactctttgtgactccatgggctgcagctgccaggcttccctgtccttcaccaactcccagagcttgcaaaaactcacgtccgttgagtcgatgatgccatccaaccattctggcctatgatctatctgatgaagtgtccccagggaagaacataacctctagttaaaatagtattctaacaggtaaatagtagtatctactctataaagattaattcatgtatcacacagcaaaaagctaggaatgcctatattcttttggaagcaacagttagaactggacatgaaacaacagattggttccaaataggaaaaggagtacgtcaaggctgtatattgtcaccctgcttatttaacttatatgcagagtacatcatgagaaacactgggctggaagaagcacaagctggaatcaagattgctgggagaaatatcaataacctcagatatgcagatgacaccactcttatggcagaaagtgaagaggaactaaaaagcctcttgatgaaagtgaaagaggagagtgaaaaagttggcttaaagctcaacattcagaaaactaagatcatggcatctggtcccatcacttcatgggaaacagatggggaaacagcagaaacagtgtcagactttattttgggggggctccaaaatcactgcagatggtgactgcagccatgaaattaaaagacgcttactccttggaaggaaagtcatgaccaacctagatagcatactgagaagcagagacattactttgccaacaaatgtccgtctagtcaaggctatggtttttccagtggtcatgtatggatgtgagagttggactgtgaagaaggctgagcactgaagaattgatgcttttgaactgtggtgttggagaagactcttgagggtcccctggactgcaaggagatccaaccagtccattctaaaggagatctgcctgggtgttctttggaaggaatgatgccaaagctgaaactccagtactctggccacctcatgcgaagagctgactcattggaaaagactctgatgctgggagggaatgggggcaggaggagaaggggacgacagaggatgagatggctggatggcatccctgactcgatggacgtgagtctgagtgaactccgggagttggtaatggacagggaggcctggcgtgctgcgattcatggggttgcagagttggacactactgagcgactgaactgaactgaactgaactgaactgagccatcaaggaaagtcccatagtgactttttacaaagaccaaaatttattttacccaaactttagaaaacaaaactgttgattaagggtgttttgaatttgttgtgaagtcaaagttaagcacacatacatgttaacttagataactggcttatgctgttacttttcatgtttttatgggagttcaaaacaaatctggatccagttcatttcaggcatcatttatttaaattttcaagttagaaaaatccttgaggaaatttgtttatcttcaagaagacgtgttcactggaaaaaaactggtatcttctaatgggaaaagttttctctttcttctggtagctagaagggaactcttactatccctactatacttcagataatgccatgaaaagccataatgttactggaatatttcaaatacatactgaaaaaggttagactctaaatagaacatgagcttgtgaataaatgggatggaaacaaatatctctaagagacactcttaactacacaacatatctttctcaatggtctatatcattcctgaaattccgtatttttagcattaactgtttggattgaagtaattttccccatttttcagcttattacttcagaaaataatgcaccacagactaatttgtcaaatactgaaaacaaaggcttaccaaatgtaaatttatgtctttcaacacgttaatgaacaccccaggcattgggggttagaattcagaaaagcatgagctcttttttcaattctatcgttttttagttatgggtctaagaggcaatgtcaaaaaaaaaaagcggttagaaattactttgaaaacttacatatcatagtaactttgatatgtaaatgaaaggaactgtttcagtcgtatgaacttcacctaaacctgctggctgaatattatgctccgggcctcactggtctataggaagcacggctgataaaccatggtgaataaggtttcccaatgaattaaagacccaccactgtcactgctgctctcagaagagtcctcttcctcctcagattcggagtaaaatttcttatcaggattctctttctttgcttttcctgctggggtccattcttttgcctgattttaaaaaagtaaaaatgtaaatatcaaggaattctcattaagggatctagtcttcaggcagacttaatcattcggaatactctgtgaaaccagaaggaagtttaaagcctcagtagaaaaggcaacactgagaagtcttgattcccactacccctaagtagagaaacataaactctcactcagaacctattgttttagatccacaaccttatacataacatataattttaaatacttttgtattcattggcctatagaagatttaagctaaagtaagacagtatagaagagagaagggcaattagaggcagaaggagtaagagcagtaagaaatccaacttcacagcttgatgttcggtgtgctgtgcttagttgctcagtcacgtctgtctgactctttgtgaccccatggactgtagcccgccaggctcctctgtctgtggggattctccaggcaagaatactggaatgggttgccatgccctcctccaggggatcttcccaatccagggattgaacccaggtctcatgcatcgcaggcggcttctttatcatctgagccaccagggaagcccaagaatataggagtgggtagccgatcccttctccaggggatcttcccaacccagggatcaaaccagggtctccccagcactgcaggtggaatctttatcagctgagttaccttgatgctgaggttttttaaaaaaaataaaataatcaaaacatttagtgtaggcaacaaatagcctgtaccatctcaacagcctgaaccctggggtaattctctgtgtgtttgtcatatcctagatatctaatccatcaagaaagcctataggccccttggtcctttaccaccgtactcagagccatctctctctctctctcggatcaccacaatagtctctgactggctatcttgtgtctagttccatctctcacccccactccaagttggctcaaaacagcagctagaaagattttattaattccaatcaagcccctctttctttgaaaaggtctgcaaaggcttcccattcacttagaacaaacgaagcccttacgataaaaacctgtcagccctacctgactcctgcagctgctctccctcctgcccacgtccctccagccactcatcacagtggcttccaacaccccagacgtgctcctccttgaggcccttctccaaagctgctcctacttccagcaccctcaccccagacgatcgcatggctcatttcctcacttctttcaagactctctacaagtgccacctcagggaggaccgccctactgaaaacttcaaccccccgtggagctgatcttacttccctggtggctcagatggtaaagtgtctgcctgcaatatgggagacccaggttcgatccctgggttgggaagatctcccggagaaagaaatggcaacccactccagtattcctgcctggagaatcccagggatggagcagcctttgcactaattttttttttctttgttttttggccacagcacttattattttctaatatactactgtatacaatttacatatttattgtaattgtcagtctatccctgcaagaacatcagcatctggagatcagagatgtttgaatattttgtacactgatatatcttaaatgtgtctgccacaaaaactattagttgggtgacagacccttaaaaactttaatacagtgtattgaagtaaaataaattattttcataactgtgactttgattcattaagaataaattaaatcatgcttcatacactctcttttaaagggcaaggaaatgtgtattttttaaaaggtcaagaacagttaagacgcatttatttatcacacttcagagttttcactatgtgccagcctgctagggccatctgttgtaaagaaatttacagtaagactgaggttcttactcaagaatggttctcagcactggatatctgtcagaatcacctgaaaatactttaaaaaaatattaatatcaataataaaaatactaatgctaaaaatgctaatgcttgggacccacttcccaagattctgattggtctggtacaggtctgacacatctgttttaagatctccatatgaatatagtataaagctaggttggaaaaccactgcgtagagggcttatgggcttaagatatgctgcttacaaaggtaagcttcagtaatctggaaaattactatctggacaaaaataaaaaaatgagcaaaagttactcaaatatatttgagtaagatactaacataagatcaacaatactgctttgtatgctctgtcctccagatatgaataaagacagtactctataaacaaagttctcctatatttaataaacagtaaagttcatattttttcttaaatccaaatacatttttctgcaagctagtaaaatgtgtgtcaggtcaatttatgaaaaaaaaaattatttagttagactatggctttccggacaagactaagtcatcatataaggaaaatcaggcgcctatgctcagaggggcataatattttgacagggccatggattctctattcatggagtttaaggttttaaagggtaaagactaaaaagtattttaattttttttatggtctgttatgactatgataactgtatcattcttagcaaaggaaataaaaaggtaaagagaagaggaaaaaaaataacagcactaatttgaaagtttcaatataagataaaatattgacagtagatgtgtttataaagcaaaatacccttgatatgcaaaactgagagaaaaggatcttctagaagcaagtaaaagcaaaaattgcaaagaatcttgaaaatttactagtggcataatatatatagtagctaatatcccggaaatggaaacgtgtgatgcagtgacttctagtgtcagtgtgactaggttccatattattttgattaaagtattagactgtctaaacttaggctgttattcttgctaagttagatttcatagtaataagacatgaccctgtaagatgacagtaagactagggtcacacacatattatgtgcataaatacagtgatgcgactttagacagggatgaggcagaatgaaaggcaagaaagattgtgtgaacactactttctacaatactgcagccaaatttgataataaaactatatatgctgtttttatatttaattaagtctttatagtataatttcaagtcaatgtgtccagagacaagcagattgaaactgttttctacatggcatcaatggagagtgagttttttccaaccaagttccatcagttataattattctccataataagttaccaattattaatttccacaatgtagtcagcaaaatgaaaaaagaaatcaatttgtccctgttcaattggacaggtgaaatgaatataagaaaacaggttattcaagtactgtccctataggtagttaatgcttagaagagcatgagaaaatggaagaagccagccaaacaaccaatctatcagccaatataagaacactgctgagaccaaattaaattgcatggcattgctatcaatttctgagatgatagttttatttaacattttttttccttttttttttttgtggattggggcagcaaggaggagggataagagcagaagtaggggtaggataaaaggatgattctacttgggccaaaacattaagtacctaataatgaaaagggacagaaccatgaaaacaacaaacaggcaaaagaaattaggagagagtattacttacaacaaagaacattctctttgtattctagtatctgaccaaatgtttcataaataagccaatctttttgaagaatacttaagagtagtatgtatatttggggagaaatcaccaaacttagttgcaaggagaaacatggaacttgttaagttttatatttttaaaaaaaatcatctctaaatagagataatttgtcacaacctgaaaacagtggtgttaataaatactaaggacagtctagaattgcaacaagctcaagcttcctctcatcatgttacataataaaatgcagtaagagtgggaacagtggactcagatatgaagtggtatcccaattctattacttactagctatggggacctgggcaatttacttaggttctctgaaccttggtttcgtcatctgcaaaacgggaataacaacaaccatcacttataataattatgaggcttaaacaagtaatgattataaaatattatcaaagaacactaccagggttagttactgattattattgccctggccacacttcaaagccagataagtttgagtaggtaagagaaacatacttttcaaagcagtcaaattaaatggctgtgccccaggtatttcctggcagtctagcggttaggacttggcactttcactgttgtggcccacgtttaatctctggtcagggaactaagaccctacaaggtgcaaagtgtgggtacggaattcttctacttaaaggaagacagttttttccccattgtatagggaaaagccagtaggcaagaagattaactgactttctcataggaattataacgactagttacctgaatcctagttcaatatatgtgctatactggaaaggcacccaggatgtaatacataatttttttttaattaattctatttaaaaaaatatcagatacatttcacataatcaatctctaaagacaatcagaagacccctctccttatttttcttgtttatataagaaagaaagagataatactaggaaagaacatcaattctcttattttagtgggcagcacgttataaagacctaggaaaagagtatttatacagagacttttttttttaatgtgaagcaatatagtattcattaattgtgaccttgttcaaggatatttttggtacataatgcttcctatttatatttggcttcatgtgaaaaaggttcctcagaaaagccaaaagaacactttgtatggtttctggaagagatagcaaaactgatttggagaatattgacaggaagcttatgagtctctaaactaagtgggaaaagctcaactccatgaaactaaatactttagaaattgaatctgcacagctacaaatgcagtctcacaaatgtgggtggcactgacgcagagaatccaattctccatttccgtgaaaaaaaggaacagtacatgtacaatgacataggaatactacaatatttagttcccagagcagcaagatatgtctaacacattatctttagaaataccagaacaattttcagttttcaacccccccccaaaaagcttttatacaaaacagcagctatcctagaatctcctactgcttgacaaaattaatttcagaaaggtcaacttaccaactctattacttctacatttcgaactgatgggtcaggcgccacctctggccaattagataattccaggtacccagttgctttggtgttgagagtgtgagataaagtgccaagctggaaatgatccctatctattaaaataaaggaaaatataaaataaacaatctgagctgcatatgacagagaacaatcctaatcagagctcaaggtaattggcatattacctcaaatgtcaaggaataaatataaactaggaaactcttcagaggtcaaaaaaactgatttcagtccatggattacaataatctccccgataatggtcaataaaaaagctaatcagtcagtgtgtttagaggtgttgctctgatatgtagcttctctaaaaattactttactgtgaatattaagaatgacagcacagttaaacaatccatatacatgtcttgccaccaacacattcagaattttaatagttttactacaaaactgaactgctttttatccctttacagcaattaaataagaaacaatatgaaaaccaaagtatataatcatttgattcccactgtaatggctacttgtgaaactgataaattactccttttaaaaagctggggaaaataagtcaatttccatctctgaaaagcaaacaaatataaaggaatacttctatgaaataattctttccagaaaagcttatgttagtgtacacagaatatttaataactcactattaaggtgaattatatatcccttattaaacaaaggtatctatttaaaccagaaatgaagtcaatgtctgcaaaaacaacacagcttttatctattgttcagtcaaatcatttggtaagaataaacgtcagaagactgaaattatttaggtaaataaggcctataaaaacataaacttgaactaatataaagcttgtttcggagaagagatgaacgaacggaaagcacactttttgtatttatatatttatacacactaatcacatattttctaagagatatattttaaacatgttagaaatgggatataacatcataatttttaagataacatataatattctgtaggtatattctgataataatacctttaaaaggagattcaagcagtggtgcgggtttctgtgccaggaatatttttttggcatatttacttaaagctccactcttctcattcggaacaataagctgcctaataaatcttgtacgatctctgatgtcgtagttttgatcatacttgccgagatttaatatgtactgggtaagcaattttgtctgttggaaaaaaaccgaacaagatgagaatacagttatttatgattattgataactctggataaacatatttaaagaggtaataaaaatgaatggttatgtcaaacaaatgttgttccatagggaatatgcatttctaacactgcaaatggaattctgaagccaaagcacatgtcctcttcagtattggggaggtgaatgctgagtactgagaagcagccatgtgctagattattaaactgctgaagtggaaagaaaggcatcattaaaaaaataatcatatatggcaaacccgctgaagggtctacgtgagaataatgagtgtggaaatacaactaaaaacatggcactcaagacttaatcggaaaaatatgcaggacatcaaaacatcagagagtattagggggctggcaagctgcttctcctgaggtgtgttttatgaagagatactgtccctggcataagcagtgtctgcactctgactgcactcagttactttaccctgaattatgacccattaaagcagacacatgaatcactgaactggattactgcaaattatttgcagtgcatttagctgttactttttcataaaagcaagctgctgatgccctctaaaaactaggataaaagactccttccatttttttccccatattgcttatggcctctagtaatattggtcatttatttatttatgttagggaacaacttattatagtagcttttacactctaataagatttcctaagtcaatttctgactgtactacattaacatatattgagataattttaataataattaaaccaaaattgaaatgttaacaaaataggtttgtattttcaactcattactttattgaaaaagcgtaattttaatttagaaggttacacatatacaatcctaactataaacaggattcataatacatggaaaaaataaacatttgtattagaacattttatagacattagaaatagattaaaaacaataaaatccatcaagtcaggtagagctaaagatagttctataccaataagtcacgatacaggaatggtgtggcaaactcttttacaatattaattcattaagataattgatttggatagaaagcaaccttctttcagtaacaatctatttaaaaaccattaacctagttttactaaagtagaactacaaaaaatacagatgaaaaatgttaatagagctattctaaatttggttaacaactgctattcactaattactagactaggttggttcaacgacacataagaaaatttctatgattgattttttaaggacaatcagcaaaacagtcaccaagtgaataacccaggtcaacccaaggtacactggactgtgtaatcaacttgctgagataacctggaaaatacatcctactgttaagtttcttcaactgtagtgagaattcataactaagttaactctgtaaagtatatttgaatgttgggatttagaatatgcaactagaataattcagataaaaaagtctattcattgcagcactttttaaagctagtggagtgattcatctcgcttttatttctagtctctgaaattaatttttaggaagttaattatttgaaatattaactgtatttaaagtgagatagaaaattttaagttattaagattatgtaatttctatactatgcatttattgagtataaaacttgctttaatatatgggtgggttatgaaataattatagcaagtgtattttcaaaattaaaattctaaaagataaaaacatatccaggccccatgatacattaaaaacataaacagaataattaatttactcacatacctctttattcacataccttaatcaatttcttagctctatctctaaaaccaagtcattggtatttatctaaagaatgcaattttatatgtcttcaaaatggaattatcttcaaaatggaactttatgatcactaattatgaaagtattgacatttgcaacttattctttgctatagaacttaatatttttaatggagaaagtaccctctttacagtttgaatgatccaataagcatagaaaaaattctgttgaataaaggacattcttaatgctttcatgttaaaatttgtaaatatttcaagcctagatatttaaattttttccctccaacaaaattatctttatgagatgaaacttttgaataattctctatagtttaatatttcatcaaatttagctactgcaaaatcaactgccttctcaatttcatttcattctaatataaaatataaacttaaccaactaaaatagtagctccatcaaaaaagtcttcatcatagctgaaatactgcaaatgaaagaacttctacaattattagctcttaccacttaatttgctcaattcttcctttgtttttatcgggatgtatttcaatgtcattctctttgcaagatttgtttccaagaattgctattttgctaaagttttcaaaagcttaaggtttttgaaactctacctggtaaacactttaaaggtttccaaatgattttgaatcaaaatctaaccaacacacaaaaatctcacttaatctactccccatgcacccacccacctaatccaggcaaaaaagccagtatatgacacaggctaatttacaatgtagtttttcacaatatcacatttctaaaatcctgctggtcacatgcagcaaaaactgagtatgagagtgtgtgctgtcatgctgaagtatgctttttcaatatcagcttcatcacaagaattctgtagtttagttaaaccacacatatcaagtatcagtatatttgaccattatagttttatttcaattggtaaaataagcagagtgagtttgcaggcaccacaaccaatgcccaaaatatttctgttccatagttttcttaatttaataagaatgttgcttttaccatgacaacatttgttcagtgaaagccatgttggggcttttaaatttacaatagcattttacagtgattttgacagaataaactttcaaaagctttactcagattccatttacactgacagaagaaatgtacaaaagctttgagtaaaaatggtctattactggaattaattgttttttatttgaaaaccagcagcatcatttgggtcctttttctgctaatggagccagtacaataactgtcattgcttcattcctcatatgtgcaaaagaaaacttgtaataaaaataaacaaaactaaattttaaaagttacttgatctatatgagatcatgtctcacagaaagggatgtaaacatatttggcacctgcatacattaaatcgtcaccctgaggcccagacttcctaaatatcttccagttttgaaaacagatgctgaccctgttttagcagatttatcttatcttcagtttgttgtggggatagtggtatcactatgatttttgtggtagatggtacatgctgatgaacatttctgtgcaggttaaataatgatacagaaattctctacttcattcttcattaaatatatacttcaagttttcagaatttattgctgctggaattataacaacaacaaaaaaagaactgccaaataataaaataaataggttttagatttacagtacacagtaaatgacaaaactactgtagcaagagtgccctgaccactctcttgaatagtttatagcaagattgttctgtctctatctcctgcacatatttcgtccacaaccaacccgtaagtccccatgttttcctcttactccagccactgacagctgggagcttaatgctttgcacaggctgtgacacaacatgctggttaccatcaagttaccattagataaaacacttcaacacttatgtcaccaccaatggaaaaaagagggacttgccttatcagggcacgctttgttttctcagtacacatcctacatgttgctctaaacaggaaaggttagtcatgctatatctcaaaaaggttgggaaaagaaagacaaagtctttccatttaaatgtttctcatttttaaatgaaatttctgttcactacacttgtgtttcacaggccactagacaaaaccatggcaaaggttagaagtacaccatggaaacttacaaacttactctgtcttattttaatgcaactctccttggacagaaaggagatcaaaccagtcaatcctaaaggaaatcaaccctgaatatgcattcattggaaggactgatgctgaagctccagtgattcggccacctgatacgaagagcctactcactgatgctgagaaagactgagggcaaaagaagaagggagtggcaggatgagatggttagatagcaccactgactcaatggacataagttgagcaaactctgggagacagtgaagtacagggaagcctggtgtgctgcagtccatacggttgcaaagagtcggacacaacttagcgactgaacaataacaacaacagcttcaaaaaagaggaaaaccctgggataaagcctaaactggatgggacactgaaacaacagataaaaatcagatctgtcctgggcaacagtaacaaagaaaacagacacgatcacataaacaatcacggcatttcaatatggccaaaggctcaatcaaaaccagactggacattcaacagtacattcaaatgggttttataaaaaaaaaaatcatacaagatgaagagaatattataatgtaccataaatgacagacatattcaatagcatacatataccattgtattcaatttttatgccatattattttcctgtttaaggaatcatctctggggaaaaaaaattggggggaatgctttgtaaacatgaagatatccaatattctaaaaaaacttctcaaaacatgggcatcgtatttctacctaaatactcttgacaagtaataaactggtaaaaactatttgctcaacaatagccttcttcaatggagaaggcaatggccacccacttcagtactcttggcctggaaaatcccatggacggaggagcctggaaggctgtagtccatggggtctcgaagggtcggacacgactgagcgacttcactttcacttttcactttcatgcattggagaaggaaatggcaacccactccagtgttcttgcctggagaatcccagggatgggggagcctggtgggctgccgtctaaggggtcgcacagagtcggacacgactgaagcgacttagcagcagcagcagccttcttcaaatattacaggtcaacacaaaataatgaaaaagttatcttatagtcctaacatcagcttacacacaaaataatgaaaaagttatcttatagtcctaacatcagcttacacatatatttgtttatggaatgttaaaaaacacacaggactcagcatttaaaattggttccacatggttgtaacttttaaacagaaggatactagcaaatgtgtttggtaaatttaggagaactacacagaattcttaacatatatcagaggcaaatgtaagcagcactagtcttctagttaatcaatttcatcattttacgactagaactttacattttttttaattaaaaaattttattaaatgactctttaaattctatatggctttacaattttcaaaagtttcacagagatgatttcagaaaatcctgtaacaacctttccccccacctctatgtcaccgctcccccttccctctcctcactagtaaccagcagttatactctctatctgtgaatttacttcttttttgttttattcactagtttgttgtactttttagattctacatataagtgatatcacacagtatttgtcattctctgtcttacttcattaacataatgctatccaagtccatgcatgttgttgcaaatagcaaaaattttattctcttttatggctgagtagtattccattatccatggatggagcagcctggtgggctacagtccatagggtggcaaagagtcagacatgactgaagcaactgaatgagcgagtattccagtacagacatatatcacatgtgtgtgtgtatatatatgtgtgtatgtatatatatacacacacacacacaaatatataatatacactatacagtatatgtatatgtactatataccatatatgtgtttcattatactgttttatctatatctagccctcctccctccctgtctccctctatatatatgtatatcacatctttattcattcattggttgatagatacttaggttccttccataacttgccaattgtcaagtaatgctgttatgaacattggggtacacgtatcttgtattttgtgtgtgtgtgtgtgtatcttttgattagtgctttttatatttttttgtcagatatcaacccaggatttgaattgctgggtcacatgatagttctatttttagtttttctgagaaatctccatactgtttttcaccatgtctacatgaatttaccttcccaccaacagtgtataaggatttccttttctccagatccttgccaatatttgttattggtgttctctttgagtacagccattctaacaggtgtgaggtgctatctcattgtggttttcatccagatttccctaatgcctagcagttctgagtatcttttcatgtgcctgttggtcacctgcatttcctcaatgggaaaatgtttattcagttcttctgctcattttccaatcaagttgtttgcttttttgatatcaaattgtatgaggcgtttatatatgttggatattaatcccttattgatcacatcatttgcaaatatcttcttttcagtggactgtcttttcattttgttgatggtttcctttgctgtgcaaaagcttttaagcttcagttcagttcagtcgctcagttgtgtccgactctttgcgaccccatgaatcgcagcatgccaggcctccctgtccatcaccaactcccggagttcactcaaactcacgtccattgagtcagtgatgccatccagccatctcatcctctgtcgtccccttctcctcctgtccccaatccctcccagcatcagagtcttttccaatgagtcaactcttcgcatcaggtggccaaagtactggagtttcagcttcagcatcattccttccaaagaacaccaggactgatctcctttagaatagactggctggatttccttgcagtccaagggactcgcaagagtcttctccaacaccacagttcagaagcatcaattcttcagcgctcagccttcttcacagtccaactctcacatccatacatgaccactggaaaaaccatagccttgactaaatggacctttgttggcaaagtaatgtctctgcttttgaatatgctatctaggttggtcataactttccttccaaggagtaagcgtcttttaatttcatggctgcaatcaccatctgcagtgattttggagcccccccaaaataaagtctgacactgtttccactgtttccccatctatttcccatgaagtgatgggtccagatgccatgatcttcattttctgaatgttgagctttaagccaacttcttcactctcctctttcactttcatcaagaggctctttagtttctctttgctttctgccataagggtggtgtcatctgcatatctgaggttactgatatttctcccagcaatcttgattctagctgtgcttcttccagcccagcgtttctcatgatttactcttaagtttaattaggtccaatttgtttatttttgtttttgtttcctttgctttaggagatggatccaaataaatattgtgacttatgtcaaagagtgtcctatgtttttctctaggagttttatagtatccagtcttacatttaggtctttaacccattttgagtttatttttgtatacagtgatagagaacattctaatttcattcttttacatatagttgtctagctttcccagcaccacttactgaagagtctatcttttcttcattgtatattcttacctcttttgtcatagatgaattgactgtaagtgtgtggggtttttttctgagctctttattctgttccactgacttatatgtctgtttttgtgacagaaccatactgtcttgattatggtaactttctaatacaatctgaagattccctggagaagggaaaggctacccactccagtattctggcttggagagttccacagactgtgtagtccctgggatcgcaaagagtcggacacgactgagtatctttcactttcacatacaatctgaagtcaagaagtatgattccctcagctctgttctttctcaagattgcttcggctatctggaatttgtttccatacaaattctggagttactcattctagttctgtgaaaaacaccattggtattttgctaaggattgcactgtatcagaagattgccttgggtagtatggtcattttaacaaaagtaattcttccaatcaaagaacatggtatatctttccttttgtttgtgacatcttccatttctttcaccagtgtctaatagttttccaagtacaggtctttcatctccttaggtggtctttcatctcctttcatctcctaggtatttcattctttttaatcagacggtaaatgggactgtttccttaatttctcttcctcatagttcactgatagtatacagaaaaccagattttaaaaaattttacagtatacagattttttttgtcaacttgagtgttttacctttatatgttttatcttgactttttcaatgccaagaaaatttatccaagaaagggtaaaaacgtcactgcatagagcctgtgtcatcaaagaattttttgagtgctgtatctctggttctagttttgcaataattcctatggtttgtgcatttctataaagcataatgagttttaggaatatatatgttgaattagaaataactgaccatattattgtaactcccatcttacatattaggaaactaagtcttacgtagactgtataatcagtccaaaatcatgtagctagtaagtggtaaaacagtatttgaagtcagacagtctaatattggagcctgtacttttgattaccacctgacttccagtaattgacattaaatagctctaaggtagtcatcacataccaactgctttctaaatttccactgaaagagcccaaagtcaggaaattaaagaaagttacagaaaaagttcatctacagtcttaatcataatttttaaaaactatatgaatagctttatatctctataccaaaaaaattaaaatattaaagaatatgtaatactagacaaaatgttgatttttcaggtactatatttttcagttctagaacttccatttatttttttattagtttttatttctctgttaagagttcactttccatctattgtgaacacattttcctttatgtcatcaatcatttataaaagttgcttcaaatttatacctataaacttccacatctgagtcatctataagttggcttctggtttttgttttcttgaaaactggccttattttcctattcttgttcgttattgtgctaaaataaacataaaatttacactgcaaccatttttaagtacacagttcagtgttacgcaaccattactaccattattctccaaaaatttttatgtcttcacaaattgaaattctatacccattaaatagtgattctctgttcgagttcttacattgagtaaattgggatttatcttggacattatgaatgctgcactgtagaaaccctaaactttgctatattttgggttgggttcacagtacagactgtctcttcagtgctgttaaaattgcagttcagtccctttattattaactgtgtggctctaaatccatcatgcatatatgtggtccaggtgtcagccagaggcttggacagaattattcagattttgaagctcctcacactggctctttcctttctagaatcgttccttttcaatatctttggtggtagttttctttttgacgccaccaaaacagcctgcaggatcttagcttcctgacagggtctgaacctgggccctcagcagtgaaagcaaggagtcctaactactggaccaccagggaattccctgtattttctaaaactctgtcctctacttcctcaggcaggaggactctgggtttccttctggagtttcagtctcttatgtgtagtgccaactgaagactgaatttaggatcagacccagaaaagtgtcaatttcccttcagaatcttcccacttttaattactcttcagagacttcaggcagttgtttcctttttgtattttcccagagtttacagttgcccagtaggaatttactgaatactatcaaaagcagactgttgactaagtttcaaaatctcttttacactaaagaaagacatttgaggtattaaagaaatttattattcaattgtttttaggcatacaattcttatatctgctaaaaataaatttagatatcccttataattaaataatgcaataaaaattctgaaaatgctcattgagtgatctaggccacagggaagttggatctacaaatattggggcatcacggcaaatcagtttctgaacattgtggcctggactccctagttgagttttaaagatggctaaaattaacatgtatagaaaatatattttttaacatttataagaattttagtctcatatctagtagattatgaatcatgcaacttaaaaatgctgtctaatggaacttaaacattattctttagtgctaattctcacttacgaattctctaaaactccttgagaaatgagaaactggagaacagaacacaaccttacaggatacctttgttcatctatttttatatttaatcatttaaaaacaatgagttttttttctaaacataactgtttcaccagctggtggtcaagtctattatggttatctagaagtatcattctaaaatacacaatacaacacttcagaagttcagctccaaaaaatgagttcaagaaaaaataaaaacagctgagtacaaactatgttgtcttcaaagtcactgaataaaaagttatggaatatactttacaatttctgaacatagagtactatgctctattattggttatttactgctccaaagaacctttatttagttttgtaagacataactacgtcagtgttaacagaataattttgtattacttttctttgatgataacctataagctagatttatctatagcagccaaaccattgttatgatacgctgtgtttagtagctcagtcgtgtctgactctttgtgaccccatggactgttgccttgccaggctcctctgcccatggggattctccaggcaagaatactggagtgggttaccatgccctccaccatgggatcttcccaacgcagggatcaaacccaggtctcctgcactgcaggcggattctttactgtgtgagcttccagggaagcccactgttccaaaaaggccataaaaatcacatattctaggtatcatggtaacattcacaataccatacgaagagtaaaaacaatgaatttcaggctaaaacagtgtttttatcaataaagaagcaactcaagagcaaacacagttttccccttttactcagttttttaaaaatacctcattgcatgaattaatttacatgacacctggaaatgactaactgattcctttcaaagattgacttaaaatataaagataaaatctaaatcatagaaatatgctcaaaatatctgtgattatttggtcacaaatttgatacacccatcagccaaagctatattaatacaactcacatcacaattaggaatgaagacaacctgaaactatacagcaatgaagttgaggagttacttgagaatttctcattctttttcctttatctaaacagctatttagacaaaggaaaaagaatgagaaagatcctattttatacacagaagtgactctatgcattttatacatacaggctatttctctaatcaacagttccacaaagtcaactgatttaaaaagtgaatattctaaactgcaaacatggtgaattatatcactattaaaaatatttaatggttttcccttcacgtggaggatcaagtcctgcccttgcctacctttcgaaactcagcttaagtttcctgggggcaccacgctgtgtcatgactctgaccccctgctctcctccctccttattctgtatagtaaaccactccttaaaagcccttagtcaggagtcttatcttgactgaaactctgactgacctctctcctccttctatttcagactttcaataactttctcctctggagttccactgtgtcacaatacactattatagtacttaccatacactatttcatttttttatgtttttctcctcaactagaccagaacatcgtctctttacacaactatcatctaaagtaaaaccttaaagaaacaggcaccgggtaattgttgaatggacagactaatgtataaatggacatagctgcttgatcagagcaaagaagaaagtagattccacataggtagactaacgatcagtctcttacctgtttggagttggttaaatacaattttgctccaagatttaaaatctgcagtttcacaagatcatcttcgctggtgaagcttttagccgtcttcctcaaaacatcaggggcaattttaggaactcgttcacagttttctccaattagccaaagaatacttgctctagccacaggaacctaatagtagaagcagataacatagaaatattgcaaacaaaataatcacactctccttaatagtaatatagaaaaggctttaaatattataaaaggttttacatctattaattcatttaacgtatatccaggaagtcctcttatatttacagattttcttcagttaccagaaaatctgattaaaactgatttcataaaggccaaagcaatggtctagaatcttgattctatcagagatctgcaaactcctgggccaaatctgtctagcctagcccgcttgtttatttatcatcgctgctgctcctgtgctgtaattgcagaaggaagagcagttgaaacaagtgggttagtcactcagtatctccaggctcctctgtccatgaaattctccaggcaagaatattggagtgggctgctgttccccataaagttgaaaatatttacttatctatcaatttacaagaaaaatcagctgacctttgctccagggcattggtgcacaactctcaatggctatacaaagcgtccaaggttggtactagagtttgagtaaactccgggagttggtgatggacagggaggcctggagtgctgcagtccatggggttgcaaagaatcggacactactgagcaactaaactgaactgaactgagggctgtaggcttttgttatcagttctaagacagtagttctatgacggggccctggaatccatgctccatgaagcatcacagatgattcttgagacaggtggcttgcaaaccacattttgagaagccatggacaataccgacaaaggaacagaggacccatttaagcccttgattccaaatgaaaacttactgttttctacatatctgtatctacagcactgaaaaaattatcaagatctgcttataaaatcatgaatgctggtctattatttggtcatcaataaaagaaacaggaataagataaacttgcccaatatggcatttttcattatatatttttataaagtacctttccatataatttgtttcttaaaaataaatgctttgctaaaaactggaaaccttccaccagcaccattaagaagaacattttatttagagcatgcaaattacttttattactatttatttgtattctcccttattccaaaaggaatttgaaggggtatgcaaattagtttctgcaaacattttcacctgtatagaaaatatgctttttataataaatgaaaaagccactggctatcattaagaagtagcatcacaagaagaggtaagactctttatgaagtccttttctaatttctcaaataaagtcccaatgttttcattacagtttcacagctgtacacagtatgactgttaaggaagaaagtgagaatggagacctttgcaaagtgagaattttatcacaatatctaccatctcaaattccttcaaaacacccatttcgagaagtaatacattatttagacatcgctaagtcgagttgttcaccagaatgaggtcatcagaaaactttaaaattaagtacacatttttaaataatgtgctaacattaccatctttaaaattaatattagaataagtttagtaagagagaagaaaatcagtatatttacataataattttaagtactaagcaaagtaacagtaaaatactaaatgctattacagatctactcatgtattatgataaaattgatatccttactgtatactgatttttgggaagaaagaggctatttccaatgttccaaaggttacactgcattaaggtcttacttccaatctattactttaaattgggctaaagaatagtaattgagtggtacattaaattttccagtatgaagcaattcaagttgcctaccataatgaaatgtacctctaaataagaatatatgagcaacttcagatttcagttatgccagatttacttttcttaaatattttattatatattgctagtataaaaattagaattctatgacatatcacaatctgttactccactttaatcctttggttatacactttttttttttttcagttaaaaggacaatcccccaaaggtctaagagattattttattcctattcactaatataccaagattaaaataatattcaaatactctaaacagtgtacatacatttaaaatataactctttaaaaaattaaaaatcagtaagttctaaatgttcacactgaaaatctcaagatgatagcagtggtgtggtggggccaggataatattcagagagtccagaactaaggtaataaaatttccaagtaacattttaaaaacacagaaaatttctccacaaaaggaagtaatatcagtaagtatactgaaaccaacctttctgtgatgacattaaaaagcttagaaaactgacaaacctaatcttgcacatttggctggaatcagaatcataaaatttttgggttccagccctgccttcccctccctattaaactataagactctcatttgtacattactgatactatgaatctgtggccactattttcaaaggtttgaagcaactgaaaaaacagtacaaaaattagccactttttgctctccacggctaaagccaaactattaacacacatgcacacatataatactttcattatgaacctctacttgtcagtattttcaaagacaaactggactgtaagtgactctgcttgatcctttattctaaatgccctgagcaagtggttaagtgcactttttaaaccttctaccagaaggcagtttccactgccattttaagccattaacctgcttgcaaaaacgaataatctttccaagctgaccatagcagttatagaaagacatccagaaagatttcacagatcactctgtaagcagttcaatttaaaagctattgtgttacaataccagctcactgcacagtgccacagtgtatggtcaaacctgcaaaaacatcaattttatttaaatttgtcaaaggcacaatcagaagacatctaaacaaactgcatacaaatagcaaatctgatccaatattctacatctggactcaatatgcattaacacttaggtgtgaattaagcaggggtggcagggcaagtgcagttaacttgtgaaatggcaggcgttcagttaggcacttgggcaagaagtccataaagcactacttcagtatcactcagcagtctttacgaaataacatctttcagctctccttttttaatataaaatcctcacctgtcccattcaaggtaatatgtaaccctgttagaacaatcctcaggtagtatgcatttcattctggaagaataaaactgtattttatctatttctccttgcatttaccatagacttttccttcacatatttatttagttgccatattttttgcacatataggtaggtatgtttttaaatttgtttgtacattggcctttttgaattttataatgtcccattttatcctgttaaaagcccttaattaattttaaatctcacattcctgttgatattcacttatctctttccctatgttcctattttcaacttttataacagtgttttaattataaatggcctttaactggcttttgtttttcattccaaagtctgtcttctaatgagagaatgaagtccattcatattcagaataggatatatttgatttttaatcttccatcttacttcttgattttaactcttccattttaatttttaaacatttattatttacatttaggttttcttttttttttttccttttgtgaatttggaatttccaccatactttgtattccactaatggttatcttctatctgacaaaaacagaaaaataagctttgctgtaagttctgtaaggaagtatgtacttggctcatattccatcaactgttgtagagaaagttgatgcaatcaagaattttcctgagccccacatagggacataatcaaagacaacaaattctttttccaagaaagcctgtcgcttgcttggtccaggtctcatgtacagtcacaggtttcgtatgtaagccactgcattcccctgaaagccctaacacttctttgccttgcctctccctttctaacaagaccagaacaggcgtaacagcacaagatgactggaatacagacttccacattcctatttctttctcataacctgacacacgtttccctgccattatttacaagcaagaaatgaactatttcccctaccaaaaacccactgctttcaccctaagataatctattttcaccttgaaaagtgaaagagaagttgctcagtagtggccgactctttgctaccccatggactatagcctgccaggctccaccgtccatgggattttccaggcaagaatactggagtgggttgccatttccttcaccagatcttcctgacccaaggactgaacctgggtctcccgcactgtaggcagatgctttactgtgagccaccggggaagtccttactactttttaaacacatgagactactaaaataatctcacctccctctactctcttcctcccatgacaccttcaaaacacttttattctgaactaatcataccctacccctaaattttctaagattgctcaatatttttagtatcagattagaatttcctttatataatggcccttctttttcaagagttctcatttagtctatttttatacatttaattatgtgtataaatatatacatatattgtgtaagtacttctgttctttgattgccctgatctagagtttccagctttggctccttagttcttgcttagaaaagtggttcttactaggcagtgtaacacttgtctaaaaggtatctaaataactataggagtatttgtgattgttacattgactaaaatactactgaaatctgatgtctggttacacagagatgctggatatctatctcagtagacatgaggaaaaagtttcaccctcctacttcatatcagtagattattgacaaataatgtcaaacacttgttccacatataggcaaatggaccaatttaaagcctaaatttgtcaacaatttgggtgaatcaaaaggaaacgacaataaagtcctggccaggtctgtgagtggacaagtgaattggataaaaaaagagagactagagaaggaagataaatacagcaagaatgtactggttaataaagcagactactaactatatgaccttcatgttacctaacctatctgtgccttggtttcctttccttaaaaactattttactaaaaatttttattataacgttttatatttttcttttgccattttggtttttcataaacaactttcattgaattaagttgctctatgttgctctatatttgtaagaaagtttaataatcctgcctccgttttcttttatgtaaaacagaatagaacctacttttcagagttgtaattaaaattaatgatttatatttttagggtgcttagaatagtgcctgacatacgattaacactataggagttatgttaaacaaataaccaaaacagaaagagcaacaaggatggttattaaattcaacagccatgatcacaatgaaagtttacactaagcactattctcagtgtttcatttaaaagaaagtgaagtcgctcagtcgtgcccaactctttgcgaccccatggactgtagcccaccaggctcctccctccatgggattctccaggcaagcgtactggagtgggtggccagttccttctccaggggatcttcctgacccagggatcgcacccgggtctcctgcattccaggcagacgctttaacctctgagccaccaggaagccccaacataagtttcatttatgttgactcatttattcctcacaacagatctataaagtcattagtacatgtgtttgaattttacagaaaagaaaactggagcaaggagaagtcaagtattgcttaagatcacaaagctagtaaagggcagagactaaatttgaacccaagtcatgtgattttcaaatccagtctcttaatctctcatatacagtctttgtaagaagtcctgactttggttattaaccaacaataagagttgatatgaagaaaaagatctgtggtgagaatatagtaaaagatctttcctttcctcttacttattcattcatccatccagtttggattcagagattcttaccctattctataggttataatccttttactatcatgtattttgttgctcaaattagccagtgggaactcttttaaattctaacatctctaccgttccatgagcagagccatgtttttatggccccacaagatgttctttctgtggcccagctctaaaagcagccatttctctaaggagtcctagtttctttaaatgctgaatggaatttaaaaaacaaagtcttccccaaagggggatgtggtactactttgtacattgtgcatgaaccttgaaaacattctaaagtgaaaaaagccagacacaaaagaccacgtatcacatgattccaactgtatgaaatgtccagaaaaagcaaattcatagagacagaaagtacatcagtagttgtcaggggctgaagaatggggaggatcaggagccttggcttagggacctgattttagggatgatgaaaaggtcctgcaattgcacaacctggtgaatacaccaaaagtcactgaattctagatttaaaaggatgaattttatgctatgaaattatatctcaattaaaacaaaagaaaacaaacaggatctgggcactaggtgtgctcactggtactggggttatcattgcatgcaggtccccttaaaggccacattaagaaacatatctttgtatattcatgaatgcattcatatgtacatacaaatgtgtgcagacacacacacctgcacatatatactccaatacacctagctatctacataaaaacaaacggagttcacactgaaatgtccgattccaatccaatatgcagtatttactgcaacctttccctctttcagatctgtgatttccttcctcaacagggcagaatctcagaacaagaatccagactgtgcagctctcttattcattatacttcagtatgtctatttattttaacaaaaccatatttattgaataaaattcagttcaattggtactggaaagcaaagatctcttaactggtactcacagtgatactatccaagagtttggccatatgtttgataatttcaccatgttgtatgggttgcatttgcagcaatttcttaataacaaccacactttcagcaacaactatttctgaaaagaaaaaaaaaatcagattattcgtatttaaatatgaatttcaattcaattcaaagtcaattcaaacacagtattcttagtaaaatgtaaatttaatttagcaaaacattgcacatttcttaaatgactaggcgaaaactaaaacaagagagaatatccacaacctgcatccctttcctgccagatctccctggcagtgtgagcacttctgcattgaaggcttcagttccaagagggactctctccttcagggtctgataactgctcccaatcctcaagccctttccctttaattctagatatggcaaaggcttcccacctctactagcctgctagccccagggtattacagtacatcttgctggcttcccttaatccgacccacaattaataaatagttccttcattaaactcttttcaatcatctctttaaagtgtatcacctgtttcttgccagggccttaacagtaactggtacgaggagtggctccaggaagcagaccctcaaactgggattctgagattgcactattatagactaattagtggtccagagctccgtctttggtggcaccagcagtgaaacacaataaaccagtcagagcacctgacttcatggaatgaatcttatataagcaattactaaggttaccaacaccaaagaaagacaccaacactgcctttccttgttattgtggctctttttttttttaatcagctggtattcatggatattagagattccctggtatacattataaaggtttattttaatattaccctgaaaatatgccacgactagggttctgttactcattttctctgaaatatattttcttatctagctccctttaaaaatacaagcgaaattttctatcattctaattattattgaaatatgtatttcatattatatatatttcttcatgggaacgatatattaatatttcataatgttttagtttgctgctgctgttgtttagttgctaagtcacgtctgactcttttgtaaccccatggactatatgtagcccgccgggcttctctgtccatgggacttcccaggcaagaacactgaagtgggttaccatttccttctccagagagctaatctgatctcctgcatcggcggcgggctccctaccactgagccaccagggaaggcaatgttctagttaaagaaatgatgtatttcttttaattctcataataacatagggtaggcagctgattatcagcattttaaagaggaagaaagatgccctggagaattcaaactcagaatcagaatctaccattttatctttaatgttctatgttactatgagtaggtgttgcttttataaagactgcctcttggagctatgaggaaaacaaagacaaatcagaatgacactctgccctcatcaagcttaccctctgctaggaaacactaagtggttatgtaagaaatgactatgcaatgtaatggttttgaagaatcaatagtataaaattttatctttttaaaacatattgcaaaattagtccaagtttttttttttttttaagttgtatatttttaattattcacgtgtacaggcaaggttgactaaccgtaactatagttgaaataaaatttggcattatttagcctcatgcgaaaagctgactcattgcaaaagactctgatgctgggagggattgggggcaggaggagaaggggacgacagaggatgagatggctggatggcatcactgactcgatggacatgagtctgagtgaactctgggagttggtgatacacagggaggcctggtgtgctgcaattcatggggtcgcaaagagtcggacacgactgagtgactgaactgaactgaactgaactgaccctttgaagtgaagaggtgaagtgaagttgctcagtcgtgtccaactctttgcgaccccatggactgtagcctaccaggctcctccctccatgggattctccaggcaagagtactggaatgggttgccatttccttctccaggcaatcttcctgacccagggattgaacctgggtctcccacattccaggcagatgctttaacctctgagccatggtgccaccttatcttccgatcgttattgttatggattaccacaaacttggtggctgattagcaacatgagcttatcattttacactttgaagccagaatttaaggtaagtcttatggagctaaaaccacggtgtcaacagggctaagttctctgtggaggttctagggggaaatccattcttagacttttccaaattttagaggctgcccacattccttggctcaagcccccttccagcgaagatatcattctaatttctgcttctgacatttggttacattgggtcccagattactggatgaaaaatctctccatctcaagaatcttaatcacatctgtaaagttccttttgccacattagataacatattcacaggtttcaggcatcaggacctgaacatcttgcgggatggtggtggtggtggagtgctatttacctaacctgggtgccttcccattccctttgggtaattccaccctatttttcctttatgctaccttttggctttcaaagacctcagcactcccctacaagtacaaaatgaacttgtgttctgggcctttccaagctttctctttgtcctcaacagaacttaattgtactgactctaagaattacagcctactattaaaaaacaacaacaacttattttagaaagaacatgtaacaggggatttaccatctaaccaatttttaagcgtatgatacactactgttgactacaggtacagtgttacacagtagatctccagagcttactcaccttgccaagtaaaacatgatgctcactgattagtagctgctcgctttccttttcttccaacccctggcaagtacctttctactcttggattttatgaatttgattattctaatatctcatataagtagaaacattcagtatatacctttctgtgactggtttatttcacttaaggttctcaagattagtacagcctactattatcttcattttacaaatgaggaatctgaagcacaaagagatcaggtaatttattcaagacaacattagcattcaaacataggtagtctagttctgcatgagagcaatagctagcagctgagtaagtgttcaatagataggaagactacagtatgcttgttttatattgttgtgtccctccgttagaatacgagctccttaaaggcaggaacctcttataggcttgtaaataccttattcatctattccacactcactaaatacctcaactaattcaaatttttcaacaaatgtttattacattatataaacaaaatttaaaaaatagtcttttgccccaattctttcagtttacagtagatggtaaaaaagcttttcagaccagcaaattttgtgaaagaaaatcaactgggagttaaattattctaagttaagtctactgaaaatgcagatttctccctaaggtctttaagaaatctgtttatcagtgaatcttacatagtgataatgggctattttaggacaaccttcaagtcttcctagaagtcctgtccctgacaggaaggaagaagtcagcagcaacaacaaaaaaaagtccccaaagccttacaggtccaagaatatattaaatatatgcaaaaacaatgtagctcaatgctatctctgaagctgcaagatacagtatccgaagagatgatgaggtattcacaatataaaatcaaagaggcagagatccttagaggtcccaaaggtcttacagattttaaagaatccggggcctcattcatagcacttattcctagaagcagatctttcaacagaaagacaaagaggctctgttataacaatcggccgttataaatgaaaaatattattgctttctttattgttactgagccaaatttccaaactacagaagtgcagcacatacaataaagagttaaagaatcaggctaatgataactatgcaattagaacctgaaaaatataatttaagtttcttaatattcacagcagaaaaaaaggtccacggttataaacagagttttgatttacgaaaaaccaaagtctaaacattaaaatatcagtttaaattagtaaatctacctttaagaatgattataaattagtctcctccaattgtctaattataaaatgatctagtctttgcttagaagtactataagggtacagcatattcatctttttaaaatgaagtgaataaaaaatatttttttagaaatcaatgtgctagaaagctgaagtagaaacatcggctttaatatccagcttgaaaatttcatgtgagaaaaaaaagtaaaaatacaaaatttaaaaaccctgaatatattttatatgtgaaagaactagccagtgttctgatttgtgtgttttttgtatgcaatcaaagtgaagtgtgtcttgtttgatcaaataggaagtcattattaaagacataggaaaatgaagccatatttttaaactcacaatttaaagtgtgacagaaatagacacaaagaggatgctattattaaaagtagaaacagataaaatgaatgacatttagcatcctatcctctgtaattaccgtctacagtcagtgtttttaaaaaatctatttccttgataattttttttgccacttatttggagttacaatactatacgcagaaaaatgttctctccattataatatcctgaattgacaggttaacagttataattttatgttgattgtgaagatcactcttatttggggataaactttgtttcaaaaagttttttttgttagaagtacttacaacaatgttacagctttcaaaagagatctacatgtgcgaaaagataattaggagtaatatttgtagtaaaaagctatttttcaaataaaatatagaaagtaatcagttttgttatgtttcaccctatggttgctatgtcatatatgcctgtgtctagatatgacataattttatttagaatcccacaaataatttcaataattttatacagaaaattatgtgtttcctaaaaagaatccctgttttaatctcttttaaattaaataaataaatacctttaaaggtgagagttggagtcttttttctccaaaaggtttcatttattttaaagatatatcatagaaataactgatattttaccatagaaagaatgaactctagactatgtattttactggatattacctatccagttctacaaaatgtttagacactgactggcttaaaaacatgaaggtgttccaaattgatgacttctacatttaattaatcttgaatataaaattattaaattaatctgggaaaaaacaacttgaaattaacaagtttaccgtacttttctgatctagcctttttaacttctcctgttgttaagtcatttgcctgcttttagcaccctctgcaggtgaaccaacattatacaagacatatgccattaaaaaccagtaaaatggaacctttgtgggaagggtgaaatgaaggtgattaaactgtgaagaaataaaataaacagactacattctcttagttctgttcaggcaagaaaattctgtttgtaagttaattatccaatttactaaaacaacaacaaaaaccctgtgtgtgcatatgtgtatttcaaagataaaatgttactcttcattgtgatcacggacatagagaaaaagctcaaaggcaatactaaaaaagaaattacaatttgtagatcatgccaagaatatccaaatgataaattatttgcaagtgaaatgaaacagccaactcaccatccctgttggacagcagacacaccaggccgttgaggcatgtgtcagagacttctgtgatgctggttgcacatctgcctatagtctgaatagtggctgctgcaaactgtttatcctggcttttcacataggtctaaaaaacattgcctcaattagtttatacactggtactatcaagcaaagaaaaatatccctataatatgaagctctgtcaaaatcaagttctagaatacataatcttctcctctacaggcacaataggaagtccaccttttgacttaattcagttctgttttttcacttaaagaatgtgactgtagtacaggcacgttttcaagtcaggttcattcacctgaagccacagtagcttataactccaaaacagatagtgggggagcagtcacccaagatagcaattagtttttaagtgcaaggtggaaagaaatgatgagacctctctttttgtaggtttcagttcatttaaccggcagcatctatgaatccatgaaaaaagggtggccttttcagagatactaagcctaaaaattgggagaagtggaggaaaaggagcaatatgctaccgataaacattttactttaaaaaaggttatgtgaatggtgataaaactacaatagccacagtgaggagcatttcaataaagactttataaatatacctgatttgcaataaaataaaacatcatacttctgaaaaatattttcttgaaaaaaatgttttaaaaatacagtgtaaaccacatatttacacaaacttaagaaattaatcacgtatttaccacaggcctcaaaaattgtcactttggttattactttcctaattcaaaaactaagcttttattgtgtacaggcagaaagagatgtactgttaataaataagcacatttatgtacaaaatataaatggatttaaaatcccattttcaagtggaattaaaaaaaaaaaaagattcccaaactcaaataacaagcacataatgtagaattaacaccttgttcatctaacatgcaaaaaaggacatgcatttaaatggtgtctaaatgacaaatggaggagaaaatccaaaaactatctaaaagacacatgaaattggtgaaaatggcaccaaaaacatgattaaatgttgaagaaataaacaaattaaatttcttaggtccctgtaggaaaaatcactgtatttaaaaccatttctgaacgcatgtacacccgtggtggattcatgtcaatgtatggcaaaaccaatacagaattgtaaagtaaaaaaaataaaaaaataaaaataaataaaaaaaataaaaccatttcccagttgattacctaatttcctcaatcacaaaaaataagtcctttgaaaagttctccattatttcaaaaagttataaagaaactgtaacacctatggacataacacataaacacagaaataaagtacacgtatagacagtgattaaaacagatgtataaagaaagaatatatttaaaagtctgactaaagaatggaccttattaaatagcctgatattaaatgaaatgactggattaccaatattctgaaatagataaacaatgccataaaattacctgggactcactccctacaactccagtaacctgacagaagcagaaagtagaaagcaaaaggacatccaaacagattacacagatcatacatgacaacaagatatgggacaaccgcaaacacagagacagaaacttaaaagtaaataagcaaacctataaaaatgaattacaggtcacatttcagcaatgttctacagccacagattactagctaagaacttgagatactgtattttctgccatgcaaatataaaatgagcatatatcctaattttctaagaactttttctaaaaaaatatatagcataaaagtatagtaatccagttacaaaattacaaagcatgaatatattataatatcccactactcctgttaaaagtataagatcacacagtcaaaaagaaatacaatgtctatatagctaaaaagaaatttaggacaggcataaagaacgattatagcaacaaaataactttaatctataaaagctgtgtgtgtatgctcagctgctcagtcctgtcctactctctgggaccctatacacttaaaagttaccacctatcacacaacctaagcaagaatactggagtgggttgccatgccctccctcctccaggggatcttcccaacctagggatggaacccgtgtttcctgcactggcaggttggagtctttaccagtgagccacctgggaagccacctataaaagctgggggtagacaaaaattctgggaatactgtgtggcatgtggttggtatactttagttaagaaaaaactgctgatgaaatgtaaaacccgcaatactgatataaggttttgtattactgtgctctaccactaagtcttcagagctaactctttcatcataaaaagcctaagagccatgaggcaatttttttatgtttttggagcatgtgtatctgggaagcatctcatctatccacataggattttaaaaatacaacaaaacattaacaattaaacaatcatgaggagggcaattttaaaccatttattttgagctatacatgaagctagcagacaatgtctaaaatagaagcagataatcaaatagggacaaccaaataagaaatgaagccattttcctgagtacagagtgtagcacaaactattgatgatgataacagagttataaactagtttctcatattctacaatatgaaagggactatattttatttctcttaaatttaaaatttgtagttgatgtttattattgaaaacttattagttgtcaaccttcttccaaattatacagttttatttatacaattacacacatctaaatcgagaaagacatatatctaactttaaactgaacagatgctttagaagttactgcataattagcactgtacacaaacctgaaattctcgaaggagagttgatatgttggcttcatttgccaagtttgtcaaaatttcaagctaaggtagaaaaagagaaagtaaatgttttttgatggtaaagagagagcaacacggaaacttacaataccatatgtaaaacagagagccaatgagaatctgctgtatgaccagggaactcaaacaggggctctgtgacaatccagaggggtggggtggggagggaggttcaggagggagaggacagatgtctacttatggctgattcttgctgatgtttgacagaaaacagcaaaattctgtaaagcaattatccttcaaataaaaattaaaaaaaaaaacaaaacacaaagaaagtgaatttaataaaggctagccatttgatagaaaggtaatttctattttttaaaaaaatgcctattacaaatgtgagacactacacctttcagctgaactttgtctccctacatctacaaacagaataattatatggtgcttaaaaaataattacaaaaaagagaattctacaccttcactaattgtttgctccaactttataatttattatctaattaacctaaacaacttaaggcagttttctttttcttttaataataaagttagaaaacaacttgccctccatgtaataccattatattccagataccaattaattcttttgattagttttccttcatcttaccaaaccaaatatttagacattttaattctttcttctggatttagttaaaagaaatgcgcaattaaaagttcatctccaataggcttgctaaaaaaattcagtatctactcataaaaaaatattcaatttatctgaaggaaagcttcaaaaaggaaaacaggaacacagaacagatgggacaaacagaaaaataaaatgaaagatgcagacataaagatattcatatcaagaattacattaaaggcaaatgatctaaacactctaattaaaaggcatagattgtgtgagctttcctatatattctggatactagtcaatttttaggttatgtactggaaatactttctcctagattatgaactgacttttcattttattttgatgagaatatcttactttgttgtacaattttaaaaagtctaattcttaacatagagaaaaggtaaaaagcagtttttatctagaccacttgcttctagagttgccaaaacgataccacatcatccccaaacacaccttgtacgtattttctgcaaacaagggacattgtcctacaggccacaatacaaccaagaaacccaggaaattaacactgatacatcaaacctatacaataatcacttacatttaagtttcactaattatctcaataatgtattaaaaaaatagtgtatgagttccatatcatacattatatttagttgtttagtttctttcagtataaaagtttctcaacctttcttttgaccttcaggacctggacgcttttgataactgcaaaccaattattctgtaaatttattatataatttgggcgtgtcttagatttttttaaattaaacttaagtttccatgtgattaaccaatcattccaatttttgttgaatagtctactattgaatagctctcattggtttataacgtctcccctcatatatgatacattttgataggcatagatctgtttccatgcttcatatgttattatcacatattccaagtatcacattgttttcatcattataactttatattcataaccatactctatactgtagttatcattccctgaatacaactctttcataatctcttgtatttgcataaaatgtgccttttttcttacactgaaccctacaaccttgctatcaacttacctaccaacaacaaaaaaaatgacaaaatcatgtcattcttttcagatccactctaatatcatcttttccaccagtcttttctaaacataccagacaattagctgcatctttctttttttccacaacactcaattcacatctattaatcatttaaaacacagtgctaaaattatctatgtacacgtctgtctctttcacttactgtgagttattcaaggtataggcagcatgtcttaactttgtcttattaaaatgtagtacagtaattagtatacaataatgtagttttaaaagcataaagaaaatcccccaatgtatctattaaaaaaaaaataggtctccattttgaaaatgctaaactaaaagttacagcaatagtgtcaaagtaagtaagcattaaagtctttgaaaaataagagtatgcataccttcagtatcttgatcatagttggatcagttgacctaacataaaaactcttcagataaggttcaaacataccctagattacaaaaataaatatataaatacacttatgatactaatgcattcacgtctttcttaaattttgtgttcacaacatacatacctttctttgaattgacagagttgctatattctggaggacaatatattgcacttccctagaaattaaagtagaattttgactaggtatattttccaacaaaatatatcccaaagtaaacagtatattaaagaaaaagaatcagcagtaagcttcatattgaaagaaactcttaaatataatactgaaaaatttctagcaaatcttaagatatttatgccttcttttaaaaatacattttccctataagctatacaacattagatttgattcatcaaatggaagagttacaagaggcagagccaatgctgtacatgctctgaacacatgccaagaaggtgttccagcgccaacggaacaaacacgaccacagtgttaacacagactcctggctggagggctcttcatgtgactcaattctgtccaaagtgaaagacaggttttaaaagaaaaaaagccatgttatcttaggtccaaatatctaagaaatgaatgtacaactgaatctggtataacgcttcatgtgaaagatgcattccagatccttatacgaaccagctacggacaacaaaacttaatgaactgataaaagggaaagatatgactatgcgaacagacagaggaacgcaaaggaaatagcatcttactaaggaagggccaaagccaacctagggcgaaagctgtggcactgattctgagctaagaacaaaaataaatatttatctctcttctctcaactcattaacagaagtactcaaaggaaaaaaatttaatttaaaataactaattactgcaaaatattcagggtaagctaaatagcttgaaacaacagttttcttaaatacagaaaacaaaacaaatgaaacatctgatctcaaacttacgaagtacatgtgacaggaactcaaggtttcctgaactgctgacttgaattgctgaattacagagaggtaaaattgaaaagtacactgctacctacctgcctatctccaggaaataacaagcttatgcatttctttaaaacaagtaatattaagaatatagctctcttcttaaatagaactacagtaattaaatattgcaactttacaaaaagcagttctgtcataaactatataatttggcatatatattgctttatatgaagtcttatataattatactactcactacaataatacatttaatgtaatttttcagtgactccagatttaatgtaaatccccaaaattcttattgtcatgcctagaaataccaaaatactaggctactgtaatagcatatactatattacaaaaaaatacttccaatttctttgggcttaaggtaaaaaaaaaaaaaaaacaccttcaatatttaacattaacttggaaatcaataatctaaaggcttttataataatccccttacgtatgaaatctcaactgataaaatacagtgagaaccatgtgttacatgcctaacagacacatttgatttgttcaaacattactagtgaagtaatacaatacaaaagagaacacacatataaaaccatgtcatacctattgctacgaagcaaacgcactagtgatttagaaataatgccagcttctgattttggtgctatatgccaatacagttgagcaactgccataaccacctaaaagataaagcatgaaaacagaaagaaccatgagcagttccacactacagtttcaaagtatgttcttacatatgatttcctttaacgcctacaaaatccccatgaagtaagatgagtatattgttacctctgtgtggcaggttgaacagggtccccctaagaatgcatgtctaccctcagaatgtgaccttatttggaaatatagtctttgcagatgttattaaggtaatgatcaagatgagatcatacttgattatagagtgagccctaaatccaatgtgagtgtccttatcagagacagaaaaggacacagagaagaaggcagtatgaacacggaggcagaaaccgcagtgcggcctgtaagtcatggaatgccggaactgctggcgatcaccagaagctaatttctccctaagagcttccaggaggaacccaccctgtcgacatcttgacttaagactttgggtctcctgaaatgtgaaagagtaaatttctatttatttttaaattaacatttttctttaataaaaaattaaagaaatttttatgtctttaatctacacagttttttctaaactaatatggcagctctaggaaagcagtactgtacaccctcagaaaaaaaaaaaagaatgttcagtgaatcacccaaggtctgacatgccagtagtacatggcaaagcttgacacacactccagagcccacagtcctcctagtgttgctgctgcgggtgctaccctgagacaggaatgaaaccagacacttaaaggtaacagtagtcagtcggttaaaattcttaaagaacccccaaattcaatatatttaagttataattaagggaactctattaaaacaattcctttaaaaaaagcagcatttgaaatcctgtttttcaaatgtagaaccttaaaaatagtgcttggttcaaagctattacgggggtagtcagactttccctgtcataaaatataacaagactatgtttccccacgtgcctctacacttagatccagagatcaaaactccagactttccacttagtgaaagtattcagcacagcatgtgacaactgtgaagagagagcttcagaaattaatcatcttgtctttggttatgaagatatattaatattgctttagttttgcttcggctgtaggtaacaaatatatagcaggacttctatatatgcctgagagtttacagtacttgagggtgcttaaagcaaaaacagtttctcctagaactaagaaacattttttaaaactagagttataggttcctcaacttactgctctatggcatttttgtgtacttttcttttttgtaacaagactgacgtccagctttcagacatgacttgggaaattgagaagtttaagaatatctaatttcttcacttgtgatctacaaatacacttgaattatagaacagcctctgctgaatttaaaattttagtaagataaacttaattactgacaatctacaaataggtgacagtcatttttaaaaactactgaaacacacagatggctaacaagttttatatgtagaaaagaaagctgaagcttaataaactgtactttctatgtgtgttaatgattttaagattctagattctacttagtatgtcatttgttctgctacattaattagggcactctcaaacccaaaggggtgaaaggatcttctttttccccaatatttacaaatctaagtgtcttaatctctcttcaatatcccaaatttgaattttatagtctaatttgtaaaagccatgagggaagctcccatgactcccaaacaactgaaacacaacctcacaggccttcaacacttacattatatatgtttataaaaaagtacatcctgtaaaaacttttctattcctaaccattcatacactatcaccttatccagactgtcagaacagcttcccaacactgcctccagtatcggttatctccaattcaatctacacaggactaacaaagtttcctgaaacaaattctcaaagtctctctcgtaagctaagaaggctaaaaaaaaaaaaaaaaaaagtctattcacaatccttccaaagtcaacctttacacatatttattgttgctcagtcactgactctttgcaactccatgtgcagcacaccaggcttccctatccttcaccgtctcccagtatttgctcaaacacatgtccattgactcagtaatgctatctaacctctgctgtgcccttctcctcttgccctcgctctttcccagcatcagggtcttttccagtgagttggctcttcacatcaagtggtcaaagtattggagcattagcttcagcatcagtccttccaatgaatattcagggttgatttcctttaggattgactggctgaatctccttgcagtccaagggactctcaagagtctattctaacaccacagttcaaaaccatcaattattcagcactcagccttctttacttatggtccaactctcacatcagtatatgtctactagaaaaaccatagctttgactagaccaaaatcactgcagatggtgactgcagccatgaaattaaaagacgcttactccttggaagaaaagttatgaccaacctagacagcatattcaaaagcagagacattactttgccgactaaggtccgtctagtcaaggctatggtttttcctgtggtcatgtatggatgtgagagttggactgtgaagaaggctgagtgccgaagaactgatgcttttgaactgtggtgttggagaagactcttgagagtcccttggactgcaaggagatccaaccagtccattatgaaggagatgagcccggggatttctttggaaggaatgatgctaaagctgaaactccagtactttggccacctcatgtgaagagttgactcattggaaaagactctgatgctgggagggactgggggcaggaggagaaggggacgacagaggatgagatggctggatggcatcactgactcgatggatgtgagtctgagtgaactccagaggatgagatggctggatggcatcactgactcgatggatgtgagtctgagtgaactccgggagttggggatagacagggaggcctggcgtgctgcgattcatggggtcgcagagtcggacatgactaagcaactaaactgaactgaactgactagagagacttttgttgcaaagtggtgtctctgctgtctagatttgtcattgcttttcttccatggagcaagcgtcttttcatttcatggctgcagtcactatctgcagtgattttggtgcctgagaaaataaaatctgtcactattttcactttttccccatctatttgccatgaaatgatgagaccagactccatgatcttagtcttttgaatgttgagcttcaagacagctttttcactctcctctttcactttcatcaagaggctctttagttcctcttcactttctgccattaaaatgggatcatctgcatatctgagattgttgatacttctcttggcaatcttgattacaccttgtgagtcatccagtccagtatttcaaatgatgtactccgcatataagttagtaagcagggtgacaatatacagccttgatgtactcctttcccaatctggaaccagtcctttgttccatgtcctattctaactgttgcttcttgacctgcatacaggtttcttaggaagtaggtaaggtagtctggtatttccatctctttaagaattttttacagtttgtcgtgatccacacagtcaaaggctttactgtagtcaacaaagcagatgtttttttggaattcttttgctttttctatgacagaatggattttgacaatttgatctctgattcctttgccttttctaaatccagttgaaccaaataagcaggataccaaaacatattggaacaaaaaatatattacctctgctgctgctgctgctgctgcgtcgcttcagtcatgtccaactctgtgcaaccccatagacggcagcccaccaggctcccctgcccatgggattttccaggcaagagtactggagtgggttgccattgccttctcctaaactacctctagttggcatataatcaaataagcagggaaccaaagtatactggtacagtacaaactacctctatttgttttactattcaaaaacatttttgatcagtaagtatttggactataagccaatttccaagacaaagttaaattaaaaatcagtaaattataaagtaattttagttggcaagttacagctacttaagtaacatcaagtcaagtgaggacacactaaaatataagcatattttacaatattaataaaataacatatgtgtcattattgtgcatagttacctaaccatgatttagaaactaaatacaaagtataggataaaaacttctgctaattcctaagatacacatacaaagctctaaggatcaaactctcaagcatcagaaaacaaagcagttcaagggaaactctcattttcagttttaactagttgcacagaatgattcgttaagaatttatttttaactaaaataagtttaagaaaacatttaacttgaattcatcaaaacttacataacttccagttaagaggaaacaacggtatagtaaagaaagtaaccagacaaacccagagaacattctgcaagacctgagagttcagaagatataacaaccagatgtaatgcagtataactggtataggtgaaccagttatagaagaatttagggtaaactggtatttcatgagatgaaaatttactgaagtagaaatagggaactgactagaaaaaatatgttacaaaatattatgtgtactatgacttttatcttggtttaaaatatattatgtacagacatacacacatatgacagaggaacacttatacagaaaagaaggatctggggaaaactgcactaagatattataactgatacgtgatggaaatataatgtttatattagtttttctagtttgtattttctaattttcaactgtattcttttaaaatattttaaaatataaagagttatttaaaataaagatataaagcaaaacaaaaacttaggacctgagtaaagatgatttttaattattcctaccagtaaaatttactatgcctgtatgaggcatcatgctaggtgtttctaactatacattagtcttttcaaaactcttattagataaatacaaatataatgagcagaggagttagacagaatcactgactcaacagacatgaatttgagcaaactccaggaaatagtgaaggacagggaagcctggcatgctgcagtccacgaggtcacagggttggacatgacttagtgactaaacaacaacaaccttattaagtgctcacaacaataatttcatagcagagaaatacatacagtcttccaatcaactgcaaaacatcttaggctcgtatctcaggaatccaattacaaaatcaaaaagaaaatgaagaacagtaggcatacagctaccaaaccaaggaacctataaaaacctgatttttattatacaaacaaataaataaatgctccattagtacactcaaaattacttgctgaacttacatacttttaagcactgtttttaaaaagctgtgaattatttcttgtaatggtttttacataccgctgcattcctgctctgaagcaaaggctttgtattccgaattaaaagcctatggtctggatccatagtatatggcctcttccttttgtcagccttttccttctgttcctcatcagaatcatagaaatccttttcattgtcctctagaccatcaccctacaggaaagaaatccaattgcaagattagttcagacctggaaccacccaaatactacacaaagaaaacttttaaaaaaacatctacaataatgatagtattttacaaatactactatggaggcaatttgaaactatgctacttatatggaagaaaggccttacttttgtattttacggcacagtaactgtcctttagtgcaacagataatatttttatattatatagcaaacctcacattaaattagcatagaaatacccacagtcatccaaagggaaaagctgaccattaaattctaacaaagcctatgatatgatactactcaaagctgaaaactgtttccataaattatcagtctctctgtaactggatcaaagggtcagaggaaagaagaaaattgtttgaactgcaacacacataaaagaaatcattaataaagtttgacaggttaaaaattggtaattaaaaaggcccctgtgttgtcaagaaagactgagtttgagatttatgcatatccctgagacttgattataatgcttttgtcttacactttttatttatttgaattctttattatctctgtcagtaaatgtagcctataggtgcatgggtccgtgcatgcagttgttccgactgtttgcaaccccccggactgtagcctgtcaggctcctctgtccatgggattttccaagcaagattacgggagcaggctgtcatttcctccttcaggggaccttcccgacctagggactgaacccgtgtctcctgcattggcaggattctttaccagagtcacctgggactcccagcgtacaggtaaggagtcctaaaaataaacaacaacaacaaaaagcacacagagacgatatatttaagtggatccagtgcaatcacgagggcttcccacgtggccctagtggtaaagagcccacctgccaacgcaggagacgtaagagacacgggtttgatccctgggtcggggcaggagggcatggcaacccactccagtattcttgcctggagaattccacagacagaagagcccggcgggctacaggccatggggtcgcacagagtcagacgtgactgaagcgacttagcacacacagtgcagtcactattcagaggtgatttctgttaccatgtacctgcaacctactttccactcctgggaagatgggatagatacacttattcctattcctctcactaagaacaactagaaacctaagacattacatataaaacaatgtaagaaaagaaaggcagagagagagaagaaaggctggatatggacacctcaggaaccaaagaatgatacaacagtgagttccttggattttcatttttcctcatatattaaagactgggtagaagagaagtgagttaataagaaaatcaattaagtatagattaaacaaatccccccaaagcctgctccttgtagccaaagaaccaagaaaaagaaagtctagcaagacagaaaactttttaagaaaataactgttctagtgcagtcaactctagagaaaaaaccacaaccctacccctaatcccacaagcaaagactgacaaggagagcctagatatccactcctcccctcagcctcccactggggtgctatcagaaaaggccaagatagaactgagattttaatccccaccaggaggtaatacggtgtggggagctaggacatccaagtctgctgatcaatacagaggtgacttctatccctggctcccctacgctgggcgcagaggatgcttagtggatactccacacaggacttgcagcagcaccagcccatggtaacaaggacataccactctgaggtgtcagtggaagacaaacctggaacagtcatgagacacatccatccttcccagccagaaagctatcaggggagtaacagtgcggagccagatcccacagtcacccacagcaacaatgagccccctgaggtgtcactgggggcgaaggggggaacctggacttttagcgtgacctgacactaatgagatggcagcaccccactgtcctttgctggaacagtctcaaacccagctaaaacttaaaatctgaataagatccatagtctcataatatccaaaatttccaggtttcaacaaaaaaatcattcagcatttcaagagccaagcagggaaagcggattccctggttggggaactaagatcccacatgctgcgtggtgtggccaaaataataataatacaaatggccacaaacatgaaaagatgcccagtttcactaacaaagaaacaaaatgaaataatatttaaaaaaaaaagaagaggcagaaaaaaacaacttattcactggcaaaaaatgtatgcaactccatgtgaaacttactccttggaggaaaagctatgacaaatctagacagcatattaaaaagcagagatatcactttgctgacaaaggtccgtataatcaaagctatggtttttccagtagtcatgtacaggtgtgagagttggatcataaagaaggctgagtgctgaagatttgatgcttttgaactgtggtgctgaagaagactcttgagagtcctttggactaaaaggagatccaaccaggcaatcctaaaagaagtcaaccctgaatatccattggacagactgatgctaaagctctaatactttggccacttgatgtgaagagccaactcactggaaaagaccctgatgctggaaagattgaaggcgttgaggcaaagggcatgacaggacgagatggttggatagcatcatcaactcaatggacatgagtttgagcaaactgtgggagaccgcgaaggcagggaaccttgatgtgcttcagtccatggggttgcaaaggagtcggacactacttagaactgtacaacaacaacatatgaaacaaggggctagtgtctagcatatatagaccactcctacaacacaacagtaaaaagccaattcagtttaagacagcatattaaaagatatccttataactgaaacatgtctcccctaaaattcatatgttgaagcctcaaggtgaccatatgcttaagcagggacttcaaggttaaattagattttatcaatggtattctaatccagtacaactggtattcttactagaagagagaaaggcatattagaacacagcaagaaggcagccatctgtaagccatggacaggcagcttgggagaaaccaaacttgctaacaccttgatcctggacttctagcctcttagaaaaactgtgagaaaacgatgagaaataaatttctttttatgtaaccagtctgtggtattttgttacagctttagcaaactaatgcagacaattacctaagaagatatccaaagggcaaacaaagcacatgaagcaacacaaattaaaaccactgcaaggtgcttttgttatggcatacacatcagaattgctttcatctaaaattaaatttaaaagtactgacaacaccaaatgacagtaaggatatcgaggcaatgggtcattcgtatgctggtggtgaatgtaaaacattacagtcactttggcaggttggcagtatcttacagaactgaacctgtatttaccatacaacccagaaattacactcttaggcattcatcacggggaaatagaaattaattctcacaaaaatttgtacatcatagcagctttatccctattagccaaaatggaaacaacacagaagtccttcaatggatgaatggttaaacaactggttaagcaaatggttaaacatctctgccatggaataccacccagaaataaaaagaaagaaactactgatacacacaagtctgattaatgtccagagaagtatactgaacttgagtgagaagaagtaatcctaaacggttaatattgtacgattccatttacacagcattcctgaaatgacaaaattatagagatggagaaaaaattagcggttaccaagggttaaggggcagcagggttaagcagaggaaggaaaggagtttagctataaaatgattacatgaaggatatttgtgatggaaacattctgaatcctgaatgtatcaatgttaataccctggtttgcaagatgtcaccattggaggaaaatgaataaaggttacaccagatctctctatatgatttcttacaactgcatgtgaatctacaattatcttaaaatagaaagtttaattaaataaaattagggagaaaaaaatcagcaaatcatttaaaagcaatttgcatatatttatccattgttataacaataaaagaaattacctaaattgttatagtttaacatcacctaatgaattgttttccttgtaagtacttttaagacacaatctttacttaaatatcactgaaaacacttttcatcaaaaacatgacctttaggtttcttagaagtaagaataatattatctcagtgtttttcaaatcaacaataaaaaaatcttaagaaattctccaaacaaaagaaactcaccaaatttatactctttgacaacaaaaggcattttaaaagtaatacccatatttagaagtaaactagaaattataacattatcttctccaaatatacaattcaaaacaaattacttgtctaagtgcttaaaaaaaaggactataactgagataaacttttatatcaaggccaatacacaaataacttattctttaagcctaagcactcacctacaatcttcagtgtatattaatcaaacaaatgttcaaaatcaacctaaaattgatatgatgaaactgctatatttatcatattcatcagtatgaaacacactaacaaataaaatcttcaaaagtacataatgctgcctttaaaaagtttattcaatcattccagttctccttcactattaactttattaaagcccaactatgttattttaataaattatatttgtattgtttattgtagtatataagaatttaggattatggcagtaaaaagactattaaggaatttttttctttcattagtatctttcccacatacaaagatcttacaaagctattatgtaaaacttatataaattaatgcttcaaatgttttattaaagatctataaactaattctttcttaacatttaacattagataaattagtgtaatttactaaaatgaaagggattctttgaaatagtacaaagttttaacaacaggattactggataacaaacacaaagaacatgttgcttaatacctaaaatagttattgatatcaactattatttcaaagtatattcctgtcaaaagaaactttctcttacactttctgtgaaatttcaacttagttttattgttatgagaacaccatggcatagctttttagatctggctgctaattactaactatatatttttatcagcagcataattctcttaagtttgaactaaaaggaaaaaaaaatttaaggattgattaggttaatgaaatgaaagagataaggcttcctcacaggattggtgccaatctgcaataacttaacatctgaatctgtcactgctagctgtttccttggttttcaacctatgagaacagatacgagccaaaacagaatggaagagagacgcatacaatcaaaatgggtaatattaggtcatggcagctcagtatcagggctgcctctacgatcgtgttaatttcttgacttctcctcttcatttcctcatttataaaatgaaacaaaagcagtatctatatcatgagtgtgtgtgggtgtgtacgcactcagttgtgttcaactatttgcaacaccagggactacagcccaccaggctccttgtccatggacttttccagggaagaatactggagtgggttgccatttccctatccagggcatctgcctaacccagggatgagatcccagtctcctgtctcctgcaatggcaggaggattctttacctaggcagcccaaataatattatcaaagcgttcatgaagactgatttgtgtagtgaaagtatataaccacttactgtccagtgaatattaaacactcaaatagtagcaattaacattgcttttattaaaattttttctagaaattattacctcactttaaatcaaatatccccagatgcaaaatatgaagaaaagtttcccctgaaaccctaaccctaaaattatccctcagaaaagaaactgcctcctatttgagatttataagtatatcaagaagcttttgtacaggtgcttcatttttaaccaaaatgtactgtttagggaactcattacactaaaactttaatcaatgctagttccagttgcttaaaagaagtcacaaaccccagggacaaaatgtcattaaaaataagacttaaaagattactttttaaaaacaggtaatataggatcacagggttctgcttctaataacaggcaatttgggataaaccttatagtgagctaggaaagaaaaatgaaacacacttgtttcaaggcactgaaaagctaaaagaacagtgatgaattacgcaggcaagacccagaagtagtggtaaacctagaaatctaacagttaaacgcttgcaattgtttctccacccaaagcgtgagttgttatatacataacaaaaatctgaaaggcctaaagagcttttagcagattcacaaaaattacagaagcaaaagctggtgatcaggatccaccaaaaagcaagatccctaactctccttaatctctggttttaagtcctgaaactctatatcctagggagttaaggtcataaaactgaagctcatattttaatcacgtcaatctagaattgaagtgaatgaatgaactcagattgctgatgccctgatcaagcaataatccacaaacaaaccaaaactaatcatccaaagcttcaaaactagttcaacaatttttcagaaagtaaggaaagagggcaaaaaagggggaagaaaaagcagtgtcactgagggtcaggatactgtttccatttgagagggaaagcaggatattaagtggaaagtgaggaattaggggcttctggtgaatacttataatttgtttcttaatctgagtactcattacatcagtgtcttcagtttgcaaaaattcatgaagccatttgcttctgacacatacacattcagttcagttcagtcgctcagtcgtgtctgactctgcgaccccatgaactgcagcacgccaggcctccctgtccatcaccatctcccggagttcactcaaagtcacgtccatcaagtcggtgatgccatccagccatctcatcctctgtcgtccccttctcttcctgcccccaaaccctcctagcatcagagtcttttccaatgagtcaactcttcgcatgaggtggccaaagtactggagtttcacctttagcatcattccttccaaagaacacccagggctgatctccttcagaatggactggttgcatccccttgcagtccaagggactctcaagagtcttctccaacaccacagatcaaaagcatcaattcttcggcgttcagctttcttcacagtccaactctctcacatccatatatgaccactggaaaaaccatagccttgactaaacggacctttgttggcaaagtaatgtctgcttttcaatatgctatctaggttggccataacttttcttccagggagtaagcatcttttaatttcatggctgcagtcaccatctacagtgattttggagcccaaaaagatagtctgacactgtgtccactgtttccccatctatttcccatgaagtgatgggaccagatgctatacattacctatttctaaatatgcatataagaaaaaagcaatgatgtgaatgtaagttttaaaaaacaaagacaataaagagagaagttaaaaaatgaggctattagacacaaattttcaagaactgagacctaactatggacaatatattcaaggaattaatgataagactgagccttttggtggggatttcaaccctgtctgaagaagggaaaggctaccactccagtagtttggcctggagaattctatggtctatacagtccatggggttgcaaacagtcggacatgactgagtgactttcacctgtattattatttttaaactaattcttttttggtcacactggcagatacgtggcatcttagtttcctgactagggatcaaattagtgttccctgcattggaagcgcagtgtctaaaccagcggaccaccaggaaagtctctcaacctcgtattatttttacagaaaagtcagattcacttttttatgtaactttgacataaagtgctataattttagcaaccaccaggacagatcagagtcaggatgatttatgctctctcagagaaaacagcccagataatcaaagatattaagtggcgcctcatactttgtatcttagataacttaaaacaactccaaaataatcattcttaatcaacattttaaatgtatggtggaaagaattttattttcaccttgccaagaaacattttctgttgctgtttggttaaacaagtaaggtaaacaagatacaatcagaaggatgcttagtctgcttaaaagtaaatatagataaaataggtttcaaagatcctgaaatctatagaaagaaacttccatttgctcaacttagtatactaattgtacatcatatatgaaaaaaggatatgaactaactctaatatatctttatgtgcattgaaaaaaatattttagaaatactttgtttctaatggaattgcttaactttttaaaacataccttctagtgtatttttatctagctattaacattatgcagtttcaattcatgggcttcctaggtggcgctagtggtaaagaacccaactgccaatgcaggagatgtaagagatgtgggttcgatccctgggtcgggaagatcccttggaggagggcatgtcaacccacttcagaattccttctggagaagcccaacgacagaggaggctggcaggccgcagtccacagggtcacaaagagtcggacacaactgaagcaacttagcacgcatacacacatgaggttttaattcatataaaacatctataaatttagaattaagtagaaaggccttccctacaaagctgcaacctaataaagcagttattaggtattatgtattagtaatagcagcctttaggtattatgctaagttctcattcagagtatattatgcatataatcttaaccatctgatctcctgattctcagataaaatatggcacaatttagaaagaaaaaatgttaacttgtatctttcatttgctatcaaagggcaggaaaacagaaaattgtttcagaagtgcctgcatcaaaaaaactttttaaaaatcaactattacatattgtttgtattgaggctagagaaatgaggtattatcacccatggggactttaatgggtattaattaaaacattttatacagtggcttatgttggcagtttttctaaacctcatgatcatttaaataatttcaccttttacaacaataaattactgattattacaaagagaaccatttaacagaaatctgatgtaaaaaaccagtaataaactgtaaaacctgctcttttgcaccttggaacatagctggttctaaaactaaggcagttaaaataaatctagatcattttagcaacaaaataatgatgttatcagttcataacccaaagaataaaataaatatctatgaatccatacttaggaaaataaatgactaataaataagtaaatgggagagaaaaggcaagtcttccttacagaaggatttctaacaataattatgctaataatgaatgagcactacaggcttaaaatacacttccatgtcaggatccatattcttggaatatccatattctgagatgatgcgtacctccaacagcctaaacagaagtaaacatggctccctacggaaaagtattaactgactcaaaaaggaactctggtaataataaggacacaaatacataaaatgtttgtgatgaaactcatgggtataaaaaattttatttataaataaagcttttctactattaaaatatccatacatgtagaaaatgaaatgatatacaatagacaaccttctccatttttctaaaaaactacacactcaactgaaccaaaaaaatggttaaatcccttacttggaaaatggagacagctttgtagttttctttaaagtaaagacagtgttttagaaatacattctgaatagatatgggtaaaaattatataataccttgaattgtatataaaatttgggacagaagtgggaagaggcttgagttaaagtgagagtagccatgagttgatgactgctgcagctagatgatgtatacgtgaggattcattagactgttggccctatctttgtgcatgctcaaatttttcaataatttaacatttatatagtgagtctgactcaagatcaaactataaagctacagtaatgaaaaccaagatagtgtggtactaatgaaagaatagacaaaggacttaatggaacagaacagggaatttcaaaaaaggcctgcatgaatatatatattaactgacttgtgacaaaggagcaaaggtaatacagtagaaaagaaatagtcttttcaacaaatggtgttgaacatcaacatgccaaaaataatcaatctagacacagacctacagcatttataaaaattcactcaaaaaggatcagtgacaaatgaggaacagcaaaccatacaattccagaatgcagcataggagaaaatctagatgaccttggtatagtgatgactcttagataccaccaccaaaggcacaatccatgaaagaaacaactgagaaactgaacttcattaaaataaaaactgtctgctttgtaaaagctgtcaagacaaagagaagacaagccacagagttggaaaaatatttggaaaagatatatctggtaaagggctgttatccaaactatacaaactcaactatgagaaagctaacaactcaattaaaaaatgggcaaaggatctgaacaggtaactcaccaaaaaagatacatagtttcgggaagatatatagatttggaaagatccgctggagaagggataggctacccattccagtattcttgggcttcccttgtggctcagctggtaaagaatccacctgcaatgtgggagacctgggttcaatctctgtgtcaggaagatacccagaaaagggaaaggctacccactccagtattctggcctggagaattccatggattatggtccctggggttgcagagtcagacacaactgagcgactttcagttttcactttcaagcttctgaaaagatgttcaacattacatctaatgagggaaatgcaaattaaaacaacatagtagtgcacattcggagaaggcaatggcaccccactccagcactcttgcctggaaaatcccatggacagaggagcctggtaggctgcagtccatggggtcgctgagagttggacacgactcagtgacttcactttcacttttcactttcatgcactggagaaggaaatggcaacccagtgttcttgcctggagaatccagggatgggagagcctggtgggctgccgtctatggggtcgcacagagtcggacacgactgaagcgacttagcagcagccgcagcagtgcacatttgttaggatggccaaaatccaggatactgacaacactaaaagcaaaagaagttctcattcactgccagtgggaacgcaaaacagtaacgccactattaaagaaaatttggcagcttcttacaaaattatcaaatggttgagtaatcaggggctttccctggtagctcagatggtaaagaatatgcctgcaatgtgggagacctgggttcgatccctgggttgggaagattccctggaggagggcatggcaacccactccactattcttgcctggagaatccccacggacagaggcacgtggcaagccacagtccacagggcggcaaagtcagacaggactgagtgactaagcacacacacatgagtaatcagagtccttgttttatgccaaagcaagttgacactaaaatctgcacagctttacccgtaactgccagatttacagaggcaagcaagatatccttcagcagggaaatggatgaataaactctggggcatctagataatgaaatattatttggtcctaaagagaaatgagctaacagagacatgaaaagacacagagcatccttaaacccatattactattcaaggaagtcaatccaggaaggctacatagtggatgattctaaccaaatgatactcttgagaaaggaaaactatggaggcaattaaaaaaaaaaaatgattgccaggatttgtagcaggaagaggaataaataagcagaatacagaggatttttagaacagtgaaattattttataaactatcacaatggtggggtcaggtcattatacatttgtcaaaaccaacagaagggacaacatgagcaagccttaatgtaaatggtggacttcaggtgatagtgatgtattaatatatgtccatcaactgcaataaatgtactgctacagtggggaaaggtcgacagggaggtaggcgggcatagggagtataaaggaattccttgcattcttcaccctattttgctatgaacctaagactggtttaaaaataaatttaaaacaaatcttttaaaagaatcaatgagtttaatatatcttatttcataggaaagtaggtctccctccactcatatgtgctgaccatcccaaatgctaatgtaaaaatcaaaataaaactaacttttcatcatgctctagaacattcactttcagtaagagaaatgctggttacattcaatataagctttatgaagtccaaaaaaaattaccttttatttcataaagcatatttctggaaaggcacagtttataaatattatcatctatcctgccatctctttctttaattactatggtgttggcagtagtcaagaaagagacactgagtgtacttgtcttctgaattccaagcagcccacagggcactgcggctgctgctgctgctaagtcgcttcagtctcgtccgactctgtgcaaccccagagatggcagcccaccaggctccttcgtccctgggattctccaggcaagaacactggagtgggttgccatttccttctccaatgcataaaagtgaaaagtgaaagtgaagtcactcagtcgtgtcagaccctcagcgctagcaccaacttaagatctaaaccagaacaacacaatgtctgcactctaccgtggacacagactactacataatgcttaaaagctacagcggaatacatcagggcactgtcatgccatgcgatactcataacactactttaacaaaataccacagactgcgtagcttaaacaacagacatttatttttcacagttttctggtgaaaatccacttcctagattgcagctggttgccttctcactatgtcttcacacgagcagagaaagagaaaggaggcacgctctccagtgcctcttcttagaagggcactattcccatgatgagaaccccacactcacaacttggctgaaatctaattcctccccaaagtcctcaccgccaaatacatcacactgggagttaaggatttcaacacgtggattttgaaggacataaatattcagtccatagacaccacagcagtatactggaggggcatcatgcttgcaatgggtcagagttccctgacaagaccagagtgaggaggtgactggcagtatcataaatgcttcattaaactattcagtatgaatggcacacatttgctttcttttttaaagtccgtcatttttaagtttaatatttttctcaaaaaaaaaaaagtagtctctttcccctcaaattaggtctatataaaacaacagaaaacatatatactggtttgaaatattttttccttccttgaggtaactactacgctcttctcctgagttctaagacatgggaaagagcggccccagtcatttgaaaactaaccaatctcaatctcatgaccagataaataagataaaagtttcttgtgcagaatgccttttcgagtggttctcactcaatcataaactataaaataaaattaaacccaacttaggtaaaattaatcatgactcctcacatattcactcccatgcacgtgtgttcagtcggtaagtcctaagtcatatccaactctttgcaagcccatggactacaggccaccaggctcctctgtccatgggattttccaggcaagaaaacgggagtgggttgccatttcttcctccaggggctcttcccgacccagggatcgaacctgcacctcctgtgttttctgcttggcaggcaaattctttaccactgggctacctgagaagccagccagacagatggatataaacacacgcatacatcactgattttcatttatcttcaaccaaaacaactcttgtagtatctcttataatacagttctcctatgtatgaattgttcaatttagttcatctgaaaatgccttcattccatctttatttttgaagaatgcttttgcacaatatagaaatctttgttgatagatttttctctcaacaatgtaaagatattccattgttttttagactccattgtttcttatcagcagtcagtcataatcattgtttctctgtatatcatgcattgtttaatctccatctgcttgcatggttttctcttttccttttgatttcagaagtttgactatgatgtacaaagatataactttttacttcttttgcttgggaatttgatgtgtttcctggatgtgtacacttgtttttttcacccttaaacttgaaattttttcgcttttatttcttcaggtattatttctattccattcactctttcctcttatttggggattttaattacaaggatttcatttcatattgttcacacggccctgagactgttcacttttctttatttgtttttctcttggttcttcagaatgaataatttctattaatctatcttcaggtttctcaacatttttacagctttttcctggctgttaaatctatctagctcctttgccatttaaccattgtgtttttcagcacttgtatttccatttctttctttcttatacggtctttatcctgttaagattgctcatttgttcactcaatgtatctatgttgcctttttaatatttttgctgtgtgtgtgtgtgtgtatgtgtgtgtataaataaaataaatgtagtaactgcattatttgtctgataatggcctcttcttgatgattatgtttctgttgcctactttttctcttgactattagctatatttttgtttctcatgtctgctgactttttcaaattgtattctgaatattaccaactacacactataaattcttccacatgttgcattcctctgacatgtactgatatttgttatagcaggcaatttactggtttcaaactccaaactgtctatcctaatgtggccagcaagtgaaatctctatttagttctcagcctcaggtcagatgtctttatactttttctattaaacacttctcatacaccacttcacatcccacttttctcatatttctaattacttcatattagccagaactgtgttgcatgcccattcctaaactcatcacctacaaagggaacgtacttaacattaactagattagcttgggctaggaagcgatgtggcttctgcaaagacacagtgctaaatccctgcagaaaatgtgtctgcaaggaagatctttttgaataggagtgtctgctggagacaatcaacagcatctgccacattctcccatccaagtactaacaagccccgaccctgcttagcttcaaagatcagatgagatcgggcacattcagggtggtatggccgtagactgccacattctctataccatctagacaacaacacactagcagaatctgtctgacataaccgatttagaactctgtagtgtactgaaggcttgcaatttccaggagaactgcagtaattttaagatatgtatcagaaacttaaagtttgttaagggttagttgctcagttgtgtccgactctttgcgacctcatggactgtatgtagcctgccaggctcctctgtccatgggatttcccaggcaagaataccagagtgggtagccattcccttctctatggaatcttctcaattgagggatcaaacccacgtctcctgcattgaaagcagactctaccatctgagccaccaggggatatcagctaaatgaaaaacagaatagaataaaatggactgtttaaaattaccacattattagattacataaaaccataattttctatgagaagaatatgctaaactactaagcagcaaaatcacaaaactgaaaattaaataacaggattgttagaagataaattcaatgttaatcagttattcctttatgctagagtaataagactaacacagagaaaataaataagattaacaagaaaaataaaaaaacacaggaaacaaatggtgtatagggtcaagaaaaaacaatgatataaatatgcatgacagaatgtcaaggagaaaagcacagtgaaaaaaggacagacatcagaaaagggcaggagaatgattcacatttcttaatgttttaacctttgcatctctcttcctaaaattcatttattaatagtacacgttccaagtcataaaatacttttaatactgtgaacatttgggggctccaaggtaaatatggtgagagaaagacagacttttcccaaatataaataatatgagggaaaaatattaaaactagaaaaaaatcagtcagtagaaagaaacaagaagagggtcacaaactactggcataaactttataaaaagttttttaaaaagacaagaccctacaaaaatacattcttcacttcttgagactgttcattaaggacccttgcctctcaatctggacagaagaaaactgaggggtttttcttttcatcctactgagggtgacgtaaggtcacgagggagattcgtagtggaagtaagtggtaaggaaaagtaagtgggaaggtaaacagtaaacccagcaccccctaaaagaactaatactgtccactagaagagtccaataatactgtccactagaaacttctgtgataaaggaaacattttctactacactattgaatacagtaggcaccagcctcacatgactgctgaacacttgatgtgagtccagtgcaactgaggaagtgattttcaatttcagttaatttaaacagccacatatagctagtagtgactgtatcggacagcagaattcctgggttaaacaataataacaagaacaacttacaggctaagaacatttcttgaaaggaatatactgggtgatatcaatgatagtataggtcatttaagaaagttccaaagtaagtgctcaattttcctaaaaatgacattaatctctgttgagactgaatttactatctcacaagttattcctttcccaaaatgccataaggctacaaaaacaaagaagaataaggcataatcctttatgctagagtaataagcacacaataataagtaataatcccttatgattcatacagtggaagtgagaaatagatttaagggactaaatctgacagacagagtgcctgaagaactatggacggaggttcgtgacattgtaccggagacagggatcgagaccatccccaagaaaaagaaatgcaaaaaagcaaaatggctgtctgaggagcccttataaatagctgtgaaaagaagggaagcgaaaggcaaaggagaaaaggaaagatatacccatctgaatgcagggtttcaaagaatagcaaggagagataagaaagccttccttagcgatcaatgcaaagaaatagaggaaaacaatagaatagaaaagaatacagatttcttcaagaatattagaggtaccaaaggaacatttcatgcaaagatgggctcaataaaggacagaaatggtatggacctaacagaagcagaagatattaagaagaggtggcaaaaatacacagaactgtacaaaaaagatcttcacgacccagataatcacaatggtgtgaccactcacctagagccagacgtcctggaatgtgaagtcaagtgggccttcagaagcatcactatgaacaaagctagtggaggtgatggaattgcagttgagctgtttcaaatcctgaaagatgatgctgtgaaagtgctgcactcaatatgccagcaaacttggaaaactgagcaatggccagaggactggaaagggtcagttttcattccaatcccaaagaaaggcaatgccaaacaatgctcaaactacttcacaattgcactcatctcacacgctagtaaagtaatgctcaaaattctctaagccaggcttcagcaatatgtgaaccatgaacttccagatgttcaagctggttttagaaaaggcagaggaaccagagatcaaattgccagcatccactggatcatcgaaaaagcaagagagttctagtaaaacatctatttctgctttattgactatgccaaagcctttgtgtagatcacaataaactgtggaaaattcttcaagagatgggaataccaggccacctgacctgcctcttgagaaacctgtacgcaggtcaaggaaacaacagttagagctggacatggaacaacagactggttccaaataggaaaaggaggacatcaaggctgtatattgtcaccctacttatttaacttatatgcagagtacatcatgagaaacactgggctggatgaagcacaagctggaatcaagattgccaggagaaatatctataacctcagatatgcagatgacaccacccttatgacagaaagtgaagaagaactaaagagcctcttgatgaaagtgaaagtggagagtgaaaaagttggcttaaagctcaacactcagaaaactaaggtcatggcatccagtcccatcacttcatggcaatagatggggaaacagtggcaacagtggctgactctatctttcggggctccaaaatcactgcagatggtgattgcagccattaaattaaaagacgcttactccttggaaggaaaattatgaccacctaaacagcatattaaaaagcagagacattactttgtcaacaaaggtccatctattcaaggctttggtttttccagtagtcatgtacggatgtgagagtaggactataaaagctgagcacagaagaactgatgcttttgaactgtggtgctggagaagactcttgagagtcccttggactgcaaggagatccaaccagtccatcctaaaggagatcagtcctgggtgttcattggtaggactgatgttgaagctgaaactccaatacttttgccacctgatgtgaggagatgactcatttgaaaagaccttgatgctgggaaagattgagggcaggaggaaaaggggacgacagaggatgagatagttggatggcatcactgactcgatggacatgggtctgggtggactccgggagttggtgatggacagggaggcctggtgtgctgcggttcatggggttgcgaagagtcggacacgactgagtgactgaactgaataagcacacaataaaataacccacagtcagactgaaactgagaggaaaaaacaaatggtctttggatatggtgggacagaataaagaagtcacactatatcagaatgaacaaaatgtctgtaccagcacttcccacgtagctgcaacaggagaagagcataattactgtgcaatacattcatggcacaaaagaaaaaaagtacaaaagacaaattattctgtaaaaaaaattctccatatctcaaaagaaattctctaacaagttagtaagaatgtgaactcaaaaaaaaaaaaaaaaaaaaacctcatatattcaaatcacagaataaaggaaagagtgaaacctgagtaaacttaaaaatgaaagcagtatcattaccaaattaagtaaaaattttaagtaacagactttcaggtcactgaaaatcaaattactaacactcgcacaaaagactggatatgtatgaatgcaaataaaaaggcaaactttaaagcaattatttatagaggtgacagacagcagacaaaagattataaaatagaaaaatttgtattcctgaagcataaaattgacaaggagtaggaaaagagtttgaccatcaaattaaaaaactgaaacataaaaagacaattccctaaaatataggaagaagtgaatatacagagcatatagaatgatccacaccgaagatgcaaccttgctaatcctctaaatattttaagaaaaaataaacaagcaaaaaaacatctttttgaggattcaaacaaacaaacaagaaaaaatagagttacctgcagaaaagaaaaatctgtgactacagagctctcagaacgtgtgacccaacagtattacatctgtccaagaagtcaagtgtaaaagtaaagacatttcaaagatagaagacataagagaagactgacccaagagtccagtcaaaatatcgagcgtgacagcaatactgcaaaatcttgaaattttctctctcatctacccatcgtgctccgttccggaagaccaaaaaagaagacagtacagacaggaaggcctaagaaatagaggatttaacacagaagagagaagaaattaagttccacaacaacagctgtgtagcaagcctagaaagcaatcagattagaactggaggatacagagcctccaggacgtctcctggaagagtatgaagttattggaagatacgcaacaacggtactgactagaatgttcacatatgttcatatatgttcatacatatgcttcagctatatgtaacagaactatatgttcagctatatgtaacagaattatcaagttacccatactgaaaactttttttttttctttcaaaattccagagtgtggcttcatcttcatgcctgccaaatggctgctgtacttgtattcatcacacatacattccaagaagaaacaatgaaaaaaaggcaaagggtaaaataaatacatcaagtaagtctgccaggaaaacaatggctttcctagaatctcagccagaatatctccacaactatttcaatttctccaactggttcatacagccatttcttgactccagaggagtttgagaggaagctggttattttaactggatatattgctactctgaacaaaaatcaggattcttttatttagaaagtgaagctggagagttgatatttggtaggcaactggtagaatctcaataactgcatataaaataatatttggagacgatttaattttctgatggagaatgtggtgtgctttgtaatagtgacatgataaactaggcaatttcaattccagaagggagtgccaaagaacattcaaactaccagaaactgtgctcatttcacatgctggcaccacatatatgaattatatgtaaagatatatttaatgtatatacataatatatatctttatattatatataatatatatgcatgatatattatatacaatatatatatctttacatataatacatatacatatggtgctatgtagcaccatatatagcaccgtatctatatagctacatagcaccatatatatatagatatatatataacttagaaatggagaaagttaaatgcacacaaatatgaaaaagcctaaacgaatttgaaatagctgatacaggcatgggaaaaagtgggataggaaaatgttgtttcttgtaagccttgcagtactcttttaaccatacacgttacttgaatacaattttaaatgtttctttagaaaagaaactatgcacgttttaaaaagccaaacaaaaataaactataaacaacaaaaaaaaaataagtaatctttaagaaaaatgctccataaccaatgaagggagagacagagacctcatttcaatatcagcacgtggtccacagtttcccattaaactgcacactgaacccttccttcctcaatagctgtctgaaagagtgagcaaaaaacttttaaaagtgtgttgtaaagcatggattctaccccaagtcttcaagcttttgttttttaaaaaatccacaggataccaaggaagattcaaacacagcccactagtaaaacaaaatacaaaatttattttacaaagaaaattaacctgtaaataaagtttaaaaaataatctctaacactcaggttcctctaaaagaggagctagatgtggagttttgaattttccccccaaatatcttcatacttgcaaaaaactgctaatcaggaagtatgtacatgaactttgtgttctgatgagttcttattttatagtaaccctcgaaaaacttaagaaacctatcttaaaaatattttaaacaaaactgtaaacttggaacgttcttacacctatgtaaggttttacaacttaagtacagatataatgggaggaagaaaagtaaaattatcacttcgaatttcaaacgggaatatgtatttccaccagaatttattatctggaatcatatactaaaaagtaactgtgaacaacagaattttaagttctaaactagtgaagtaaaatattttgataattattgcaaaaaccaccatcatctcctaaagaaagttcaactttaaattcacaaaattaaagacattcttatcaggcccagtgacatgagtttcacttcagtctgtaactaatgccacaaatatttttttttttaatcacttaaaatttacttggtgctttataacatttattttaaaaaatctattacttctacaaaagcaattttagttagagacttacatcatttatactttcactcttctcctacaataagcttgaacgctacaaagacatttaaataattttatacccttgaaaattatacaaagttgacctagaattaaaaagaaaaaagcagccacttggactgtaaagagtaaggtaaatttaagaaaataaaaatgcaaatatgcattttagcagtcccttgaatttattaacctaaaaggtttaatttccattttcctgcatcagctgtatttataaaatgtcgtgccctataaatatgctgttattttctatagtcaagcaccctcttaacaaatcttctcattaatatgtaaatttaaagtcaatcggtcttctccctgacagccccatgaattcctagtgcactgtataatcggctttgacttggcatccactatttatcatcaaagatgtcagttagaaaaattatggaaaatgcactgcaattgatatgactgcaatctactttgtcaacacttaattgttccgcaaatcatacatttacatataaacagcctaaatactgatctataatgatgcaaataaactaaattaaaaatcgcttctgcccctgaagaagcttgtttgtatatgatgtgttcatttgaggacttactaacaaaatagcatgtacatcagtccatctcagaaagtacttctaattttcaattccttaaaacaaacaaaaaaaatttttgctacccttcaagcatatgaacataaacaaatgttttaaagaattcaatgagaaacataatttttctctttgaaaagcaaagttaattatggttgttagctaattgtaatgtttgagcactaaggattggggaggggggtcaaaattagctttgactagaacagggcttccctggtggcttagacagtaaagaatctgcctctaatttaggagacccgggtttgatccctgggtcaggaagatcccctggagaagagaatggcaacccactccagagttcttgtctggagaattctatggacaggggagcctggtgggctacagttcatggactttcaaacagtcagaaacttattaaagtgagttaaaaaaatattttagaagtcatgagcaaatatatataaaggaatgaattacgaaaagactgatttttatctcactatgtgcttcgactgcttctataattttaaaaaatacacaggattgtagttagctacacccttacaaatgttctatttaagtggttttctttctttccatttcttaagccaaggagcctttctcaaaggaaatcatacatataggtgcctatgaaaggcaagcaaaggtgaagctgctccatttggaatggtggcaagattcccaggagtagcactgcccaccctcccctacaacccctgtggttgctcccaaagcagtcttcctgaggagagagctgcagagctggcaactacaaaatatttcaactaacctacagaatttagaataatgccaacgtcagactgcaaagaagtggcaaagaaatgaggcagtccaattccagtgcacccagaacaacgatcagatgtttgtaaaaattgatgttcacacagttacacatgaaaacacaaagaatgcaccacagtatcaatttctaaaattatctgtcaaaagagtaaatatacatggcagtgtagattttaactgctgggcttttgaacagctttaataactaactttacctaaaataaaataaaattcaagaaacacagacaattacaaaaagagatatttgaaaatctatttttagaaggtaagaaaaatacatttttaaaaattctagattctacataatgatacatagctactgaaaatgatttgatgattacaggaaattaaaattaaaaaattttaaatggtgacaaaagctaaataagataaaataacctataatcttacacaacaggaaaaaaaaaatatatgaatagcattctggaaagtgactggctgaaataaaacagatagctatagctattagcaacaaaaaaatctctcttccaagttaccactgacagaaaagggtcaagacacctgcagcatggacatgctgcttaatccagcaaaactgccttcaaaattttactttgttcgaagctaaaatttcatcaatctaagacctgtatgtgacattagatgtttacatatgaatagtttaaaatctcctttgaattttaagtagaataacctaatcaccttttaaatattaaaattaagatgaagtcaatattacaagtagccttctggttaaagatatattttttaaaaacttaaatactttttaacagtaacaatacttggtaaatgcagaaacgctgataaatattttaaacatttaagcttcttaaatatctgaaaactggatacatcacctaaagcaagaattatgaacatttttcccttttatatgtttttctctcactttaatattatttctaattaacaaaagcaattagtactgaacattctacaaagcctattcataagcttgtataaaaaccactgtgacataattggttggtaatctggtattttactttccattctgtttttaaaatctgtaatactgctttttaaaaagacaaagaaatatcattaagtacagaatgaatgcaagtgctattttataatatttagtgatttctttaaacaagttatagtttacccttaaatcttacatatatactgagatctctattgcaaactatgtagtaaggttttctaatttgttaatgtaacgaaaaaagtaaggtatgcttctaaagttcatcggcaccaagaaaacaccttcactgtaaggtatacttaattatcaattttactaaagttctaccagcttaagtgaaaaaaagtaaaacaaacattctagaaatataaaactaggaagaagtagttgagttcacaatttacctgtaaaggtgtgaaattatctttggtataaattcacgtatgttagaatcacattatctactttttacaagtgaatgcctggaatagttgggtctcaaaggtatgacactaacaaccaaaaaaatccacaatttggcaacgtcactgtcaacactttatcgagctgctgttcccaacaagggcctcttgccaggcctcataccaaaagtttattcactatgccattaaacatgcatcagtcagagccaaaacaatgaacaattatcgatgcatttatactggttttctgctttccaaaagaacgtgaaaaaaattagtcctccttaaacatgcagatttttatactttcctagtcttagatctttgtacacattttagaaaccgcatccattttcttagtatactgtgtaagtataagattattcaacacttacctctttccaaggactgacaaactgtgtacgagcatatcgagttagcatgtggattatgacaacctgtccccactcttctacatcaactagtaaattacatagtttgcggtaattcttgtgaatgagatctattctatctgggcaaacttcttcaaatgccatgacaacactgccagccaccaactagaaaagaaagaaatagtaactcattaaaaaacgttttcctacatcaaagattctactcaggcattacagagacgcaatcagtgttatggcaatcagtatttattcagtcacttgactaattaaatactcatgtttgaataacaaataaattttgaagagtcactgcccaaaagaataatattgatagctgaaacatatctgaaaagctaacacttagaatcagaagtattagtattagaaattatatttcttatttcatcacattaaatttcaatggactgttcatacatggattagacatattaattatgggcagttttcatttttaaagcttacccaaactctaattactcagtacaataacaaagaccatgtcatgtcagtttaaaatgagaatgacaatttcaccatgttgttcagtcgctaagtcatgtctgactctttgcaaccccatggactgcagcatgccgggcttccctgtccttcactatctcccggagtttgctcaaattcatgtccattgagtcagtgatgctatctacgaagaatctatcttaaaatgtgtgctgaactcataaatgtctttagaacaaaaacactttcaaatcttacatattttaatcaacctgttaatttctatcaacattatttacaagaaatactggctacaattttagaacattattattatttatataataatatatgtaagttgaaataagatagtaccaataaaaggaagcttttctccaagaccatttaattaaacacaaatgctgtttttggaattgtcatgtttttacaaagtgatgaaattaagatttctttagtataaaagacacaagctaagcagaatatataataaacaaacacttctatatatgtaccgctgatatgtttggagttagccaacaatataatacagttttgaaaaaataaattaatatcatattctttctgaacactagggatcttcattttagtgtctaaaatttccccaatgtcttaaaataagcaattaaatagaaataaaacttactgaaatggtactttttgaaaaatattagatacagtggtattcatatttttattgtttgtccctctacttggctgacatttagtttattaatatgcaaccaacaatacaattgaaagaaaacagctcagaatatagacttgctattatgctaagcaagtttccagtcctgtggggattttatgaattaccaatcagtataaacgtggagctgcatttattgactccagccctgcccaagtactggtgcctgctggtcccagcatgtatgcacctcaatcgaaaaagcgaagaactgattatttgtgtgaactaaataaaaatgtattatacgtataattttctgtttgctattgatatgggaaggaagttatgtttgtgttttcaactccacattttgatgtcttctgtacaaatcactcttcagtaataatatttctaaaagatgagaactattatcatttaaaaatctcttaaaacaactaagtttatgacatcaaactatagaagaacatggtatttgtaaaacatttatatttacatatgttttatattgtcaatcatcttaattaagctatatttttttaactggttagggtgttaaagaacaaaaatgagtaatatcacttagaataaactaatatatgagaccaaaatcggaattcaacaaagtttgaattcaaggaatactatgtaaaatcaagttattttgcctaaacctagagattatttttttcaattctgtttagacaccaaacaattaaatggaaaatcggctcccacatgctactaaatttatagacctacagatataaaatagttctacagaattaacaaacaacatgaaaattgaaaaaaaataattgtttaagttcaggtaaagtttatggaaacacaaaagtaactaggaaaaatattataaaatcatcttttttctaatgattttagatatttcattcatcatatggttttaacagttgaccccagcctaaacactgccagaagaattgataattctggtatattaaatgttcaatattctataaaaacttacaggattaaaataaaatgatctactgagatttgaaaaccaaaaatattggtttccccaaaacagacagttaatttccatttcactgtgtcaatagtagctttttatataaggggaaaaataaatcactccaacaaaactagcaatgagctcatcaaattcaaatgcagttttccatttatgtattttttatattaaagcaataaacatggttcatttatcttcccttggttgccacgtttttctgtgctgttgctatgaacttcagccattagctgtgctccaaggtaaactacatgaaccatcaacaaaagtgacactccatctatggagttcatattttctccagattatctatgctagttgacaagctggtaatgaaaaaaatcacactaagcaaatggttcctctaataacaataaattttctataaaattatgaagggtacaaaacgtttccttgcatctattttgtcatgaattctaattaacgttgggaaaacctgagagtgctgggtcatcacaagaagtgcattgaggtttgattgataatatggtgcaagttggccagtgctgccaagatttccttctattaaattaatggccatccaacctgccctaatcatacagcccaaatgatattccccctcttatttcaattttcttgaggcatggaaaatgggaaagatcggtcatttatcttctaatagctggataatagatctatcacaataaaacatctgcacaaactcagaggtgtgttttttgcccacaacagtgaagcttttaccaacattaaatcaataacttaaaaaatggagtcttacccccacagcttagctatgaactaccgatatattcattaaacatcattttgtagctaaattaaggagaagaaactttgtcaccaaaaaaatataaataaacaactcaaattttcagtaggcactgatctcatttgttttcctaagaagccattttctattagaaagttaaacgctacaaaaggatttctttaaaattaacctgaaaggaaaaggaaataaataccactttgcttttgaggtgttctaaataaaagaaagaaggttcactacaaagcttaaattgctcaataaatataaatttctacattttaaagaaaaacgagaaagtgttataaattttaaaaaggaattttacacatccaaaaggttttcagtaaagaaaagtgtttaggatatgttgaatagagaaaatatgatgaaaacggtaaatctaggaaaatacaataaagaaattatattaaaaaaaatgtaacagttgactgtatggtcaagcataaataaaaatgttcccttaattgcactgacatggtagctcttattatatcttttaaaatttacagatacagaccccatggacttaacctaccgggctcctctgtccataggattttccaggcaacagtactggagagggttgccatttccttctccaggggatcttcctgacccagggattgaacctgggtcttccatgttgcaggcagatactttaccatctgagccaccagggaagcctaacagataccttcagacaatagttatctaagtaattctaagatgtttttctagttacatcaccaaaactgtatttctaaacccaaagtgacttattttggggaaaggacttttcatatgacaaatatacatatttctctggtaaagggaaaaacatttctattttaataggccttttatttctaccttttcttaaaatcagaatgacacaactaattttgaaatctcaatttcaagaaaatcttcttttagactaaaagaagcaatagaaggtagatctcaaaatcaacagatattaaataaagttcttaaacatattaacacctttcaaaattatatttatcagcagcaagagcaatgtcatcatcattatcatcatgatccccaaaagctcctgctgacagcaaataaactccttttaaaatgtggaaataaattaaatttggatcatttaatgaggaaattttaaataaaaatgatttaggttttttattttaaatattaatagtcacactattaattagtggggaagaaatatagctatatcacttcaatatatctggtaagaaaaagtaataataaacataagatccataaatatctatatagatatcataatgttttcaatctttttacatcaaattataagcatacaaaggaaaaaataatcagaaaacattcacaaaacataaatacttaaatactgggtagacaacttaaatactgggtagaaagttaatgctacctggggaactgtgaatctcaacgcaaagtcagagaaagcaaaaagattaaaatcaaagctctaagcaacactaaaatactttggaatttccaaattttaattacatgtaagtagaaaataagctctaaaatcagagagttatatgtcatgtatgtatcacaaaccttacaaagatctatgatagtctgaaacaactgcccagaataaaagcagacatgagttacaagtgggcataagagagaactgaaagcaagcagagagaaagagaggagcctatgagtgaaaacactaaaaaaaagattcctggtagatcagagcagaagatgaaaatcaaaacaattgatgaaaattatccacacaaaaaaatccatgatgaagcaaacaaacaactctcacgcaacacttcaaaatgaattaacttgcctcaaagaagcatttcaagatcacgtaaatgaacagaaactgaaaatcacaaaacagaaatgaacaaaagacaaaaggaagaaacagaagttgattgaaaccagaaaagaaccagacatcttaattaaattgcaaaatgccccagcagaaaatagttgaataaaaatttaggaaggggcatttaattaaagtacgaaaagaaccaagagaaagaacgcgagataaagaagtaaaggcagcaaagaagatccagcttagagaaaactgaactctctgaagaagaaaagctaacagctgaatagaagcaatatttaaaacttaacagcaacaacaacactttgccagaaataacataaattctaaatctatattgtaaaaagcctcactgggtaccaggaaaaaaactgaccttgacacaccagaaaaaactaaaagttaaagagaaaaaaaatcctcagggtcagcatcttacttaatacacacacatgacaggcatttcctttaaactgaaacaaggtaaggatgcacaccatctccaccactactgaacaatgtactaaagttatacaccaatataattaattatgacaagaaaaattagagtcataagtatcagaaaagagaaagtaaagttatctctatttgcaaatgatatattttctggaaagaaacaatggaggttgaaagataaaactaaatcaaacaataaaagaattcagtgaagaagcaaaatataaaatcaccatacagaaaatcaatagctttcttctataccaatgtaacaagttcaaccatacactgttaatgtaatttcgatttacaacagcattcaaggaagtaagggtaatgataaacgtaattctaaaccaacatttaactcaattagtagtccccatctcactactcttcacagagtacaagctggcaattctgaaaaaatactttatcttccttccaggactgagcaagtaagtgtactggataatgtaagtcacatttcttaatgttggaaaaggaagttgcaaatattgacatgaaaaggtaggacactggaaaaccgtgtgcttctgctctggaattacagaattcagtataaactgaattcagagaacagaaatttgcttttcttttctatcatatttcatatggatagaagtttctatccatatgaatcctgcttcatatagaaaatagatgtaggttcttttctaattttttaaaaataaacatatcctatatatactttaggataggtagtacctcacaaatgacaagacagtcaaagctccccaaaggacctatctaccaatgactggagcatgacacacaccatttgggaagtaaaacattgaaaataatagtaaatacctaattacctgcaccaagaatatagcaaattaattctcacaattattcaacacatcttaaatatctactattaatgagtacaatatttttttctattgtattttggaaataaatacaaaatacagggtcagaacccaagaacagacattctaaatttacaaagaaagtgtattctttatattcctttttgagtcgtttcttattaatctccttttatggtgtcaggcactgcgctaaggattttatatacaataactttctcaacacaaacaaaaactttatagattggaaattataaggcctaaaaatttggaagctgaaatttatgaaggcttgctgctgctaagtcacttcagtcgtgtccaactctgtgagaccccatagacagtagcccaccaggctcccccgtccctgggattctccacgcaagaacactggagtgggttgccatttccttctccaatccatgaaagtgaaaagtgaaagtgaagtcactcagacatgtctgactctttgtgaccacatggactgcagcctaccaggctcttctgcccatgggatttcccaggcaggagtactggagtggggtgccactgccttctccatatgaaggcttaatacatagctattattcagttgcttaagtcgtgtccgacgcttttgggactccatagactgcagcctgccaggctcctctatccatgggatttcccaggcaacaatactgcagtgcactgttatttccttctccagaagagagggggatgttctctgcttctctaggggaacttcccgacccagggatcaaacccgcctttcctgcattgcaagtggattcattacctctgagccaccagtaaagcccctaatacatagctaataagtggtaaaacttcacgctcaaatacaattctgtttaattccaaagaaggtagttgttacccgtggcatgctacatcttgtctgagaagacatgcacatattatatatggagatttcatttctaggccaagaaactaatttatttaccttattatgtagcagaaatcatggcaaactaccttaaaataaaggatctgtttcttacagatcttagtattcttcatagtagttggcaagtgtcttcaagacagaagaaactaaatgtttttttttattattattactaaaatcaagttatccacaatatcaataatattgattttgtatttgggtctggaaggatataacaagtgtgccatacaaaagacaaaaaggaatcaaatttcttttctctgtcttcattatgccaaccactacagaagaaacaaagattcctgctacattattgactaaaagaaatttgctgtctagtctccaagtacagtctcaggtaaatacattattttcaaaaatacatagtgaaaaagatcactaccatatacagcatatacactggatttttttaaaaaagtaatgaagggggaataacaaacaaaaaaagacatgagacatagaaaaacataatggcagctataaattaactgtattatagtaagaattaatgtcaatggattaaaccatctaaacaaaaagcatatgtagtcagaccagagtaaatatcaagatccaactttatacagacctcaggagacacacattagattaaaaaataccaacaggttgagagtaaaaagaaggaaaaagatatattatgtaaacagcaattttaagaaagttgtactgaaacaggacaaagtagaattttaaaattgtttatgagagattgagacattttataatgacaaaaggaaggtaaaaacaattaaaagtacactctgcttatttaacttatatgccccaagtacatcatgagaaaagctgggctagaggaagcacaagctggaatcaagattgccgggagaaatatcaataacctcagatatgcagatgacaccactcttatggcagaaagtgaagaggaattaaagagcctcttgatgaaagagaaagaggagagtgaaaaagttagcttaaagctcaacattcagaaaactaagatcatggcatctggtcccatcacttcatggcaaatagatggggaaacagaggaaacagtgtcagactttatttttctgggctccaaaatcactgcagatggtagttgcaggcatgaaattaaaagacgcttactccttggaaggaaagttatgactaacatagacagcacattaaaaagcagagacattactttgtcaacaaaggtccatctagtcaaggctatggtttttccagtagtcatgtatggatgtgagagttggactataaagaaatctgagcacagaagaattgatgcttttgaactgtggtgttggagaagactcttgagagtcccatggactgcaaggagacccaaccagtccatcctaaaggagatcagtcctgggtgttcactggaaggactgatgttgaagctgaaactccaatactttggccacctgatgcgaagagctgactcatttgaaaagaccctgatgctgggaaagattgggggcaagaggagaaggggacgacagaggatgagacagttggatggcatcatcgacttgatggacatgggtttgggtagactccagaagttggtggtggacagcgaggcctggcatgctgtgtttcatggggtcacaaagagtcagacacaactgagcgactggactgaactgatgcaccaaatatgagagttcctaaatatacaaagtaagcagggacagaactgacagctctatagttaacagtagacttcaatattccacttttaatgagccacaagaaggaagatcaacaaagaacagaagacctgaacaacactataaaccaattagacccaaaagacatctacagaacacgccatccaaaggcctgctgagtatatattcctctcaaatacacactgagcattctccaggacagaccgtataccaggccatatattaacagctatagtctggcttcgctggtggctcagatggtaaagaatctgcctgcaatacagcagacttgggttcgatcactgggtcgcgaagatcccctggagaaggtcatggcaacccactccagtattcttacctggagaattccatgagcagaggagcctggcaggctccagtccacagggtcgcaaagagtcaggcacgtctgagcgactgagcacaatacgaggttgctgctgctgctgctgctgctaagtcgcttcagtcgtgtccgactctctgtgaccccatagatggcagcctaccaggttcccccgtccctgggattctccaggcaagaacactggagtgggctgccatttccttctccaatgcatgagagtgaaaagtgaaagtgaagtcgctcagtcatgtctgacactagtcatgtcgctagtggctgctatattggcttctataaacagatatgcatgcaactgggtgatatcttcctaaaatgaactggaatccttttttgaacagttttgagccatacctgtgggtgcagagataccaccaaaaggtaccattacaccagctcctccagaggtctgctcatagatcccatgcattgccattatttctagatctcattatcatgtcactatacataaagaataggactgggataggaaggaggaagagacatgtacattccccaaagatggggaatttgctgagtaagaccattctaaccagccaataaaacagtgttatacatatgaaaacattttagtatccaagaaaaaaaataatacattcataatactaaaacacactcctctatttttcattatctctttaatactgaatacattataaaacaattatgttttcaactgattcagcctttaaaaatcctagtaaatcgctgtttaaaataaaaaaaaagttggccttaaaagcagtcaacaatttagccacaggttaaagaaagaattgtctttccccaacttgctcttcttcagactctcatgaagaaatatgtaacaaactacaattccaaatggaacttttctctttacctggacatttttatttttcaagattttaatgagctccattaatatttatataatttcaaaatctatttgttgttctgtcgctaagtcatgtctgcctctttgcactacatggactacagcataccaggcttccctgtcctccactatctcccagagattgctcaaattcatatccattgagttagtgatgctatttaaccatctcatcctctgctaccctcttctcctttagctctcaatctttcccagcatcagggtgttttccaatgagttggctcttcgcatcaggtggtcaaagtattagagcctcagctttagcattggtcctttcgatgaatattcaaggtttattttctttaggattgattggtttgatctccatgcagtccagaggactctcaagagttctccagccccacagtttcgaagcatcaattctctggcactcagccttttttatggtccaaatctcacatctataaggactactggaaaaaaaacatagctttgacaatacaaacttttgttggcaaagtgatttttctactttttaatacattatctaggtttgccatagctttccttccaaggagcaagcgtctttttattctataagaattattatatcatatatatgatagtaaaataattatgtaaaaaagcacaattttactggacatgaaaagatattacttactgtgcttttatccttcagaagtttttcaattatttcaattaacatttctttctgctctggatcaaggctaaaatataaaaagaaaaaaaatttatattaattttttccctttatttctaactttaagtgaggctaatcatttcaagaatatgaaaaattttttaagttggggggagaaacagactttagatagaaataaacagaaaacaaatttaaagtggaatgagttgacttttcctattctatctaaagttgctcatgttaattaaacccagatatcaaaaccattaagaaaatagttaaagaacaaaaccacttcttaaaatgaacttgaaaaccttaagaaagtaattatagttaaaccacaaaatcttttttttaaccagggggaaataacaaaataggaatcatttttgaccatggatacctaactgtcaaaaagaaacacatagaaatttccaaataagaattctatatcattctggtttactgatggagacatgcataataaaacctgccatctaaaaccaaaaaggataaaggctcagatatgtatagaaatgacagatgcatcgtaatacgagctttacacaccgaaataatttcttcctagcacagaattcaatcgttcatttactgagaaactaaacaacgggcctacaaagagaaggaagacaatccagtacacacagccccagatgtaatcataagacagaatggagatttggatagaggactctggggtaggggacactgatggaggcaggaaggctgtggagggtttctttggggatgtgacatctcagatgaatcttaaacagctttacatctggaaaaagtaggaaatattctaggcagagactaaaaaaggatcaagagatggtaatgagataagaagcattttatggagaggactaataggcagtactgagctactagactataaattcaagtcagagagaggtaacatggagcccagtgatgggcttttaagctgtcatagtgagctttgattggagaaggaaatggcaacccactccagtgttcttgcctggagaatcccagggacggcagggcctggtgggctgccgtctatggggtcgcacagagtcggacacgactgaagtgacttagcagcagcagcagtgaactttgatcttattttgtaagttaataaatagaaaggataaagactacgaagcatgagttgactttgacaattaacctaagaaaatgagtttcacttttcctaaacattatataagtttattattgaccattataattatctgatttataattaccctggaggagggcatggcaacccactccagtattctagcctggagaatcctatggacagaggagccgggtgggctacagtccatagggtcacaaagagtctcactactgaagtgactaagcacataattatctgaacactcaaaaattttaattgtttcaaattccagctccattctcccttctctaatctttcctaactaatcccatttctattttaagaaaccctatatgacaatctctgagctctaccctatcaaaggcactgtcattgttcctttatatatacataagacttccctgtagctcaaacggtaaagaatctgcctgccatgcaggaaaccagggtttgattcccgggttgggaagttcttccggagaagagaatggcaatccactctagtattcttgcctggagaattccatggacagagaagcctggtgggctacagtccgttgggtcgctaagagtcggacacgactgagcgactaacatacatacataacatacagattcattatttagcaataccttactcaattatagactgctttaattatttggcatatgtttgattatttcccctcaaaatgtgacagtacatcctctaatgttttcatacatcttatgcatatagcaccacaccaaaaacacaaaatgatcttgataaaagctcgtgaagtaaatggtaactgaaaataataccaaactatgaaagatgataaatcttttatataagcattatatagtctacagagataaagttaccatatatatatgtatatatatctatcagtatatataattataccatatagaatatatatatcacataaatatagtatggtgctatatttaaaaatcagtatttaaacagtatttaataaaacggctctggaaaagaagcaggcaaggaagggaatagcaggaccaaagatggatgaaagggtaacaaagtgagcagagaagataacaagctttagactctaccctacaataaataggaggaaaaaaatcttaattttctaatcacatacatgtatgtgtaatgagaaaaactgtataaatgataattcagtatctgattatttttcagttataaaatatcactgtccctaacaggctcacaagtagaaaccctgcaaaggctcccaaaataaccaaaatgaaatagaagatgtataaagaatatttgtgggcaaggggaaagaaacatggtcattgagtttacttactcagtttaaggtcagactattatatgagcgaataaaatatgcctccatgggctttaacattccatgcgacattagggatctttggtattatttataaagtaccaacctgtacagtttttgtattgcatgggctgcatttttcctaacgtatggtgataaatcagcagaagcttccttaatggcaagcatcataataggtacaataattggcactctaatacttgacagaactctcaaagcacttgcacgaattagttgatttgggtcctaaaaatagtacaaaaatattcatcaaaatttcaagtttgcaatatttcaaacacatcattatgatagagttaacaggtacttataggatataacacaacaatagcaaaaaaaaaaacctacttaatttaaaataaataaccagtatatggaaatggctaaggaaaaagagaaataaaacgtttctttctctgagtaatgttttaacaagcaaagtaatgtttataattctacttgatcatatattaccaaacatgcaggtttttggagtttcataataaaatgctgcaggtggttagttttatcttaaaaaaaaagtcacgcccctctttgtatactttcaacaagttagtgtaacgatgaagagttctttgatgcacaataatgattacattgaacgtaaaggaacgtacaaggcaaagcccagttgattatataaattattttccaagggtattgaataggcacagtgagaggccttttaactctttcaaaacatgactgcactattgagtggattattgctccacttctttaaatgacacaccttcaactgtgcagagatgctgcagctattatttgcctgctcactctaccatttaccttcagagctcgctgaaaagtgcttatggacaagagggccagatcctgctgctcttcagcgtatcggaccaggtaaacatacactaacttcttgatctgtgaaaaagaaaaaaccatttaatcctagccagagtgaaaactaaacattcaatactgtctatacaaaaatccattctcaactttcctgaactaagtaacagaacctgctcatagcctacattgtaaaataaagataatataagataattaatagaaacagaaaaagtttgtgaagtaaggatttcactaatctaatctgtaacagcaacatcctatcaaggtgtcctttctcttgaagggaaaaaagttcctgagcaaaactcatacaagagtattaaaacattaactgcaaaagttttttcaaaatgagggatacaaataatattaggaacttaggttctgtccactaaccaagtacatggtatgggaacttacatttgctcatctgtcaaaaggtgctgaaacacaactctgattctatgataaaattcagattccaatagacattacatgatattttcagctccagaagaatgtgtgacaacagcatcaatttaatgtaataaaaattccagacggatggaagtgtgttctgaaaactgttttcaaaggcaattaaatcactaaatttataacaaaattatgatgagcagaaaaattaaccgaaaattgaaatctgagctgaaattcatcaactgcttgcttatgacactactctcagcttgtatctccctttccaaatatcttcagataccactgcctgattaattttctgatatatttccataggacatatctaaaggtttatggaatgttcaaagagcatgggaaagaaggggaagaaacagctggaatcgatgctgaaaaggaaaactgctatactgggccacattttacatcacaggaaccaatgtggatttctttagggacaactgccagggcctccctggtggcttagatggtaaagaatccacctgcagtgcgggagacctgggttggattcctgggttggaaagatcccctggaggaggtaatggcaacccactctagtattcttgcctggagaatcccatggacagaggagtctggtgagctatatagtccgtgggttcgcagagtagtacacgactgagcaactaagcgcagcgcggccgcggccttctctcccttatgcgtcaactactctcgacacagacagcagtgttctgagttccttcaccatcctgtttgttcccttctgaattcaccccagtttgcctatattcttttcagtgtggcactccaagctacaaatgaagtctaagcaagacaaactagttaagattttgttccagatgaggtgcttctactgagacaactaattcttgattaaaaccatatactttttccaaaggtactactgactaaagcaatccacaggcctagtgaggtcttttaaaaggaggacagtatcttacacatacctacagaaattttcaacaacttaaattcaatccatcatggcaccctcctcagataattttagctcttaatctataatccaacctattttgctattcttcacaatttcaggaacaagagtgaaaacttaatgaacatactttctacatgtttatcattactaataaaaatgattaacacaccatttcaaggtaatatcaatttgtctgtactatattgacagggttataggtgaaattaacaaaacatatttccagttactcttcagtgttcaatagacccacagaatcttaaaaacgaaacctaatatataatacagcccatactgtatgtaaaacctactcaatacagcccataatcttccctttccagcaatcagaaatagtcctcaaatataacttgattttctgtctcagtctccacttagcttatcatccttttttctctcaagttctactaatcaaaatcttccataaaagcaaacattaaacgataaaatttccactagtaggggaacagtaaaacaaattacggtatgtccacataacattgtattacgtggccattatatataattaggtgaatctatatttgacattgaaaatatgtccttgtaaaaacttttaaggatgcaaaactatgcattttatgatctcacttctgtattaacagaaaatatacatgcatatgctgtattttatcagtcttagggtacaccatcaatttgtaagatgtaccaaaatttcacggaccacaagaaaggtacaaaacctctgccaattttaagtcatcctcaactgtaaagataagtcccaactgcataaactttaaaatagaaaacatatgtcttagaccagacataatacgataataatagcaaatagttatatacttaactatgtgccaggcacacttctaaatgttttaattagattaattaattttatattcataactcaatgaatagacattatcatttctattttacaggtgaagaaactgaagcacagagaggctaagtaacttgagcaacatggaaatctattaaacaaagaaccaagattcaaagcagttaagcctaaaagttaaaaaacattacacagtaaagtgttaacagtgactgtccttgggtaatggtattaaccagtgaccttcactctttacatctttctatattatttaattttttcacaatgaatattaagtttatactcataaaccaatagacattttcacttcaggggtgatctcatctttccagacaacctccaacccccaaataatagtactttctcggattttaaaagtatttgaagttttcattataaacaatctgaaacaacgtatttttaagttcccacactcctctaagatggctttttctatagcattggcaacgtgtagccaccagaactattttaaatgagttcaacagacaaaaactcagctaaatcaacaagtttttgcaagtcaaccgaactgtgacagccccttgcgaagttagccaatcaggaacaaattcactccaaaaaaaaccccacaccctggcgtgtcaatcaatcaaaagcagatctcacccaagtgcccactcatccacagatgataccaacccactcaggccccttcaagtccatgaaaccttcaaatgatcactgaatcaagtaatctcacataagaatacaaaaaatgggttccaaaattaagtgataactagtatacaagatgctaaccaaatgatccaaatatacccaatgctttagattatatttaaatggatatataaaatctttaaattcttaaatcccagtttaagaagtacttatcattttctccccaaccagattttaaagttcctaagattacaacagcaccaaaaaggagccaacatttgctggttgactgatctgcaccaatttaaacatatcaaatcaacacaagattttaaagaagatatttttcaaatccaccttggaatgaaagtgcggttatttagtacaggcaccatagcctggcacacagtaagagcccaataataatcagctgaatgaaacatcacagcccagtgagagacagggcggggggtggggggggacatttcctattagatgctatatctaacttactaccaattgttataattcatgaaacagatgtttaaaaggacatcaacaaactgttagcaaacaacaggtattaagaagattgcctccaaagtctttaacttgtgggttttttaaagaaaattaatcatttaaaatactctttctcttcaccaattatattcagatctcagtctacagttctcagcaaagtgtggaaacaagaatgagttgggtccacacccacctcttcatcttcttgggatttatttctcagcaacatcttttatttacctaactgtaagccagctcttaaagctgaattatgaactccaaaatatatctagtatatacactggcaacactgaaacgttcaaaccacagctgagctagcaggcattgctataattactcaccattggagaaggatttttatgactgttatagcaaaaagcataacaatattaaatcacagaaggttgcaaaacactaaatttgttcaagttctgttataagaatcaatcaatattgaccacaagaggcctatgcactgactggctgcaggtgtgcagagaaagcctactttccctgaaaccattctgtgaccagaaatgggagtacttaaagcttcgtgactacaccattctctgatcagttactttccttcaatgttacaatactccttgctgtaaagctaatcacagcagagccccagtaggctggaaggacacaggcagatctgtttaattagcttatcaataccagtgcgtcaaacctcatgagtcattgaccaaacctttgattatttttgttctatagccactgattgcttactaggtcacttttggtatcatttgacatcgaatggcttatgacgtgcagctcgactgtgcgtctaaggcagcatgtacttgtgaaaatgacattttgtacttgacggcaatgaaatatccattttctgaacataaattttaagcagcttaggccagtttttccacattagaggattaagcctgtttccaaaaactaacagcattttaagagcaaaacaaacctagaacaaacagatcaatacagtagttcccctctacctgtgaggggtacgttccaagacccccaatagatgcctgaaactaaagacagtactaaattccatacatactatgttttttcctacacacacatacttataataaagtttaatttataaattagccacagtatgaggctaacaataactaataataaagggaacagctgtaacaatatactgtaatggaagttgtgtgaatctgatccctctcaacttactggactgcacctacccttctcctttttgtggtgacgggagatgaggaaatacctatgtgtaagacgaagtcaggtgaatgaagctagcactgtgatacagggtcaggctgctactgaccttctgatgttacatcagaaagaggaccatccactatgggtgagcctggggtcaccgagcacgacaatgttgatggttagatgtcaggagcaggtgtcaccaatggttggggaccccagagagaatggcacaaaatttcatcctactatgtgttacagcgagcaatttaaaacttaggaactgtttatttctagaattttccatttaatatttttggactgcagctaaccatgggtaactgaaatcgtggaaagtgaaatcatggaggagaggcagaattatatttatagggacatttgttacaaatattagacagcatatcagaatctgattgtaaagggtaaaaatgaatagaaaagttctactactgataactgaacattacaaacagctaacagtacagaattttctatttaaaacaagaagcctggaagtccagaaggaactagttacagcataacttattaccaatatctaaggacttggtcatttctagccacatctaaaacataaaaaatttatatacccaaatgggccaaagacctaaacagacatttctccaaagaagacatacagctggtcaacgggcacacaagagtgttcaacatcactaaacattagagaaatgaaaatcaaaactacaatgaggtatcacctcactctgatcagagtagccatcacttaaaaaaaaaaaatctacaaataacaaatgctggagagtatatggaggaaagggaaccctcttacactgctggtgggaatgtaaattggtgcaaccactatggaaaacagtacaaaggttcctcaaaacactaaaaaacagttgccgtattacgaagaaatcacactcccaggcgtatacccacacaaaactgtcatttgaaaagatacacgcatccctgtgttttcagtagcacgattcccaatagccaaaacatggaaaccacctaaatgtccatcaacacatgaatgaacaaacaagatgtggtacatatatacaatggaatacttgttgctattcagctgctaagctgtgtccagctctttgcgaccccatggactacagcactccaggcttccctgtctttcaccatctccagagtgtgctcagattcatgtccattgagtcagtgatgccatctaacaatctcatcctctgccgccctcttcttttgccttcaatctttcccagctataggggtcttttccagtgagtcggctctgtgcgtcacgtggccaaagtactgaagcttcagcttcagcatcagtccttccaatgaatattcagggttgatttcctttaggatggactggtttgatctccttcctgtccaagggattgtcaagaatcttcaccagcaccacagttcaaaaacatcatttcttcagggttccaccttctttatggtcaaactctcacatccatacataactactggaaaaacaacagctctgactatacagacctttgtcagcaaatgatgtctctgctttttaatatgctgtctaggtttatcataactttccttacaaagagcaagcatcttttaattttgtccccgcattcaccatccagtgaatccaccatcaccagtaattttggagtccaagaaaataaaatctgtcactgctttcacaatggaatactactccttaagtatgagataattcctaagaatgagataataccatttactgattcaatggacatgaactttgagtgaactccagcagatggtaaaggacacggaggcctgacttgctgtagttcctgcagctgcagagagtaagacacaacttagcaactgaacaatgacaacagcagcattcacagcaacatggatggacctggcaatcatcatactcagaggagcaagtcagaaaaaagacagatatcatatgatatcacttatgtgtgcaatctaaaatgtgacacaaatgacttatccatggaacagagtcacagacagagacacagccctgaggttgccaagggggagagggggttggggaaacggttagagatacaaactgttatacagaatggataagtaacagggtcctgctgcagcacacagagaactacactcaccatcctgtgaaaaaccataatggagaagaatatacaaaacaatgtatacatataactgaatcgctttgctgtacagcagaaactgatacagcagtgtaaaccaactctccttcaataaagttaaaacaaatttataccaacgccagatacctcccaaaggagagctaacaccagatgatgacaaaaggtcaaagaaactaaagaaaaaggaggaaggattcaaacaggaaggatggctttaaaaggggaatgacctaaaatggtttctgaagccaagctgcctggctctggattctgactgccacacactagtgtgtgaccttgctcacataacctaatctctctgctactctgtcctcataataaaaacatggaaaatgaaagaaccagcttcacagggctgtttgtgagcataaaatgagttgttatatgtaaggccctaagacaagctttacccacagctcacaacttttctaagtaaatcttgatttttttcctcagctacttaaactttcttataccagaaatcataaaactaatgtacatatcaaatcaggagctcagacagctcagatggcattgtcatactgcaaaaacagtttaactgaattatcaattcagaactatacatcgtaacaagctcataaattgtacttaataagcatctactaaactaatcacaagtaaactttgaaaatactgtaagatcacacgctcagtctagatttatcccattaattagaatctgagaaagaacagttcatcaacttaagtccaatattaatttatcctggttcttaagttggcaacaagtatacaagtgtttcgattttaatttactcaagttagtcaagttcactctatgacgcctattcatttgtgtacaaaattcatctatctgaaatatgtattatacttactgtctaatagaaaatgaaattacttcaaaatgtatctaaaaagcaagtttaaaatttttatagaatctttaaaattctataatataaattatcctattaaaaaatttaagatggcaggaaaatattttaatattgaaatatatactcttgaaattgtataacatatacttcaccacacttttccagatttggaacatgcaaatgcaaattatttaaacgactaatttctcttatatgagagattaacgcccaatctgttacacagtattcaaataacagctaagggtctacatcatatcaacatcgtgtttgtatgctgctgctactgctaagccgcttcagtcgtgtctgagtttgtataacacaaatgaaatgtgacctggctgatctgtttgtttcacttaagcaaaaaactctaatcatcattctcaggtcatgattattttatgcactctatttttcttgtaccaaatgcaatcttttcattagaaaatgccttgttttccaaactagaagtaattaagtactgactataaaactgctaatgacacgcagcttacttaatatattctgtaaaaccccgttccagaactgtgatataaaggatggaaaagagaaagagaattttcaagcatgtaaaccagttatgaattgaaaattcttcatggttaagtaggaaaatttgagagtaatgttttcatttgactgataactttccatatattttagggttttaaaaatatttccagattatgatataaagctataacttagaaataataactgagagatcttatttaccctccctaccttaaccacacagaaaatcaggaggaaaaaaaatgaaacaaaagttttcatatgttggacaccaggcagtacattactgtgaaccctgagaaaggggaaaaagtcaagggagcaactcaaacagaattcggaagactcactgtgccaaggacacagtgatcaaagttcacacaggccaagggtgcctgagtttgcaaagcagaataccaaaaaggagggaacatcagagagagtgaaagaatgcactctggagaggaacaacatcaaactgtgggctagcacagtcttgcacatacgatgaaacctgaagccagaccagaaaaacacagggaagaagcaggcagaacagacaccaaagatcacaaaaagcaaggaaaagctcatgttctcaccagccagggagaaaatatctcataaatatatgtacgactgagcagaatcctaagatactgctttagtagtgggcttacattagtctagactaaaggtgtttctgtatcttttagtacacattgaaagtatgctttgacaagtatcctccaattaaaaatttaaaaatacaaaaaacaaaaagaaaggataaggtggtaagaaattcgtatttagtggactagcttggagatctgatacagctactgactgtttctcagagtttctaagcagttaaaataaaacagtataaaatatccaaaacaagtatgctttgaaatcatcaaatgatccatataaacttaattgtgcatcacaagaaaacccaacacaatttaaacaaaaatcaggacagtatgaatcataactgtgagaaaaatcagtctccagaaaaagacttaaaatgacagaactgtcagaactagcagagggatgttacaactattatagatacgctccatatgtccaacaaggtagacaaaaatataaatatgctgaagggacaattggaggatataaaaatgatctcattaaacatgcagaaatgaaaagtacagtagctggtaagataactatactgcaggggagtcacaatagctagacactactaaagggaagatgggttaacctgaccacttctcaagtgaagcacagagagaaaagactgaaaaagtgacctgtgcaacaatatcaactagtgtactgtatgtctgcttgaaataccagaaggaacgaagacaaaaaagacatatttttgaaaaactaatgtctgaaatgtttatcaattttaagaaaactataaacccacatgagttagaagctcaacaaacaccaagcagaataagcatgaagaaaaatatgtcaaggtataccacagtaaaactgaaaaccagtgataaagagaaaatcctaaaatcaacagaggaaagaaaagatagcttacacaaagagataagaatgacaagacacttggcataagaagccatgtaggtcagaaaacaataaaatattttttaaatactaaaagaaaaagacagtaaagaacatagatatatacattttactcagcaaagatgttttcaaattgtatacaaaaaaagctgagaaaacttttaaacaaaagctgagaaaactcatcaccagcaaaacaagaaacattaaagaaattcctctagtcatttagggaaaaaaattcattcattcatggactacatgaagaaatcaaaagggacatgaatggtaaacactgaaggacaaataaaagactttgcggggtggaaaggggagctcatttttaaatttctttaatagatatatggacttcgtggtaattttggaataaaaccgaagtagaacaatctcccacatacaattaaaaaacctagacataacacaaaaagcactaaagtccctggcaatgaaacagaaacagacagattcttctggtatagagagtatgtgcaaagatggtaagaaaaagagctgcatgaactaccttccccatttccatggtcttctgctgaggctaagtgagcagggaatggagtacaggtggaggcactgatggacaaaccagtctctctgacagaacccaaaagtgaacacagcaacaccacggccactgaagcaaacaggggaatccacaaaggagagcccagagatgggctcgtcaggcagcctctagccacctctctgactgacttctgaaccatgcaagctcagaacagacccaaagaagctcagcaaaagacaaaaaatatgagattaagtcgctgcctatgcaacagaatttgaaatctgaatctaggcaaaataactgccttctaaaacaaaaacatcacctatagaatataaaaggatgcataatctacataatttagtattcattatttcaaaagaaacaaacctaaattacccaacataagaaaaagtaaaacaatgggacataagcacacaagaaaaggaaatcaacaaatacaagtctgaggaaataaggatactggaactagcagacaaggattttagagctggtgttgcacttattcttaagaaaaagaaaatgtgctctccattaatataggatatagaaaatcacagcaaggaaacaaaggatataaagggcttaaactgaaattctaaaatgaaaagatagttttaatacttttaatatcttaatttctaaagtaaaaaggaatgtacttaattaaatggactgaacagaagaatgagtaagcaaactcaaaaatagatgagtaagaactacataatacaaagaatgagaaaaacatcttaaaataccaacaaagtttcatacattctcggataaaaattaaacaacataacatatatgcaattttaataccagaaagagaaaaaagaagagggcaaatattacctgaaaatataatcgccccaaattttccacttttgatcaaagacaggaacttacaggactaagatgctcaacacacaccaaaccaaatgaaggtgaataagatcacaccaaggtacagtctagtcagattactcaaagccaaagataaagagtaaaacatgaaagcatcaagagaaaaattacaaatcatacaggaagatcaatgatccagtcatcagaaactttacataagaaattatggacggcaaaagaatcttcaaagcatctttaagtgctgaaacaaaaagaaactattaacccagaagtctccaaccagtgaaacaattcttcaggaatgaaggcaaaatgcaaacattttcagataaaagtaagagaattcattgctagcagacctccactacagaaaaagccaacagagattcttcaggcaggatgatcttgatactgacagaaatctgaatccctagaactcaaagagaacactggatatgataaatatctgaataaatgataaatacttttttctgttttttcttttaattcctttatatcacataagtagttaaaggaaaaactgcagtgtcttatgatgttttttaacttatataaatctggtaagttaataactaaaacatagaagacaacagggatagaatatatacagttgcaagatttctatattttatgtgaagaagtgcaacattaaacataactggactgtaaaaagttaagtggatacagccaacactaagaaaaaaaaaagtatgggttaaacataaaaacaagaaaaatttaagtgtgatttcttccattaaaaaagaggaaaagaagaaaagaacaaaaaaacaaaggaaaccaaaaaaaaaaaaaaaagaaatggtgtaatagtacactcaaattcaacaacatcaataaatacatcaagtgctaacaacatcaacactccaattacaaaacagagatggaactcccctggtgctccagtggctaagaatccacctgccagtgcgtgggacatgggttccatctctggtctgggaagattccgcatgccacagggcaactaaacttgtgcaccaccacatctataatactgaagcccgtgcgccctacagcctgtgctctgcaacaagaaaacccactgcaatgaaaagcccacatgcctcagctagagaatagcccgactaaggcaactagagaaagcccatacacagcaacaaagaacttgcacaaccaaaaataaatagattaattaaaaaaaaaaacacaccatttgctcagatcaagctctacttctcttcattgaacttttcaatcccactcatttttctcaacagcttctacatgggctcattctgtttttctttcacactctatcagtctcatattagtccagactcatattagtccatctgatctaagattaattaccttggcctcagagctctgtgaatctcttgacagttatacagagagaccaataattagaggctcccactacatcctgccttctgctcacctcctgctacactgagaaagggtctaccagaactaagatgctccaggaaaagcactagatttggagtcctaacacctggattcagtctctgccctgattaggcctgttccactgggcatatagtactttaaaatcaagtcccaagggcagaacttcaacaaaactagcttctaagaatacttagaaagttaccatccttaaccaaggtgaagtaatctcagttttacttttcacatcctccaggaaaattccaagctaagattatgtctactttgtattcaattccacctattaagattatggacattttatttgtatcaaaagtctagtcacacttaaatatcttatgttgtatttcaaagcaactgaaaagtatatgattctatcacaccaaaaggaatcatgaaaatgatgaatcaaaacagtacctcaatatttttactggccacattcttcacaacagcaggaaatagctcagatgcatttttcccttttgccatcatctgaggaataaaggtagaatataagagctcaaactgtgaaaaaattagtcatttgaaaacaaaacataaattctacattcgtataatatttagaagataagctacagaaacaaataagctatagaattaacaagcttaactctttttgagtcagcttggcccaactatctgcagcaaagaacaatctcttgtgaatcaatataaatacacaaatacatagacatattagggaagaaacacagtaatttaagacatgcaatatttataatagatttctatggctaatggcattataaacgttttcaaatatttgtactctatttaacaagttcttacattaaagatataatacatttgcaatggggtgggggtagagaataaatgttattctaaacaaactacagttattctttctccctttttttttaatagattcccctacttctccaaccattttcttcaaagctcccttcatgaggtcctcttcctttcctcactaaagttaggtgtaccatcatattttctaagagaaaaaaacaaggttcaattcaccctcctgtgttaacttctaattttttagaaagatctttgctatataccatatctaagaaattatcttaaaaagatgtaaggtgcttagttttataaatttacaaaaatgttttataaatcctatgtgacattttaaacaataatctcagttaataatctctcagaagattttctacatgacagctttagaaaactctaatataagctaatcttcattttctatttctttacctgtgatattttttgttttgtgaaaccttctgaggattaaagaaggttcataaagtggtgcagttaaagtatttctatgtgatttttacaattttctcatctgtaaaatgaggagagagggattcatgttctctagggtcccctctttcagtcattcaataattacctaagtcagataccctgtgctctgataccctattccaaggcttccccaactttagtctacagaatgctattcaaaaagatgttactacatgaaggagaaaaaaaatcctagagtcaaattcattcaacaaatattcactaagaggacactgcatgtcaggaactcttctaggccttggggataaaaccgtgaacaatacaaagtctttaccccttggattgttcatgcgtgctcagctgtgtctgtctctatgcgaccccatggactgtagtctgccaggctgctctgttcatgggattttgcaggcaggaatactagagtgggtagccatttgctcttccaggggatctccctgatccagggatcgaacccgcacctcctgcatggcaggcggattctttacctctcagtcaccagggaagcccctcacccacctgagcttacttctaatgggggcgagggacagcaaacaatgtgaggataagcagtgctatggagaaaggtaaaccgctgcaggagaaacgcgaagtgctaggcttaggggtgggagttgttcttttacgttttggttagtttttgcgtggtatatatttttccttctttatattctttatctttacattaaaagtggatttttcctagagaacatatagttgcatcttgacattttcatccaatatgacggtctcttttagttggtgacatcagatcagtactgatgccgttagattcagctcggtcactttatttatcagtttccttaattccctgtggtttttttgttctgactgccattacgctcatgatttagaaattttagtattcaataacttaacttatatttttatttttatattgactattcggctataactttttgtgtaatttttattggttcttctagaaattatgagataattacaaagatgcacagtttacagatacatagataagtaagtcaagatatgccaaaccttctacagtcatctgagagtttatattttacaagttattaggttatatgagttctttatatattctgcaaagtctacatcagatatgattaaaaatactttctctatgtggctgatagtgtcatttgatgcacgaagttttacattttgatacagtctaaactatcaattttttcttttttttcctcaccttttgatgtcatatccaagaatcctctgacaaatctcatatcataccctgtgttttagctcttacattgaggtctttgactcattttttaacttattctatatatggtattaagtaggggggtctaaattcattctcttacatgtgggttttcagtttccaaacactatttggggaaatgctacccccactgaatggtcttgcacccttgttgaaaataatgtggccacaaacatgaagtttttattttaaggcactctctctatgtgtgtgtatatatataaataaacatacacacatttatatatgtatctgcctttaagctggtaccacacatttttaaaaatttaaaaatatattttatttaaccttatatatccaaaatattagaatttctttaaaaatgtttcagtgacttctagctcccatggtttttgatgagatatatggagttgttcaaattgctgttcccttgtatgcaatgtatttttttttccaagtactttctaaattttttccagtttaactgctatacatttatgaatggttttcattcagttttatcctgatttatacagtatgttacagttcacaaaagacagcacttatttttgttttgtttttacttcttacattttctttactacattttaactaaaaaggataataacacaatcaaaacatcatttaaaagcctctcagactctatggcaggcagcttcagacacagtttccagtcatccctacccacagtatacacactctcattaactactcttattgaatatgggctagacctagtgactttttaaaaaaaactttttattttatattggagtatagctgattaacaatgttgtgataatttcaggtggacagcaaacggactcagctatatatatatacattctcttccaaacgcccctcccatccagactgccatataacactgagcagagttccctgctatacagtaggaccttgttggttatttattttaaatacagcagtgtcagtaccacacattttgattactgtagctctgtagttaagttctgaaatcagaaagtgtgagacttctaaactttgttcttctttttcaagactgtttcggccaaggacttccctggtggtctagtagttaagaatccgctgtgcagtgaaggggacatgagtttgtccctggccagggaattaagatcccacatactgaggagcaactaaactgcaaaccacaaaggagattccatgtgtcacaatggaagatcccacatgacgcaactaagacccaatgcagtcaaataaataaatgtgtgtgtgtgtatgcgcacatgcatgcatgtgtgtgtacacagacttttttatttttatttttttcaaaaaaatccctgggattttgatatgaactgcactgagtatgtagataactttgggaatattggtatttcaataagtattccaatatatgaacatgggatatttttccatttatctgtgtcttaatttcttttagcaacattttagttttcaaggtacaaatattttgtttccttgggtaagtctattcctaagtattttattcattttgatactaccataaataagactgccttcataatttctttttaggactggtgattgttactgtatggaaacacaactaatttttatgtgttaattttctatcctgcaactttgttgaatttgcttattagttctaaaagatattttgtggcatctttaggttttctaaatataaaatcatgttgtctatgaacaaagataattttgcttcttttccaatttgggtatcttttatttctttttcatgactaattgtcatggctaaaacttccatttactatgttgaacagaagtggggaaagtaggcagcctcattttattcctcatcttagagggaaaggtttcagtcttttaccactgagtatgaagttagctgtgattttttctttaaaacaccgaggtagtttttttaattcctagtttgttgagtgatttatcatcaaagggtactgaattctatcaaatgctttttctgtatcaattaaaaatcttattttttcccctttgttctgttaaagtccaactgaataccacgtaacatgtatggctaagaaatagtttatatcaataactctaattagaaatttcaagaattttatccatcaaaagaaggttcagatttgctcattatcccaaaaggacatgcaaactaatctgagaaagacctttaacatccaacagttactaaagaaaatacatcaaagattgcgatacactgcaatattccattccttcaaggacctggaataatcaactcatcagtactttatctaaaaaacttattacaagttcactacatgaagcaatacatttcaaattcttagttcacatttcaccaaaccaagataaaatatgaatatgtgctttaaacattagacatacatttttcaaaaatatcaagaaaaataacaaatgtatgtttcaactagagtcctgcagtgtaataagcgaccacaagattttgaagtaggtagcttttcttccctaagcatgctttggcatacatgagactttattcaacatatgaaccattggaaacatttccccatgattctaaataagcctcaggtattaccaaagaaagataataaaatgaactgagactgtcattatggtttctcgctggtagatactactcatgagattctctgttgaactgcagggctaccaactgaaagacagtcagatgtgcactgccagcattttgatatatactagaaagtaatgtaaaacaaaaacataacatttaaaattttggcaaattaaaatttagaaatgtctaaaggtttttaactataaagctaaggtcttaaaactaccctgtatacaattatatgaggtgataaaaccccatattcagggctcatataatccaaattatgtagagaaatgtaaatattgaaaattacatttaaaaaaataaagaaaatttgactaatataatactctactaattggcctctagcaaactacttccacccaacagatgttttcaaatgatgcataaatgtgcatacatgcacataacatttcaaaatgattttgaaagcttccacaaagaaacagggtgctaactagaaatcacactaaaaactggacaaaagtaaaggtaaacaaatgattgttataacacacagtggaaaaaatttcaagaaaaacaattactagttatataataaaagaaaaaattagcaaccaataattgcgagtttaagagtgaaatacaaggggaaatatctggcagagctactgtgctgcggctttgattttctattttcttctccaaaagttaagttagaaaagatctgtggtgatgaacaatttctcctgaaaagaagctaggggaattaattttggaagcacttcttgaatcagaccaacccatgcccttactgtatttttaattttagtttgatattaaaacaaaattaaaagatgtctttccccatagaactttaatatgtcaaaagccatactgcccaaacgtgtttcttaaactagtacacaccaccactactactactattactactaccactagtgttttaaatccggacatggcgtttctactgtgaacatataagaataattaatattctttttaaaggctttttttcttttaaccaaacactcaggaaacattttaatttcatggctaaagaaaagtaataggtaatacctgtcattttattttttctaattactaagaagagataacttattttatttgtttagtcattcagttgtgtctgactctttgtaaccccacggactataactcgccaggctcctgtgtccatggaattctccaggcaagaatactggagtgggtagcctttcccttttccaggggatcttcctgacccagggatcgaactaggtctcccacatggcagtcatattgttaaccctctgagccacaaaggaagtccttttatttgttgtagtaaattcctaaatgaaaactggggcaaatagtatcatatctggccagctgcaacctactgccttgaccttcattcctagggtttctatgttgctatgactcttgattaagtgaccttgggttcactttataattttcctagtcatcagcaaattcacttgtatgacattactgccaaatgagaatagttattttactgtaaatgaatacggatcatcaaaaaagcgaaagctccagaaaaacatctacttctgctttattgactatgccaagcctttgactgtgtggatcacaacaaactgttttaaattcttcaagagatgggaataccagaccacctgatctgccttctcataaatctgtatgcaggtccagaaacaacagttagaactggacatggaacaacagactggttccaaatcaggaaaggagtacgttaaggctgtacactgtcaccttgcttacttaacttatatgcagagtacatcatgagaaacgcttggctggatgaagcacttggaatcaagactgccaggagaaatatcaataacttcagatatgcagagagttccagaaaaaaactacttctgctttatatctacttctgacaccacacttatggcagaaagcaaagaagaactaaagagcctcttgatgaaagtgaaagaggagaataaaaaagttggcttaaaactcaacattcagaaaattaagatcatggcatctggtcccatcacttcatggcaaataaatatggaaacagtgacagatttggggggctcgaaaatcactgcagatggtgactgcagccatgaaattaaaagacacttgttccttggaagagaagttatcaccaacctagacagtatattaaaaagcagagacattactttgccaacataggtccatctagttaaagctttggtttttccagtagtcatgaatggatgtgagagttggaccataagaaagctgagcaccaaagaattgatgcttttgaatggtggtgttggagaagactcttgagagtcccttggactgcaaggagatccaaccattccaccctaaaggagatcagtcctgggtgttctttggaaggactgatgctgaagctgaaactctagcacttcggccacctaatgcgaagagttgactcattggaaaagactctgatgctgggagggattgggggcaggaggagaaggggacgaccgaggatgagatggctggatggcatcactgacttgatggtcatgagtttagtgaactccgggagttggtgatggacagggaggcctggcgtgctgcgattcatggggtcgcaaagagtcagacacgactgagcgactgaactgaactgaagcttttttttggtagaaactgacaacctttcaaaatttacatggaaatgcaaaggatatagcataaacaaagttttttttttttttttttttttttaaggaagacttacagtactttattttaaagctacagaaatcaagggtgaggtactggtaaactgagggccacaaagacccatgaaccagaagagttcagaagtgggtccacaaatacacagtaaactgagtgtcatttgaggttgaaatctggttgggaaaggtagttttttaataacaaacattgaaatatttaataaaaatagaggcaaattagatacacatgtgtttaaaaacattcatctcttaatctcacatcatacataagaaataatgcaaactagatcttagactcacataaaggctaaaactgagaggggagatctttgcaataatggagcagaccaagatggcttaaacaataactcatgctctgaatctacaacttcacttaagtacatacatatatatctacttgaattccacaagagttaaatattacaaatatttccattaaaatcagaaacaacacagtgttgtcttctatcatgcctactactcaacatcatagtgtaacttaatccctgcaaagagagaagaaaaacgagtaagagctaaaatatttgaaaataaaatataaatctgtcatgacttaaggataacacaattaactatccaaaaatctagcaaagaaaccaaaaaactatcagatttaagaagagttcgctgagaaggtcaaatacaagaacagaaaagtcatttgttctcctatacactagtaataattaattttgaaaatataacgaaagagaccattcataatggcaaaagaaactgaaaagtacacaggaatgtatctagcaacaatgttcaagatttcttatgattaaaaactataaaatatgaatatactgctactgaaagacaggaaaagagtggagatggaaatacacaaattccgtattaccctaatcaaaatccaaaaataatttttaacagaacttgacaatttaatcctaaagtatacctggaagctgaaatttttactttttatatctcaatatgatttgaaaatttacaaatacatatttgtgtcacttgtctaataatttttttcccgatctacggagatataattgacatagaatactatgtaaattaaaggtgccaacaggtacatgaaaaagatgttgttcaacatcagtcagtatcaaggaaatgtacatcaaatctacaatgaggttatcacctcaaacctcttagaactgctatgaacaaaaagacaagacataacaggtgtttgtgaggatgtagacaaagggaaacactgtgcactgttgttaatgtgagatatacttacatctttcttatacacacacacacatacatacatatgtgtctgtgctgtttataaaatgggatattattcagccatgagaaaggaagaaattctgacatttgtaacaatatggataaatcctgaggacattatacaatgggaaggaataatttttaattaagaatcattttcctacagtttaatgatcaagttccaagtttacatttatacaaacttcctaatggaaagtctgtaactaccagactaactcctaccatagctatatttacacttctttatgatgtctatttacatgtaaattacatttataacattcaagtagtctagactgtgagaatatccattttatttctttatcagtttgaaagaggaatatagaaaaaactaccaaatatctcattttcatatttaggaatttcaatagcatcctcagacttagtgaaataatttaccttagtgggatgtaaaaccaaaattcagtgaaataattaagagtactgcctgctttatatggcattgcaagactgtatcctgcaggtctgcaagctgaaagcagtgtaaagcaatctgacaactggatctgtaacttacaagaattttataaaaaacatttaatactctattactgtcagaaatatataggcaggaaaatgaaacatgataaaattaacatttatttagtatcagttcagttcatttcagtcactcagtcatgtctgactctttgtaaccccatgaatcacagcacgccaagcctccctgtccatcaccaactcccggagttcactcagactcgcgtccatgagtccgtgatgccatccagctatttcatcctctatcatccccttctcctcctgcccccaatccctcccagcatcagagtcttttccaatgagtcaactcttcgcatgaggtggccaaagtactggagtttcagcttcagcatcattccttccaaagaaatcccagggctgatctccttcagaatggactgcttggatctccttgcagtccaagggaccctcaagagtcttctccagcaccacagttcaaaagcatcaattcttcggtgctcagctttcttcacagtccaactctcacatccatacatgactactggaaaaaccatagctttgactagacggaccttagtcggcaaactaatatctctgcgtttgaatatgctatctaagttggtcataacttttcttccaaggagtaagcgtcttttaatttcatggctgcagtcaccatctgcagtgattttggagcccaaaaaaaatatagtctgacactgtttccactgtttccccatctatttcccatgaagtgatgggaccggataccttataacattagaatcattgagaattaactgatcaggagtagtttgaatggacctgccttattctcatcatttgaagtatcaagcaagcatctttagggcttcccacgtagcgctagtggtaaagaatgcgccctccaatgaaagagacataagagccttggattcagttcctgggtggggaaaatcccctggaggagggtatggcaacccactccagtattcttgcctggagaatgccatggtcagaggagcctggtgggctaaagtccatgcggtcacaaagagttggacacagctgaagcgactgagcatgcatgcatgcatggaagcatcttgtatattccttgataaatcaattctaagtctggatcagcttccaagattgtgtcctttgtacttctaatgttgtgaattatctcctagagttcctctaatatgaagcttttggcagcatcacttcctcggggcatatcttcagccttttcatcacaaccattttcctcatttatgctgaaaagcctgccttactgaggtgcctctagctacatgtttgtgcgtgctcagtcgtgtctgactctctgcaatcccatggactctaacagcccgccaggctcctctgtccgtgggatttcccaggcaggatttagagtctctccaaaagtggcagcatcagcatttgcacagtcagcaatttctccacaactccagttacattctacctgaatttcatttctagtgtcatcacttttcatttccttcctgcatttttatctttgttgatcaaatcctgtttttcataatccattttggtaaaatgtcaagtgggcttctccctggtaaataaggagggaccaatactgcatgccttgcagtctgtacacaagctgagcaacacacacagtgaccaactgctaaaaataactctgaaagaagtgacatgacccacgcatatttgttatatatatatagtgagttgaggactgaagttagtgatgaaacttgtacagtatgcaattactaagtcaatataccatgataactgaaatataaacctattgtgaggagactggtgttatttaactaagctgtggtgactgaaattcaaataccaaagccatgtaaagcaaagaactacctctccatgaatgctattattacacggtataacactgcgtgtgtgctcactcattcagtcgtgtccagctatttgtggccccacagactgaagtctgccaagttcctctgtccatgggatttttcaggaaagaatactggagtgggttcccattaccaacttcaggggatcttcctgacccagggaccaaacctgtgtctcctgtgtcttctgcattgcagatggattctttatctgcagagccactagggaagccttggtttaacatgaacaaatgaaaaatttaccaaaaactcttcatcatttgccttcattaccaaatgacataaatctaaataaaagaatctagcaagttctacaggtataattagtacttgacttttacatattgtgttttcacaacaacaaacttttaaacaccgtaaattcatatctataatcatccttcataaatgggatttggattttagaatacagatttcagactctcatattgtggcactgtctgccggaaaacagtactgtttcagctgtgtttacatccttctacagtcgagtttatttgtgcaattacatgaatttactaaattttgacctgatacaaaaagttctggaaaacaaaatcagcaattgtggaaaaaagcaaagtactagtaagaaagacaaagtctgacaaatttaattccactgagacaagcagactctttagcagatagtcactgaattaagccagtttttttcactgtcaatataaacaatcaaaaaaagagcaagacccacacaaattgcaaaaatatttttaagcttattatataatcagaaattgcattatatttttaattctgacagtagaaccccttacataataatatattagactactatctgaattttgcattacaaaagaaaagtagagaatgtttttacatctattaatattcattagaagttctatgctgataaactgaataaaccatttatatcggtagtaaagaaatttgaagatcagaagaaaggatgctcacaatttttaggtcatagaatgaccaaaaaaatatcctttagctcattagcatccctctctgtaggaagtcaaaatgttgtagtatataatcttactttctcttcaaactgattagcactctctatttgataaaagaaatatttgagaaacagaaaagacagaattagaactcaagtttctgaattttgtcacttcattacttcttccaaaatattttagacaggaaattttaagttaataataaagggtagatgggaatgcttgatttggtatttaacatattctataacatatatttttagcataccactacttgtcatttattcaaaagtcaaaatgatctaattactttacctaccccaacaatccgtttcatagcatccaatttagcagaatctttgttgctctctaacatttgctttagatcttcatttctacacacaaaaaagaaaaatttcatattcagattttatataacacaggcattaaaacatgtaattttaataacatgatgtacattattaccaaattattttcttatttataattaaatacatgtttctcatctaaccctacaaaataatatcaaagtggttaaatggaatagaacactaccctaacaaagacatctacaagttaagtacaaataaaagtaggaaaatcagaacaagacttatgaagtacgtcaatgtcaacatcttggctgtgatattgtactatagtttatcattgaaggaaactgggtaaagggcacacagaatctctctgtattactttttatacctgaatatgaatatacaattatttcaaaatcaaaagtttaactataaaaaaagttatataacaattaccactcatttataagatgacacaccaatttttttttaatggtcaaaaaacccgaaaaggcatttcacacacacacaaatagattaggaatactggtaaatatttaaggtcattaactatcaaaaacgcaaacttaatgagaaaccattacacatccatgagaatagatgaaactaagacaatgacaataacaaatgttgccaaggctatggagcaactagaactctcacacactgctgggaggaatgtaagagagtacaatcactttggaaaattgggagttccttccaaatttaaacataaacctactatgtgatccagtcattccactttcagagacagaaaaacaattctactgaataacttaaagaatagtcatagcagctttatccatagcaaaaaatcagaaacaatctaaatgtccatcagcaaaatgggatttagccatacactgggatattactcacaaaggaaaaagaaccaaccactgatacatacaataatatggatgaagtctcaaaattattatgcgactgaaagacaccagacacaaaagaccataactgaattaatttaaagttctagaaaatgcaatctgtagggacagaaccaaggtagtggattcctaagtagaaggagaaatggacaaagggacattagaaatttcttccataagaagatggaaatgttgtgtatcttcttaattgtggtagcgatttcacaggtatatacatctgtcaaaaactcatctaattataatctaaaattgggtaatttggtgtatgagaactatacctccattaaaatgatattaaaaagtttttgtagtgttttattcacatttgtgaataagatataaatactccaaaagattaaaagacgtttatccgtttctgagaaatacattattaaggatctgataagccatccttatacatactctgaaattaagaatatcacacttaagtctcaagcttactcaagaatttaaatcactgaaccttattttaggacagcactgaaaaatcatcttaaatgactatacagattgtatacaaactattaatacaaagtattacaaactataactaatcactttgtactcgttatcagtttatgattagcaatttttaatagtttctacaacaaactctccagaaaagagattttaaaaatttactccatacagcttcatgcaatatggttcaaggtgctcacatgcatgggtggacccaaacaaagtatcagaagctctctgatctcagcttaagcttaaaagtaggtgagaagagcttccttaactactctaaatagacagccttgacaaaagtactttgcatttacaaatttaggcctaatacaggcagtaagcacataccaagaataaatgaatgatcatgcgttattatgaggtgagttgtgttccttccaaagttcctatgttaaaatcctaaccctcaataccgcagaatatgaatgtatttgaagaatcattgaagaggttaattaaattaaaataggtcaccatgggtgggccctcatccaatataagtgattctttataagaagagcaggttaggactgattcaaaagaccaaaagatggccatgtgagggcacagcaagtaggtggccttcgcaagccagggagagaggcttccgcggaaaccaaatctgccaaaactctgatctgcaatttctagcctccaggatccggggaaagaaatgtgtgattaggccactgcatctggagtattttgttacggtagtcctagcaaactaatattggagttaaatgttacaaactgtcattgcaggaaaaataaataaaggcaatgagatttattatgaaaaagttactcttcctttccaagcagctcataaaattaaatacaacggtgaccactagcaagacacaataaataatcacaataatgacttttgtctaattaaaaatatagctaatttaaaaaaatagtaagaaagcaacatataagaactacatctgaggatatataacaaccaaatatacaatactccaattggtcactgcaatgaattcagaattccttcttaaaattccctgttctttcacactgcactgttaactgaaaaggaacaaaaattccttttgttgaaattttttgtggcaggacccacaaatcaggtttttcccccttctactttttgctattttcctgttttacttactgaccatgtaggctataaaaaaaaaaaaaaaaaaaaaaaaaaacactaaaagaaaccttttaaaactttttggaaataagaacttgaaaaaaggtaaagtaattagataagtaaacagaaagaaagtgtgaccacacacgtacatgtcaaaaaaaaaaaattcattttctcatgtctgatcccttttttccccaagagtattctaccaatcttctctacaagtgttatctggagagaaaaatgagcaatgaagaataatgaagtgtccattttcaggacattccaacctccaactccaggtgtaatcttattcatggcctaatgaaaacttggtttgttccttatgcttacagttcccttcccaaacacctttatgtcctgatccactctcttaaactaaaaataaaaaaacaggaactcaatattaaagtcaaaggttttgctcttcatgcctaacagaaaagatggtcttcaataacaaatataactatcttcagtgttaacatgggtagaaagctaataactttgaggttcagagaaaagaaacaagaaaactcctaggcaccgccttcaacctgatgtaatattcaacttctcagatatgtcataaagtcctattgaaaattctgatataaattgcatactctacccaaattcctctttgcttgtcattaaaacagtaaagatatgggaaagttaataccaaaacacctcatttactctcaaaatatgttcacttgtattgagccattttaggtcacctccttcattatatagattcaaatatggtcgattaacatgtatcactatattaaccttaagaatttagttttataattttgaaaaatctaaataaggaacaaaaagaaattctttgtgggaaacatcaagagttaatccaaaacaatgctgaattagtaacatttttcattgattctaccaaaaaccaatccaaatacctagttcttcatttatctacttacctgtagcttttcagcttttgagtattaaaatacaactttatttttacataagtgacatcttgtggtgttaagtggtataacttttcatgttcaaaatatgcttgtttttatagtttcaaggaccgaagaaaaataagtaactggaaagttaaagaaaatcttactgttaccaagaagtcacttttacttcagcactgtgtaaagcagcaactattcaaaaagcaaaattttaacagttaccctttcagaacttaagtagtaaagcttttacagtgtgtaaattacctctttttaaaaaacccccaatccataactcattaaaacctcctactcctttgaaagactgtgtagattaaggagaaactaacactgcagcactgtacactgtctcggcgcttctcctgatccgatcggagaaggaccggccggagagccattactagcgcacaaattcttgccactaatccataggagacagaaacagaagctgagagactatacttagggcacttcaacagtgtagtgttatatttttgaatgtaaaagctagggctagcattttgcatgctttttccagcaattcattttttattgtattttacagaagtatctatccataatggactggaaatttaaaaggaaaaaaaaaagggcccttcaccagtttgagagcactgtgctacataattacttccttttctcttgaaagaatcacaaaaacttgggtactatagaaagtaacacttgaattttaaatccaggtatgacggattgggaaaagtgatgaacagtgatttccagtcagcagtaaagtacatcctcaaaaggatgcatcaaaaatctttgagaggggaggactgaaactttctcagctcagtccagtcactcagtcgtgtttgactctttgcaaccccatgaaccgcagcacgccaggcctcctgtccatcacccacacccagagtctacccaaacccatgtccattgagtcggtgatgccatccaaccaccttatcctcagttgtccccttctcctgccctcaatctttcccagcatcagggtcttttcaaatgagtcagctcttcgcatcaggtggccaaagtactggagttttagcttcaacatcagtccttccaatgaacacccaggactgacttcctttaagatggactggttggatctccttgcagtccaagggactctcaagagtcttctccaacaccacagttcaaaagcatcaattcttctgtgctcagatttctttatagtccaactctcacatccctacatgactactggaaaaaccatagccttgactagacagacctttattgacaaagtaatgtctctgctttaaatatgctatctaggttggtcataactttccttccaaggagtaagcgtcttttaatttcatggctgcaatcaccatctgcagtgattttggagcccagaaaaataaagtcagccactgtttccactgtttccccatctatttcccatgaagtgatgggaccggatgccatgatcttagttttctgaatgttgagctttaagccaactttttcactcttctctttcactttcctcaagaggctctttagttcttcttcactttctgccataagggtggtgtcatccgcatatctgaggttactgatatttctcctggcaaccctgattcttggtggcggccgagaggagctacctgcgcccaaggtcggggcagtggctgggaggagctaccccacgtctgaggtaaggagcggcggctgcaccttgctggagcagtcgtcaagggagaccccacgtccaaggtaagagaaacccaagtaagaggtaggcactgagagagggcatcagagggcagacagactgaaaccacaagcacgacaacaggtcaatctgatcacacggaccacagccctgtctaactcaatgaaactaaggcatgacatgtggggccacccaagacgggtgggtcatggtggagaggtctgacagaatgtggtccactggagaaaagaatggcaaatcacttcagcatgcttgccttgagaatcccatgaacagtatgaaactttctcaagccccatcaaaaaattctaacccatgggcacctcttcatactttgacaactactcaagtgaaagatgcttcaactccaaaaggtcccctgtatacacgaatgctgctgctcagtcgctcaagtgtgtccaactgtttgtgaccccatggactgcagccaccaggctcctctgtccatggggctctccaggcaagaacaccggagtaggctgccaatcccttctccagtgtacatgaacaggtatgtagaataggtatgtaggaaaaaaaaggctgggaacaagagtcaaaatttactttttttctagcactgtgcagctaaaggtactgcacttcataattagtttccgtgcacaaggtgaaacctcagtaactctccctcggatgacactcaaaactttatgtagttttgggcacaaagtattaattaataaacacaaaagtgagtaaaatcagagaattccaactaccgaataatccatttattaactctctaaagggagaaaccataaattatccaagtaaatatgaactttttctactatactctccacgaaactaaaaaagaatagtctacaattgctatcacaacatcctcagtccttggtaatcttcgttttctctctgctcttctattaaaagttctttcagaaaagtaagaaataacctccttctttaaaaatccaatgcagaaatctcatgaatacttttagattatttgatatttgatataactgactcctcttctatttctaaattccttcttcccttagattctgtaattctccattctcatctggttctaatttgcatttgtgacataccaataaataaaaatgatgaaaatccctgcccttgtagagttttcattttaataagtaaaagagacaacaatcaaacataataaaagaataaattttaaaatcatgagatgatatgagggaaaaacagagcaaagggagagagaatgcagaagggaaaggaagaggccattttaaatagggtggtcagaataggctaacgaaagaaatatctgaacaaacatttgccaagtgagggagtcagtcgtactgatactggaggggagggacagagggaaagagcactccaggcagagcctgtaagcagagcagatgaaggaaggtaaagaatgctaaggtgctcaccctgaatgaagttgggaaccataggagggtgatgaatagagaagtcatagtctagtacacaaacagaatcactctggccgttatgtttggaagacactgtaggtacttccaaatctgcccacgctgctcttatttgtaagacactaaccctgccgcagaaaatgactacaaaaaccggaaaaaacaaataaggcaactttctaaagtcatccaggcagaacttaaggggccaagatcatggaaggaatggaagcacataaagtgggcttttcattcacatcagcttttttcccgactgcatttctcaaattgatatctgggagaatagaatccaaggataaaaatgacagttttaaaagactaaagagacaaacgttactgtttgtggctaccaaaggaactggaacttgaagggtgaaactacagaggagggaaccagtgaaaaggtacacaaaaatctgtgtacaaactcccttcaacagtcggctatgttttcacagagttaagaatgcgggaaatccaggagaaaagaacagtgctgggaggttaaatattaatgcctcatcagagttcagcaggcacgcacggcagggaagagaagctggaaaccgggtctcctaaggagatgtggtggtctggttcctcagtcgtgtctacctgtcctgtgatcccatgaactgtatgcccgccaggctcctctgtccatgggatttcccaggcaaaaatactggaatggggtgccatttccttctccagggagatgttggtaaataccctggcctttcagttaagaccacaggaggggcacaattgaaaagtaaggatacttcttagaagtataagaaaatgttgatgtatggcaaaaccaatacagtattgtaaagtaaaataaagtaaaaaaaaaaaagaatcacaaaatttaaaaagaaagaaaaactgaaatagacaaaacctttaaaagcctaaactgaacttaaacaagaccaaagtgctctgctagcactgtactgtcaggaagaaaaaaaacaaaacacataatcctctttggaagacatcattcagagactcatctatgttcctgattacctagcatctgatcaaaacttgagacacactaaaaacaggaacaaatgacaggaaagagagagggagggtagaaggaaagagggagggagagaaaggagagaaaagacaaaaaggaattgaaacagatccagggtaactcacaaactagttactaaacagggacttttaaaccactacagttaatatagcagaaaaaaacaggaaaagatggacaaaagagacaaaataatagagaatgtcaataaagtagtaaaatctatataaaataatcaaatgaacattcagaaattaaaagtataatttatgaaatgaagaactcactatataggtttaagagcagactgaaaatagcagaagataataggactattgaaagtaaaggcaggtcaagagaaaatacacaatctgaagcaccaagaaatacaagaatggaaaacactgaatggcacatcagagacatgtataacataatcagaatatctaacatacctaaaaagagggaggagagacaagtgaagtgaaatgaaagtcgctcagttgtgtccaactccttgtgaccccatggactatacagtccgtggaattctccaggccagaatactggagtgggtagcctttcccttctccaagggctctccttaacccagggattgaacccaggtctcttgcattgcaggcggattttttaccagctgagccacaaggaaagctcaagaacactaaagtgggtagcctatcccttctccagcagatcttccagacccagattctttaccaactgagctatcagggaaacccccaaaagaacgggacaaaagcaatatttcaaaagctaatggctaagaatttttctaaactggtgaaggacataaacttactatatattttaaaatcttaaaaaaaaggaaaaacataaagccatacacacggagacagacagacagacagacagacagacagacacatggtctagaatagtcaaacagctgaaaatcaaaagataatgagaaaaatctttaatggatgcaaaaaaaaaaaaaaaaagacatttccttaaggaaagggtcaacaaaactttgcaataaagggccaaatattttaggcattacatgccataccatctctcatgactgtaaagtaaaatcagttaaaacaatacataaataaatgggctggctgtgttctaataaaactttatacatatgaggatttccaggtggcacagtggtaaagaatccacctgccattgcaggagacccaagagacacgggtttgatccctgggttgggaagatctcctgaagcaggaaatggcaacctactcctgtattctcatctggaaaattccacagacagagaagcctggcaggctccactccatatgttcacatagaatcagatactactaagcgactcagcaagcatgcacaaatgcacaggccatagtttatcaatccttgttttaaaaggatcaacaataatactgagagccacttttcaaaagaatctacagacatcagaagacaatcaaatgacatctttaaaaagctgaaagaaataaggccaacaaacaattctatacccactgaaagaaaatatgcctcaaagctgaaggtgaaaaaaagtaattttcagaccaataactgctgaggatctgctgccaggatataaaaggatatcatttcaaaaggaagacaactctaaatttacatgggatttattctaaatttatacctttcatctgtaaaggaaaacttccatctataaagcagaactaatagaagacagacatacatccacaagcataactggcacttttaacacacctctctgagaacaagtagattaaaaaattcaataaagatgtagaaaatatgaacacaaataaccagcttaacctgacatgcatagaacagtatatccaacaactgcagaataaacattcttttcaagtgcacatagaacactacttatcaaaataaaattatatgctggataagatctttacaaatttcaaagatctaaaatcatttagggtacatggaatctaactaaaaatccataaaagaaaaaaaagctagaaaatgctcagatgtttggaaagataagcaacacactttaaataacctatgggtcaaagaaaaaatcatcagggatattagaaaatattttgaactgaccaacaaaattgcaacatctcacaacgcatgatatacaacaaaagcagcacttagaagtaaatttgtatttctaattggaaggactgatgcagaagctgaaactccaatactttggccacctgatccgaagaactgactcactggagaagaccctgatgctgggagggattgggggcaggaggagaaggggatgacagaggatgaaatagctggatggccccaccgactcaatggacatgagtctgggtgaactccggcagttggtgatgggcagggagacctggtgggctgcgcttcatggggtcgcaaagagctggacacgactgagcaaccaaactgaactgaaatgcaatataaaagaagaaagactgaatatcaatattctaggcttctgtttcgggagaaggcaatggcaccccactccagtactcttgcctggaaaaccccatggacagaggagcctggaaggctgcagtccatggggtcgctgggagtaggacacgactgagcgacttcgctttcacttttcacttttatgcactggagaaggaaatggcaacccactccagtgttcttgcctggagaatcccagggatggcggagcctggtgggctgctgtctatggggtcgcacagagtagcagtagcagcagaaggcttccatttcaggaaactagaagaagaacagcaagttaaactcaaagaacaagtaaagaaataaagaataaggggagaattcaagacaatagaaagaaactacaacagacaaaaatcaacaaaactaaagatctctttcacacaggttgttaagaaacttaatgcgatcactgtacagcacttaccaccgggcctagcacattcatttattcggaatgtactaggttccaggaactgttctgagtactgggacttacattctaagtgagaatgcaggggagcggggtaggggtgagggccaatgacagaaatgacagaagggggggggaggagagagggaaagggaagggaaacaaatacaaacagaataagtactattcaaataattaaagcagggtaataaaattaaagtaagactgggcaatcacaaaagatctctataggtagaagtgatcaatcaagctgagatctcaaaagacaaggagccaaccacaggaattttgcaaagatacatggaataaacacagataataaagaccaaaagaaggtctacaaagggtctataaatgtacacaatggttgttttctcaactacactaaacacacaataaatattagctgaaagaataaatgaacataagctgtatgctaactgtgctccttagaggaatacaagaaaattcttttaaggtttcactggattctcaaaatagtccacgacccgaataaaagttaaaaactaagcatacatcttccatgtatacattccacatgtgcatgttttaaaaatcatgatgtcatatatacatcacagaaagtctccatatttgccaaaccctttaccaaagtcctcagctactattccgttggccggcagcaggaagtagattttacttttgctcaggatataaggaatactttctagaatgtgacgactcatccttaaagttttaaaggaaatatcacagagtcattcagctacttaggaacaagctaaaattcttttttctatttaacagctccataaaccaaagttgccaccttcaataaaagattaaaaagggtcatggagtctcaaaagtcatttagatttgatgaatataaacacagaaagtttaaaaatttttgcactaagagtaagtgaatttggaatttaactcatgagagagctaatttccttagaatacaaaagacccttaactaatcaagagtcgatccaacagggaaatggacaaaggacatataaggtatttcactgggaaaataaaaccaacaaatatgagggagaagatgtaatgcactagcaattataaagattcggtataaaaacattttaaaatgttattatatattatcatttggtaatattatacgtatatatgatcatctggcttacacattttttttcctagaaggatacacaagaactttttcattgtgattacctcagcggggtacaggggaagtgatacattttctctattactaacatgccttacattgataacatataattaacttatttagtcatctgaaagtggtattgttttctagaacgtaaaggattatttatttatttatttattttagtatcacagagtctctaggaagcatgtggagttattcactatttaattaataaggaaactgaagctcagagaatataaggataacatgcaagtaaaaaattacatgtaagaaattctaaacataattttcaagtataccaccacagaattagggaacagcaaagaattaaacttgagtcttgttctgaaatccaacattctccccatttactaagaaaacatttcaagaattacagaataagtataaaatccataaccaatggtaccacaatacttccctaatttttataattgaccacaagaaaactggtgcatttttttacattttaaattcaaaattttgtgaaaagaaaattgatcactggaaccataataaacactaattctaactattctcagtagtagtctaaagcatctgtgatatacttctgtctaagtcaaaataaattttattttcactgacattactttgactatatttggttaacattatctcatgtagattcatcagctcaaaattaattagtattacagaatagtgtattccatccaaacaattcatctttgttggctcacatgccccaatgatactggcgtgccaccgtaacagtgggcacggtgccacaggagcagatgggcacaaacacagccaggccaacgagtcagtgtgcgcatcaagtatgagtggtattattagatctgcctccaagaacttcataaacgacagtaaaataaatataagttttctactatgctcataagatatgccgactcaaagctagattaatttttaaatccttaaaaagaaaaaaatcaactttccaaggccacagaaggcaagttttccatctgatgagtttggattagccttctgtttagggaattgaggaaaccaatatgcaatctctaccttagataagctttgtccctgaagcacttgaaaatctcagtaaaaaattcagttttgaaaaaatcacttggcactgttctcaaaattaaacggttctgagatctgttgaacaacaatgtgagtatacttaacactaatggattatatacttaaaaattgttaagatggtaaattttatgttatgtatttttaatcacaatttttaaaaaaagtcacacagccctgtcaagtttcctgatgaaggccatgtaggcctagaaacagaaaaaagtcctacaatttcctataacaggaaaaaaaatttgaaaatgcaaatcactgagctttacatgtttaaattctgcattctgttggaaaaaactattgttaattttcaaaaaatttatttccacatgtatttttaaattttttaaatataaaacacgatactgaccaaataatactgaaaatttttataatttgtaccatattaatgaaaagttttaaaatactaaaaatgctacaaaaaagggggagggaatcatttgtaatcactattatccaaaatcatttgttaagtactatataaggtaccaagaaaaatggctgtgtgtgtgtgtgtgtatgtgtgtaaacaaaatctatctctgacttaatttaactacattttctttttaaagaaatgttcaaggatccaatcaccttgggaaatccaatctgttattttgtaactattgatactgtcagacgggcagaaaatttaagaagtctatttttaactttactcactattttttgagaatttttttttttaatgtagaccatttttgaagtttttattgaatttgttacactatgattgctgtcttaggttttggttttttggccacgagccacgtgggagcgtaactccctgaccagggatcacgcttgcacccccagcactggaaggtaaaatcttaaccaccagactgccagggaagtctctgctgctgctgctaagtcgcttcagtcgtgtccgactctgtgcgaccccatagacggcagcccaccaagctcccccgtccctgggattctccaggcaagaacactggagtgggttgccatttccttctccagtgcatgaaagtgaaaagtgaaagtgaagtcgctccgttgcgtccgactcttagcgaccccgtggactgcagcctacctggctcctccgtccatgggattttccaggcaagagtactggagtggggtgccattgccttctccagggaagtctctaatttacttttaactgaccacagcatttgtatcatcttatggctcccaaatctctgtctctagcctaagtcttccctaagcttgactcatgtatccaactgtctatttattatctctactcggatgcctaataggtgtctcacacttaatgtgctcaagctcctgaacatctcccctttttaaaaagttcctctatatagtcttcttcatttcaattgatacccatcccaaacttccagctgtttaggcaaaaagcttgtgtccatccttgatatctttttctctcacacaccatcatccaaaccatcagccaatctcactggatctactttcaaaatatatccagaatccaatcactgctccccactatcaccgatcggaccgaggcatcaccttttcttgcctggattaccatagggtgtccttgctggtccctgcctcagatctgcagtctattcctagttcaggagacaaaacgatatattaaaaacataagttgggtcatctcactcttcagttcaaaaccctccaatggcttccttctcacacagagtaaaatccaagtccttacaaggatgtacaaaaagccctacacaatctggtccttacctctctgatctcatctactacctccccctcttccttcattcactctgtgcagacatactggcctctttgctatgctcccaggtcagaaattcttctgcctcagagcctgagcatacacaattcctctgactgaagacttctttctccccagacatctgcatgtcaacccctcacctacttcaggtattcacaagcatcttttcttcaccctgctatttcaaactcaacccaacctccatcttaattctctatcctttccctgccttatttttctctatacagctccctgttatcaaatgactgaccatatattgacattttattgcttatcttcttcagattggaatatactccatgaaagcaggcattttgcccactgattgattaatccccagcattaagaagagtaccaagcataagaaggcactcatatttgctaaatgtttagttacttctatattatttaggttatagaaagaaacattagaaatgaataaaaaaatggtctcaagtattctacagaccataacctctttgaaaaaagaaatacatctggcacacaataggcacttaataatgactgactgacttctaaatgcccattctgctcaaaaccttccaatggcttctcttcacactcaagagtaaaatccaaagtccttacaaggccctacacaatctggcccccaaccttctactcttccccctacttttccacctccatagtactaaatctccccctcattctttatgactacatccttaacctaggctttaagaaattttaagtaacctattcctagagtaaagctctgccaacccatgatcttgggaccagccttactcataagcctctcgcttattcagctggcatgccacctcactcagctgtcagattaaagacacaggccttctaattaggtcagtccctatcagcaatacaagtaatcggcccatcaataaacagacattgactataaattgtccacttttgtagatctatgaactctttccagctgacatgttaaataagtcttccctaagcacataacccaaagaatgttattcataataatgtgaaactcaggaaaatcatttccttcttgattattctactttgggctcttcactttaaattttgaatttggactgcaggcaatttgtttttgtcggtagctcatttatattcacaattgcaatactgtcaaattatttcactataaaacatgtcattccatgagcatttgtaacttttctgcagtaaaaaaagaacatttcaacccaccatctgtctgatcttttcagttttactcattcaattctagcaatgttacctcaaattctaaatatttttagaaataatatctcacatcctgggatttaatagtaaggcttgatttaaaatattctagatttttctccttagatttcacaaaatcaatgttcttaaaataacatattctatattttcttggttgagtatttaagataaactgtaaaagtcagaactgaatcttctccaagaagaaatgcaagctaagcaaataaaatagaacagttataatctattgcaaagcaggactctgcagtatttcatcactgtttttgttcaatgtggtaaaatcttatttgatttgaagaacatttcaagaattaaattataggaaccctactgcaccactaaaagtgacaatccttaacttgaatagctagccctctgtagaactgacagtcttacttccacgaagacaaaaacaactaattcatctacccagaaatgaactgcagatatcattatatagattcttcttttgttaacagccatcttggaagaaacgacatttacttcataaaagagcaataaaaacactgaaattgggagttgcctagaggcccagtaactgggactcagtgctctcactgtcacggccaggattcaatccctgggcagggaactaatatcccacaagccacacagtgtggccaaaataaaataaacacttaaactgccttatatttcatatgttccttgtaaataaaaacattagggcccaatttacatatacagcatggcaactatgctgttaacatcgctataactagattaagtggccataaattccaacaagctaagcagaattaacaagatgagcagttaccaaaactggagttatcagaactcaaaagaattaaatcttcaaaaattgaagatgacgacaaggacaaaaatatgctacagaaatcattaatggagtatattttcataccagcagcaccgaattcctaaacacaagaaaaaggaattcacaatgaagagcctgtgcctcttcataatatgctaacaactcagagctccagcattttcagcatatcaaactaaaatgtgtttgacatttcaaaattccagcatgtccattttcttcagtaaatcactgtttacaaaaataaaggcttatagacacatgtgtatgtacggctgagtccccttgctgttcacctgaaattatcacaacattgtttgttaatctgctatgaaagtgaaagtgactcagtgtgtccaactctttgtgaattctccaggccagaatattggagtgggaagcctttcccttctccaggggatcttcccaacccagggatcaaacctaatttcccacattgcgggcagagtctttaccagctgagccacaagggaagcccaagaatactggagtgggtagcctatctctgccccagcgggatcttcctgacccaggaattgaactgggatctcctgcattgcaggtaccaatggagctatcagggaaaccctgttaattgactacaccctaattcaaaataaaaagtttaaaaacaaaaaaacctcagtgggccaagttcacattaaaatgcactattcattcagggaaaaaaaaaaaataaaggcttataataagtcatttatcacactgaaaacttgagaattactacacaatttaacactatatatttgtactattcatattagttcacattagccttatctcaccaaatatattcttaaaggtaagctaaaatcttatctgctgaaaacacataagaattaattatacttctggtataaccccacatttgcaaataaaaatgctttttgaagaatggtatagacttcaaaatcttgattataaaattcatttaacacccacctatatgacaattctaagtcaattaatcctgaccacaacaaaacctgaagcaatgacataaagaaaatggctgtttggggccttcacggtaatgcaataatacattaatagggatagcaggttaggtttttccttctgtataagggccacagaatctggtcgtgtttatttttaactacactggctaagtgaagtgaagtcgctcagtcatgtccgactctttgtgaccccatagactgtagcctaccaggctcctcttgtccataggattttccaggcaatagtactggagtgggttgccatttccttctccaggggatcttcccaacccagggattgaacccaggtctcccacattgtatacagacgccttaccgtctgagccaccagggaagtcctggctaaagagacagtaaatattggtagaatctgaatcattcaatgatcaggcattaagtaaaagatctaaaatatttattatgcaaaattatgagccaaacactttgctaggcatcttcacataaactacactatctaattaagggattcgttggtggctcacagggatactggtgcctggcaagtgtcatttaggaattctcttctagttaactagtgtcaggacccagcccacccaccagcccacaggcaccagtcctggaacactctagaccaaagagtagctggggggacctagtcctgtccacaaacgggccagctgccataggaccccccgagccctcagggaccccaggacccgccctgtctaccagaaagctcaggacgcagcccacccaccaatgtgtgagcgagagccctgggtccagcagcgcatcgatcccaccctccccacctgccagcaggccagcactagtcctgggcccagcctcatccaccagagctggggcaccagacctggcacaaacaaggccctccagccagtgggtaggacacgcccacccaccagcagtctggcaccagctccaggaccccctggacctgctccccctacctacaggctgacaccaaccaagagtttaaggtacaacatagaaaagacagtctcttcgacaagctgcatgtaaaagttgaggttagaacattacctcacagcatatataaaaataaactcaaaatggattgaagacctacatgtaagacctgaaaccctaaaacatctagaaaaagacagaggcagaatattgacatacatcataactatttttttttggacctgtttcctaagacagaagagataaaagcaaaaatagataagtggatctaattaaaagtgttttcacagcaaagaaaacaattaacaaaagaaagagacaacctatggaatgggagaaaatatctgcaaatgatattagtgacaagggattaatgtccaaaatacataaacagctcatacaagtcagtatcagaaaaaccacataactcaataaaaaatggcaaagatgtgggaaaaaaagggacactgttgatggcactgtaaattgctgcagccataagggtatggaggttcctcaaaaaatcaaaagcagctatcatatgatttagcaattccactcctgggtatttattcaaagaaaacaaaaactaatttaaaaagatgtatgcaccataagttcactgcagcattatttaaatagccaagatatgaaagcgatctaagtgtccactgatagatgaatggccaaaaatacatggtgtgtgtgtatatatatatatatacacagacaacacagagaacacagtgggatactcagttcagctcagttcagtcgctcagtcgtgtccgactctttgcgaccccatgaatcgcagcacaccaggcctccctgtccatcaccaactcctggagttcactcagactcacgtctatcgagtcagtgatgccatccagccatatcatcctctgtcgtccccttctcctcctgcccccaatccctcccagcatcagagtcttttccaatgagtcaactcttcgcatgaggtggccaaagtactggagcttcagctttagcatcattccctccaaagaacacctacccataaaaatgaatgaaatcttgccattttctacaagatgtaatgaccaaagggtattatgctaagggcaacaagtcagacagggaaagatagacatagaatcgagaaaatcaaatgaacaaacataactaaacagaaatagaatcacagatacaaagaacaaacagatggttttgggggaagaaggaatcagtgaacaaaactggttcagttacaaaataaatgagtcacgggtaatgaaatgcagtctggagaatacagtcaataaatatgaagtatctttgtatggcaagagataccagctagacttatcatagcgatcatttggaaatgtatagaaatattgaaccactgtgctgtgtaccaagaactaacgtagtatgtgacaagtcaattactcaccaaaaacaaacaaacaaacttacaggaaaagagatcagatttgcagttaccagaagtagggagattggggagtgggggaactggataaagacagtcaaaaggtacagatttccagttttaactactttatctcacaactgggaacatactctacaacaggataatataactaacagtgctatactgtataagtgaaaattgttaagtaaatcctaagagttctcatcacaagggaaaaaattattttctatttctttaatgttacatttatatgagatgatagatgttcattaaatttactgtggtaataatttcatgatatatgtaagtcaaatcattatgttgtataccttaagctcatacagtgctatatatcaattatatctcaacaaaactggaatacaaaaacaaaaaaataaaacagtgtgttactatcaacaaggcactgacatctggggctgtaaaaagaaaataaaatgaagtcagcagtggctggagagctctctaaaacagagccgggaggccactgatgaagtgtgatttaacaacaatggcccagatggaatctgaacttcgaccactcactatcttaacggaggtatccatagtatgtgcccaatgttccagaaactcaaaatatttatccaacccttactctaaagtaactcgtgacagcctatttattaagagcaaatacttccttgcatagtggtcaaccacagttcttgccaggtaatgactttgtggctttcatctttataagactctggactcttttccactgtacaatctcgaactgcaaatcttaagacccccaataaattattttacttgtagccctctgcactttcttggtcgacaggactggttcatctttactttcaataaagttaagtcgagaacatccctatgaaaaggttaccctcattcagacacatttctacatgccccttgaaagtgagaaaaaacagtgtgcatagagctagatgtgttgtctgttgtgtgcccagccactcagccatatccaactcttggcgaccctttggactgtaccctaccataatgtacacacacccgagccccatgtaaaactcctagtagacgccactgagaaacactgatagtaaaggttaaagagttatatgcaatgtaattttcatggataatataaagctgacaataaataaaatttaagttaaagaagtaagctagactttatcattggcaatgcaaacacactgacatattgattacatcatactataccatatagtaagacaacagaaaagcatgctgtccttcggggctacatcagctcggccaatctaacaaatgaaaagaccaccccaatttcagcaaggactgaaaaaatgctacgttggttacctttgaattgttaaatccaatggccacttttcagccttcattccatctaccctctctcagcaactcctaacatagttaactacttccttgctccttttagcttgcttttttttttaaactttcctctggtttcctagccctctgagcactgtctccttccctagctgttcattcattcacaccttaaatgctgatgctccctacagttttgtctaaactgcctcttctcctaaaaagaaaagttctctctgggcgatttcatccattcccatactttaattattacccacaattctaaatgctgatgcttgaatctatatttcatctaaacatgaattttcttttgcaactctcctggtttctacatactttgcctgaagaactccccctactctccaactggcaaaaatcttctcaggctttatgacctaatatattaccacctcagtgaagctttcaagaacttttccaaatagtgttagttactcttctagttcagaagtcatttcaactataccatcttgtgaaaaactcacaaaataggcaagtattatcataccctccctagaaataaaggcactgaagtctgaagagatcaaacaacttgaacaaagaaacattactacaagcagaaaacatcaacttaaactcaggtcttttcactctagatccaatactctttctaatatactgtgatgttctcaaaaaaaaaaaaagagagattcagaaattcagtagttttaccattgttaaaaaaactaattagtattgtctgtttctagaaattaatttctaattaaatgcttaatccaaaaacaaattattgataattactattttaaattatacacacacagctaaactggttaaaataagcatttaagacaaaagaaaacacctcacaccaatcagaacagccatcataaaaaagaaaactacaaataataaatgttggagagaatgtgtagaaaacgggactctcctgcactggtggcaggaatgtaaactggtacagccaacgaggaataaaactaccatatgacccagcaatcccactagtgggcatctaccctgaggaaaccacagttctaaaaggcactgtaccccgatgttcactgcagccctcttcatcacagccaggacatggaagcaacctagatgtcgatacagaagttgtggggcggccgggcgcgggggagaatgtgtgtgtattatatttatttacatgtagcaatactattcagccataaaaagaaacaaatttgagtcagttgtagtgaggtggatgaacctagaatctgttatactgaatgaaataagtcaaagagagaaaaacaaacacgtattaacacccagtggctcagtcggtaaagaatctgcctgcaatgcaggagacccgggttcaatccctggatcaggaagatcccctggagaaaggaatggcaacccactccagtattctcacctggagaatcccatggacagaggagcctggcagactacagtccacggggatgcaaagagtcgaatatgactgagcgactaacaccttcacttttctttcaacacatatatatggaatctaggaaaacagtgaacctatttacagagaagacgtggagacacagaggtagagaaaagacttctggacactgcgggaaagagaggctaggagaaattgagaaagtagtagcattgacatatatatatactatcatttgtaaaataagttaactgtcaggaagctgctatataacaaagggagcccagcctggtgctctgtgatgacttagagggatagaactgggcgttgagagggggatgctccagagggagggaacacacacacacacacacgcgcacacacacacacacacgtgcacacacatacatatgactgattcatgctgatgtgtggcagagaccacctcaaaactgtaaagcaattatcctccagtaaaaacatcaccactgcagacactgtagtgaagactggttcaggagattcatacacggtggctaagtacaggggatggtggatcaactgaagagcagaacacctgtatgatctcaaactgtccccccataggtaactagaaaaaaatcctataacggggaaaattaacattataaaggcgggcaccctgtgcctcctgacacaaaagtctaagaaggtagtactgcagcctgggatatttaacaagaatcaaaacgtgaggaacaccagcaacggcaaactgattaacatgctataaattggcttgtgttcttcaaaaatatcaaggcagtgaaagacaaaggctaagtaactattccagattaaaggagattaaagagatatgagaactaagtaaactacataatcttggactggattctacactagagaaaaaaaatgctaaaaaaattaaaagcatttactgggacaaaagacaacacacaattatagactgcaaattgtactaatgataaatttcctaaccctaacagtgatgcagttgtgaatgagaatatccttgtccttaaaaaatacatgctaaggtatgaggatagagggacatggggtatacaacctattctccaatgggtcagaagagacaataatacgaatgtgtgtatgtctgtgtgtggatggagaaagaaaaataaagcaatgtagtaatttttttaaaaactgagcctgcatcaagagtagttctctgtattattcttgcaacttttttgcaaactcaaaatcattcaaagtaaatcatcaaaaatgagaccagaggttgtgggagaaatgggtgaagaaagtccaaggcacaaagttccagctataaaataaataagtcagggggatataatgtacatcatggtaactacagttaataatactgtattgcatatttgaaaattgctaaaagtgaatctttaaagtcctcatttgaggcggtggggggggggggtggagaaccaaactgtaagtatggagacagatgttaaccagacttgctgtggtgataatttctcaatatattaaaaaacctactgaacattatggtgtatatctgaaattaacatgttgatgtcaattatactttgataaaaaaaatcagagtacaggatcagggtaagtttgaagttttttacataaattttgtcatttgggtttttttaaaaggcaagaaatatcacatttttataaatgagagaatgtaagctcaagagaggttaagtgaccacttccagaacacaggtccctgtttctgtacaaccccactagtttgcaattcaatggccaaaatgtttctaattcctgaaagcctcaaggtcacacactgtctataactactaaagttttaaacttctaatgatttgtatgcattctctaataaagtcctgctgctgctgctgctgctaagtcgcttcagtcgtgtccgactctgtgcgaccccatagacagcagtccaccaggctcccccgcccctgggattctccaggcaagaacactggagtgggttgccatttccttctccaatgcatgaaagtgaaaagtgaaagtgaagtcgttcagtcatgtccaactctttgccaccccatggactacagcttaccaggctcctctgtccatgggattttccaggcaacaattatttccttctccaggggatcttccccacccaggaatcaaacccaggtctcctgcattgcaggcagattctttaccaactgcaatacaagggaagaccaaggtaccataaacttcatcaagcagcatatccaaatactcaagagaatgagctctgagatgagactgagttcaaactcaggcagcgcagtgttctagttctgttatcttaggcaaattaaccatttgtgctctaattttctcatctgcaaagtggaatcaaagtatctttgggttgctctatatcctctgtggcacctgaaagtcacagaatagttttccgtaagtcacactcactcagccagacagttgtcaggaggaccaaatgagataatcaatgtaaagtagtgtgcacaagtactcaaagtccgctatttttatttcaactccaacatgctcagtcacctcagtaacactggtcacagtcaaagccacacatttttttcaaaatcagacccaaatctgacaaaataggaaatgaaaggctctaagaggaaaacatctcagaagttcacaatccataaaagtaaatcaactgtaggcatatcacatgcaaaacagactctacagacttaaacattaatttaacagttgaaatatctgctaatagaacagaactgcaacaagcttcttgttggaataatccatcatctaaatgcatagaaggaaaaatgaaaaattactgaagttacattagttataaactttgctaacctgagaataaggaaataaacaaaaaactctactccacacgctccacacagatttcagttagcttaatacagtcaaaatgtaatctcaacttcaactactagcaatttccagaatgccttttaaaataaatttttaattacattaaattttaatcaaataaattatttaattaaataaaatgaattttaatttatctttctgacaccgcaaagccaccagcatagctactttaccttaagttcagcataaatctagtatcagcctattgtgttcagtaagtactgagaaatcaaaaataagaaaaaatgtaaaaatgattacaaaaaaatgcaaagttaccagaattctgtaagtttaaaatcactccctcttcctcaccacaaaaaaaaaaaaaaaagggtggtgttttctttccctttttcggtggtacttaaaatactcgtaataatttaaaaaacacacacacacgtatacattgtttagggctcattttttaaatccacattatttgcaaaattgtgccacttgcccccactctaaatattctcctcatccgcttcttactgtttccgagctttgttttttggtttgggggttgtctttttacttttggtggggggttttgtttttttcttttttggtctgtaatgcaaaagacattttccaggaacactggtgtctgaataaaccagcttgttcattcataaagcgcctaaaacacctccttgcttctacactcaagggtcacagaacagtctcccataagacacaatctaacttcccctcttagctccccaaacgtgactccttccaccctagcgagagaatttctccaggtgtcatcaaacaaactttaagctagcctgaagtgtttgcgcaaaattcagactcctgggccccagaccaactcaatcggggtctttgggggtggcaccgaagcggtcccaacggttctttttcactgaagtctgaaaactcctagagaacccctccacactctcaacccaaactcaagggattccgcggcagcaagccccgctccgctcccggacggtctcacggcgaccctgcccctgtcccgggagccccagccccgcagtcccgtccccacaccccaaacctttctcctcacttcttcatatcgctgctgaagaggccgaaggcgccggagggggaaatggctgaggtcgcctcctgacccagctccgtcgcctccccgcctcccgactgctcattgtaagcgaagctgttgctggacatcgctgcggggtcgccgggtgtcgagctggtcctgcccggggttctctctgacggcctccggtcccagcgactggaaacaaaactagttctcgtgcagagaggcgcgcgcaggcgcttccggactcgtcaccgctcccgcagccgacccggcgggccaccccctgcgcatgcccagtgtgcgggcggccggcgcccaaccccaccccaccccggccactcccgcgccggactggagttcccgcctccgggcttttgaggtagccgagcggctcgaacccagcctctgcgctaggcagaccctcagcgggctagagactaagctctttttagagttttggtggtggggtttttttttttttggagacagatacccacgtatccattttggtcccttaggagattccccgggcccggacacctcttttttggattcttgttgtaaaccagaagctttcagatttctcctggaacaccgtttaacacaccaggtcaactttgct

SEQ ID NO: 48 - DNA, 34461 bp, Hippotragus equinus
  source 1..34461: mol_type = genomic DNA
ctcttccagcatctgctcctgccaatccttggggctctgggacccgcactgtgtctggaccccgtccctgccctcttctcattgcgtgctgccaagattagaaatgaggggtttgagtgtgctttcattgcacttaaactttagtggtatttccactcatcctgcacaacctttaccagaggggttccctggaaagggacagcagttgctgggccccgtggagtcctgtgaggggatgggtatcaggtgtcttcttgctgttactgctggggcccaggagcccagaagaccacacccctccggaggggtaagaggtacaggcagaagggcaggggcgacctagcttcacagttcaacctgtacaagggtgccctgtggcccgcctctgaccccgagtgctgcaagactctccagaagtctggctgtatgctgaccccccacattgggggagaatcccctactcagggcatacactgccaaaggcaagagacccaatggataaacgcctgtttcgcaagtttattggatcatcttgacacaaaatcattacagcagcatgatatgtctctcctttacacgggaatgtcgatagcaaataaattcttatataacacatcatacaatttagagattctagaatcactgcacaggattctgtaataggttactctacatgctaaagtgacagttttcatcaaaagaagttaaaatgtcattgaggaccatcatctttgaggaaagttcagtctcacgggggtgggctggggtcccccctgcccctgatgcgcatctcaggggcccagccacccccggacccatgtgcttccagcaaggaaacagggccaggcccgggccttccacaggtgcagacacagacctgcagagcatccagtgacgacaagggagccagagctgtagctctccaccactcaccatagcacccagctgggtgcggaggccaaggccctggatccctgccgggcactcccctcagtggatacacaggacacggtggtggaacaaacaggatgtgacggacggcagcctgcaagactctgccccatcgtgtgtcctggggaggacgtgcccctcggtgtggggtgaagaggaatgtctccctcgagcagctggcctggcctccactcccagggcctgtgggcagggatctgggaactcgtgggattcggacgacttgacagaagtgagacgtgccactctgtctggtccccatccagcccccgccaggtcctggcctcgacagcggtcacgctcaccctcgggcagcccatggccataggcacagtccgctccagccagaggagccttggctggcttggggactggaaagggctgctgctcgccagagagtagagagaagcaaagtaaaaaagatgacaaggtaaatcaacgtaacgtaaactgcgaggtctacacagtggacgatggtggacttggtcaactcctggctggacccagtgtgtgcagcacatggccaccctcctgtggcaggtggcactcagcacgtggccagcgtctccttcatttcctccagcaggttgctcagcagcgtggggtcgctgcacttcccatccactgacaccgacttttcaccctgttagggaaatgacagccagcactcaagaggcgccaccctctggacatcctctcctacttcagggtgctctgataaccctctcctattctggggtgtttgataaccaagaagaggggctccaggtaggacagagcaggcacaccacaccccatatctcccacgccccatgggaggagctgtaggacctggagaggccagaaccgcaggggctcaggactgatgctctggcaaaggcagagatcccagccctgcaaaggacacacagcccctgcctggcccagcccctcaggggcacagggaacagctgagtgtagcaccagatgtcctgcagatggaacctgagtgccaaccttctccacaggtgtgaagaaggcccacagactccaattcaaaacttccaaaataattcggcactccaagaccacggaaatcttagctcacgtggaaaagacaacccacaaatacccacggagaagagatggatgtcagaatcacctgacaggctttaaagtagtgattccaagaacctcccatcagcaatcacatacatccctgaagcaagcaggagaacacaacatctcagcaaagaaaaggaagaaataaagatcaacccagggaacttctagactggaatataccagcggcacacaacagaacttgcatgacagaagagtctatgaccctgacaagagattaatggaaaggatccaatctgaacagaccagtggaaaggcggtggaggtgggtgaagtagcaaagattctcatcacagggaccggagacagagaagacagagaaagcagtgctaaaaaggtacttaaaatcatagctgagaactgagttgtgcaaaagacagaaacgcacagatcagcacattcaacagactccacactattaacagcagctaggtccccttccagggaacccctctggtaaaggttgtgcaagatgagtggaaatatcactagagtttaagtccagtgaaagcacacttgaacccctcatttctaatctcggcagcacgcaatgagaagagggcagggtcaggggtccagacacagtgcggggcccagagccccagggattggcaggagcagatgctggaagggaggccctgcagccgtttcaattccctacgttcccaacagctttactgatgccacgtggatggagggttgtgtcagcagactgcccagatcaaggaagtcaataccaagacatgtcacaaactgctaaaaccaagaacaaaggaaaacctgaaacagccagggggaaacaatgcatttcttcataaagggaaaacattccctgttggaaaccgagattccaaaaggaaatggcctagttctgaagcactgtgtgagaaaaaaaacagcaaagcaaaaattctatactcaccaaaaacagccttgacaaacagtaaaacaaagaatgatcggattaaggaaactgagagaactcacacagccaacagacctgatctaaagttctttagacagagagaaatgaggcagaagaaagggtggaatgagcagtgaaagcgacagaaacagtaggcaggcaggtgagcagatgaggctgtcttgtctcctgaggtctctggaatctgtaaagctatagtgcactgaagaaaggtgccttcagtgtctgcagaggcaaaacctgagaccacctcctatatagggggagggtcaagggtaagcaagtgtgaggttttcatgttgagctccaagtagactttgaacaccaagggtggggatatagtccccacagctccagacacacagaaactctgttaacatatcaacgtgagacacgggtaacgctcacatatgccacagaaggcgagagcagaaggatgaaagaaaagacacagggaacaaactaactgcaagacaaacccaaaaatatcagtaatactttaagcacaatgctctgaacaatacaactgaaagagactgacagaatgaataaggacacggtatccataagaaatcctttccaatacaaggataaaggcaggtttaccacaaaggatttgccacataagcacagaccaaatcagagcaagagggcttccccggtagctcagtggtaaagaatctgcctgccaaggcagaggacatgggttccatccctggtctggaaagatcccacatgctgaggggcaatcaagcccgtgtgccacaactagagaatggcccatgcagcaacaaagacccagcagtgctacaagtaagtaaataaatgtgaagtgaaagtccctcagtcgtgtctgactctgtgaccccatggactgtacagtccatggaattctccaagccagaatattcgagtgggtagacttttccttttccaggagatcttcccaacacagggatcaaatctaggtctcccacactgtaggtggattctttaccagctgagccacaagggaagcccaagaatactggagtaggtaagcctatccccttttccaggagatcttcccaacccaggagtccaaccggggtctcctatacattgcaggcagattctttccaactgacctatcagggaagcccaagtaaataaataaacgttattaaaacacacacacacacacagaatggctgtactgacaccagacaaagtggacttcagagcaaagacacagcacaggacagagacgaacacaccaactgctgaggggatccactcgcccagacccacgattctaatggcccacagtcagtagaccagctgaccaccactggcttcatgttccctgctcacttgtggaggactggcagagagaaaatctacaaggatctagaagaatcaaaaacagtcaaccagcaggatctgggtaacacacacgtatcgcaggaacacctacagaacagctgtccagagggaccacactcaggacagagctccagtctcagcacctttcggaggcctgagaggtcacaccagaaaccaagggccaggaagcaacagggaactctcccaatgcttagaaataagtccacaggtcagtgaggaggtagtgatagaaatcagaaagtatctggaactgtatacacatggaaatgaatcataaaatcctgtggggttcagctaaagaagtattagagaaaacttcctaacattaaaaactttattagaagagacaggcctgttggaaaggtctaagttttcaccttatatatttgcaaaagagcaaaataaatccaaagcaggcagaaataaagagatatgcagcaatattcagtaaaattattttttttttggctacacctcattgcttgtggggacttcccaaatggctcagtggtcaagaacccacctgccagtgcaggagacacaggacacctgggttcgatccctgggtcgggaagatcccctggagaagggcatggcaacccactccagcattcttgccgggagaaccccatgggcagaggcgcctcatgggctgcagcccaaggggttgcaaagagcagaacacaactgatcacacatgcattgcattgccattgcttgtgggatctcatttccccaaccaggaatcaaacccagtgcctggcagtggaagtgcagagttctaaccactggacctccaaggaattccccaactcttcaaaaaaattggctactaaactgatcttccaaaatggataaataagccttttagccaagataaccaataaaaaggagaggagacaattaccaatatcagcaatgaaagcttatcaccactgatccctcagatactaaaaggaaaagaaaagaaccagatgacttgacccaccatcacctccataatccagatgaaaccaaccacttctttgaagactacaaactactaaaactcacaccgtaagaaacagacaaaggaaagaaccctaaaagtatcaaagaaagaaacaggattttcctggtggtccagtggataggactccacctgccaatgcagagaacacagattccatccctggtctgggaagatcccacatgctgaggggcaactaagcctgtgtgcctagagtccgtgctcctcaacaagagaagccaggcaatgagaagcccttgcaccaaaactagagcgtagcccctgctcactgcaactagagaaagcctgcagcaacaaagacctggagcaaccaaaaataaatttttaaaaaataaagcagttattaaaaaaaagaaactgaacttgtagataaaaacttttcagaaaagaactccccagacccagatgctttccttgaattctacaataatatgccagaagaaacacactgactaaacatgacctcttccaggagatacgcaaggagggaacgggccaggcggaggaaaggccgacactgctcaggagcacagggtcagagccttcagcaaaatcatctcagactgagctcagagcagagcagctccgctggaggacagtggtgaagctgggcaggccctccagaccctgagggctcaccttcttcaccaggaggcagacgtggtggccctggatggagcggctgtacatggaggcgcaggagtccactcgctccacaactgcaagagagggcgatgtgaggctgggccagccccaggcagtgggggagccccgtgcgcgacaagaaggccaagcaatctatcagctatgtccagtcttaccagaaaaacggtgatgaaaacagatctttgccaagagattatggaaggacatactaatgccatccaccttgatcgagctcatgctcaggtccccagactccagcaacttggcaaaggcatcgctgtgggaaggacagagaaagggtggcaacagggggcgccgcccgggggtgggcgcctcctctgagggcctgtggctcagggtctgcactggccctgtaagaagtcaacacctgaacagtgtccccaaagcccctaagtttcagccctgacacccaggccgtgggaatgtgactgggtttggtgacagaaccccaatgcaatgtaataggagtcctggtgtgaacgggaggtcaggacgcagatgtgcgagaaggacaagcatgtgtgcccacaggggagggcagccatccgcatgccactgtgcaaggcctcaggaggacccagccctgtccatgttctgggtctggagtccagggtccagtccagggagtgatgccaggcctgttgtttgggctgctggggatgtgctgagcctgaggtgccagccagtcacctgacaccgcgcccacatcctctcctcaggtctggagcaccccctggtaggaaagcagggagctgggggcaggagggagggcagcgcacctgtagcacggtgtggtgaccaggtacgaggtgcaggtgaagtgcagtttgaagtcaagcttctcgtgggttgagccttcatcgttctgtggggcagagggggtgcagggtgagggggtgcagggtgagggggcgcagggcgagggggtgcggggcagggccttcgagctcgggtgcatgactgacccttggggcaccccgccccataccttggcaatgaaagacagggtccccttgagcttctgggccatgacgatgctctgaatggtgaacacaaattgggcctcgttggaaatacctggtgcgggcaagacatgggcctgaggagcagtgcaggatgccgtcacctgggcaggcggcggggagttaaggctgccagggtctgtccccagcactgctgtcccaggccgctgagccaggctcactcaccaggaggcagctggaaaggcacggggacaccatcgtggaccgaggagccctcgggccgggccagccgggcattgagtgagtccagcacattgagctccatgctcttgagaaagctgtcgctctggttctccaggaccacggagactgtgacctggctgtccttctgtaggctgccctgcacgtcgtacgtctgtagagcaggacccggggtcagtggggagccactagggaccccatgcctagagagtgtgggcaccccctcatgtccagagaaaggagccctgagcctcaagcactcttggccccacctcctgaaagtcaagcttcgcttaccatcttgatgtaagaattttcagccagaagggtatagctggacatggactgtggacaaaagagaaacatgtcagctccgggcagtgaggacctgagagtgatggtgagggttgctggggcccccccactcaggaaacgtcaggagcgtgagaacaggggacagggagaccccacgtcccagaggcttccagcaccggctgggttgggaggaccctcaccgggaggggctcctcatccagtgtgccgttctccacgggctcagcagcctcctcgtccgtcggcagcaccttcttcttggacttcctcttgtccttgggccgctcctccttgtctttcttgtgtttcttcttcttgtgcttggagggtttctggagcagaaacaggcttgagtcagccctgcgctcctctgacgagccacagcccaacagcactgcgcgattaggacccagcgagcttggcaacaagagactgctgttaggagccccagcagtgcgggagtgccgcccccagcccagcacccgcacacgcacccccaccttctccaggtcctgctccctgtcctcatcggcgtcctgttcctctccccggggctcctcctgcccctcctgcaggacagtgactgtggtgttcacctccagctcttcctatggggggccaggccggggttggtggtgagggacttcaaaggcagccaaggcccaggatggggagtcctgcgccccctgacctgcctagccctggaataccctgccctgatgagcctccctcctgacggtgtatggccccccctccaagtgctggtggccagcagacaggagaggaggcctggcatgaggctggctagcactgacccagaagaccccagagccaccaggccccagacacagaaacaaagccgctgcccaaggctgctgcctggctctgagacaagaacccaccacgaaaccattgcctgcacaagaccctgagcatgggactaagccagcgcagacctggctggtctacctgagatcaccccacatccctctgcccccagtgagtgggggccccttaatgcctgtaagctatccaaggctgaaaagcatgggtgtccagctgaggagcacttgcagtcagcacaagtcacaaccaggctcttaccggggctggtgtggcagcaggtggtgtagtagacagccagaagtccaagtcctcaccctgaaaccacaggaacacaggcctttagctggagaagctagaccggccctgagaagacatggctgccctgacaggcataggacactatgccccacaggacctgagtgcgctgggagacaggggtgactccagctctcttgccatgggtccaggcacctaccggaaccacacatccaggcaaagtcgtgttgctctggagcgaagtaacacaacctgtgtgtggtagctctgccgaaccctccctccacgtgcaggacatgcaaactatgggggaagggaggttgacagcccaggacatccctgccccaccccatctgataagacaagtgagcctggcctctcaccttctccaccttcttcttcttctcccgctccttctccttgtgcttcttctcctttttcttgggtttcttgctcttcttctccacgagggggacatcctctttctcaggggacttggaggtctcagcgtttctgtgtttctggacgggcagcttctcactatcagctaggggcctgggggtggtcacaggatgagtggcctgggatgaggcctggagggaagtagctcactctgctgccgggacccttaccccaggccatgctgagcaatcaagagaggatagggggagggaccacaatgtggggaacccaggccacgtccagccccatgggcagctgccctggccttactcccagtacttacttatccaggtcgatgtccagggccctgtaagggtcattgggatctttgtcgtcctcgtcactgggcagggcgttctgagggatgacaggaatgctgtgtctggatcaacccaccctctccacaaccccactgggcccccacctccctctcagacaaaccagcaggtccacacccatgagagcatctgctctggggcctggcgctcagcgtgagcagtggatcccacagttaatgaaacagaagtgcaggacgtgctcacatcgcacagggcagagctgaccaggggcccgggggcggggcggggcaggcaactgacctcaggcatctcctcggtgacaatgtccacacgctgggcaggtgcaatgtcctcatcactctccgtgtgcagcgagctgtgacgccgcgtgccccggcgctcgcgctcccgcttcttcttcttccgtttatccttctccagccgttgccggtgccgcctctcttcctccagcttcacgtactggtccgataggggcatccctgctgggacgtgggtgctcaccccacagcctgagagccacgccctgcccctacctgggggcactgccctgactactgggatgcagacagggggcccagggcggtgtggggctggacctagggacctctgtacacgccccctgctggcaggggaatgggagggaggatgctggctggacagccagagctgaggcaggtctgaagctggtctgcaacaccctcaccccacgcagacacttgcctggcaccttcaagggcaccgagaggtcaatctgcaccacggggatgtgctccacgcctggcgtgtcctgataccgctgtggggagacagcaaggccggtcaccacgcagggcagagggcccagcatgacgctgaagctgcagagcagggctcatggagaggggcaggtctgtcagtgcggggagtataggacgggagcaagacttgcccgttttttcatttgaatcttttttcaagttgaaagtcatactttggaagcacagaaacacagggcttcctgcctctggaaagcgggcatcagcaagcctgacacatgtggagccatgtctccctgagggagcccaaagcggccgataggtctgctggctggagggggacagatggtggcagtggcgcctgcaaaaaccccatgtcccctgtgctcactcgcttcccgctaaggcagaggagcctgagctcaaccacacagaacttgctccccacttattgctactgggggcccttgtggtcctgcccctggacctgctaacagcctcacacagcccagggatggagagcagatggggccctggcccgttcctccagaacaaggagtccagccttaccttctggggggacggggaactcttgatgtagaacgggttgttggcctgctcttgcctgcgggcctcgcggcgctgcgggacaggattcagtgagcacatcagtgggcgtgcggagcgctcgccctgcaccctcccagaccacctgcacgagccagacctaggggacaggacccctcgccactttcactgttggctttggaccaacagagagggaagccagcatggggaggggtggggaggggtggagaggggtggccagtgggaccccccgggagctccatggctggggcacggggatggcccctgcaggggaggagcagaggagggaacaatgcacatctcatacccaggtccgcacgtcgtccccaggccccacacccaaaagcgcaacggtcaggacccacggctctccctggggagctctggcccaagagaacaagcccacccaaggtctgcccggaggggcatgggccacaggccagagcgacctccctgcctcacccgggccagctcctgctcgtctgcctcgggcgcccgtggcttggtgtgtcgctgttcctcgtcctggaacatggccttgggcttctcatcctcagactcgctgtccgagagtggctcgttaatccaggcatccaggtccaggctgtgggacacaggggtcacatggtggctctggcttgcaggcccggccctggacagtgctgtccccttggagaccaggacatgaaggccaggcagcggccgtgggcagagaggacagaccaaggatggtggagcttgactaccccaaggtcaacaggcaaggaccgcccacttaccttctcagggacggcaccagggtggggacagcagaaccccagagaagcagccaagcaccctgcactgtctgtgtgaggagttggcctcctgatctcagggaacgtccttccgttccctccaccactactagctggacaaaagcctgggggggccctcatgccacctggccccaggtcctctaatggccgcacacttacccttcggggactggaaccttcttctgtgccttgggagccaccgggttcagttccccggcaaagagggcactcacttcctctgccaccggcacgtccttggcctgaagcttctgcacgtgcttgaccagctgcaagatgcaggatgcctgcgggggccccagaggagtcaggagggggccccggaggaccggccctgaaggccactcagcctttacagggcacagcacacacagacacctcgctgctcctgactagagcctggctgagaatgtctggaaggctctatgaggagccacttggccatggggcctagccagaaaaacacagacctgttgccatctccttcagaattagtgacagaaactgggttctgaccaagataaagggttacggggctgaagggtgtgccaccccattgggcaactgctccaagaacatggcccccgacctctgggaggcaccagggtgccttctctcggctccagggatgtgaccacagccaacccgggctcgcggccctcagccgacagacaagctcatgcccaacacctgaccacgactgcagagaccactggggcctgcattaccgtagggctcatgaaacaggctgccaggccaccagtgcgcagctgccactccaagctcccgtgaaccagctctcctccacccttcctgttggcacccaccaggatccgcggtcacctttgttgcatctccctcgggctgaccactcacattccacggcctcctgctccctcaccgtctcccatccccactgacccccgccaggctgctcctatgggaccacctggggcctccccagcacaggggctccaaactggccagccctgcacccggccaagaatgaggaaccacaaaagggcccccccttgaactgccctcagatggacgagccgctgctctcacccgctcctggacctccaggtccgcactctgcacgaactgtggcagccgctccaccaggagctgggtgacctcctgggctgcggacgcatctgccgcctgctccttttgctgcaagatggccgcatacagcttgaccacgttctgcacgtataccgcctggatgtgtccaggcagtgtggtgaccttgggccgcagcatggcctccagtgtctgctggggctcctgcaggtgtctgggggatgggagggttggtgagtagccaccccaacagctccgtgtcccgggctcctgccacccgctgtgatcccccacctggcgctggggctcagggaggggacctggaggaagagaccacggccaccctccactcactcggagaactccccgcaaatccaggcagccgcgtagagcacctcgcagatgccgctgcgctgcgggctgctggccaccaggtgggcgctgtcaagcagcgcggacatctgtgccacggcaaacctgcggatggccttcacgcggatggccacatccaacatctgtgcggcaatgaggtggccgtggcgggtgccctccagccgcgtcagttccacgaggatgctgatatacctgcgggacggggtctgtgaagggccccgccagccccagcgccaccccaccaccctgcccccggccccgccggcccacaggccgcaccactcgaagttggtgatgtgctgatagttggactggctgcagatgtcgatgatcttggtgagcagctcgtcacggtaggttgtgccctcagccttgtccacgtgggtcatcagcttcttgacgatctccattaggttcttcttggacacctgggggcagcgatggtgagggaggggccaggccggcaggggggcagtgtgggcagcagggcaggcacgcaccattccgtacaggagatcgagggcccgcaggcggatggactcatccttgtcgtccaggcactgcagcacgagatccttgtgagcctgcacagacttggggtgcgtcctcaggatcttggacatggccaggagccccaggtacttcactgcagagacagtgggcagttgtcacacctgtacgaggttcaggggcgaggccaggctgcagctacaccccaaccacctgggcactgtcggccacatctcccaggcaccaggctcccatcactgccaacctctagcaccccaaacacacgactgtctatgccaggggcagccaactgggccacaggtcaggtccagccacagcccgtatccacagcagcatcactggcacgtgacatgcctgccagcacccaccaggcaacttctatgctaccctggcagaaaccatatgacctgcagagttgatctgagttactccctggcccttcccagaaaaaatttggtgacctctgctcaaaaccaacagatctggagtgccaccaggagtgcctgtctggttaacctccaaggagactgcaggcccatggggaggtctgccaatgcctggcctgctcctcccgggccttggcgcacccttgacctctcccctgtgctgccatagcctccccacccctccctgcagtcaggtcctgcctccccatggatgcgggcacagggctgagttcaaagacactttcaatgggcaaagggctgagccatacagcgagacaccagcccactgtgcagatgtgtagtggcacccccaggccctgcagagcctggagggacgagcaactcacagttctgatcggagtcttctatcagtatcctcaatttctgaacgcagagctgcaaagagaagagtaatactggtcacatctacgcccacatggagttgtggcctggagccaggaggggagcctgggtcctgggacatacctggatgctggcgctgtggttgggcatgccggatgacagggagatgagcactgaaacagaccactgggtgagggcccacgtgactggcccggggagcagaccacagtgcccggggacccagggcccctgttgggggcaggcccgtgggccaccctgcctgggacctgctgactgtgaggtgcgatggaacaggccatctcctatctgcatactcactcactctgcccatggccaaggtcagggctgtctgcgatcccgccccacctcggtcctccctgtggaccttcccacacaaaagggccactctccagccagcctcccctgctcccaagtcccatgctcgcccttcgtctctgtgaccgttgctgatccttggtgatactcacggcccatgctgtggtcatgagcgtgggcccgggaccagcttcctgagccttgctgaacttatagttgcctgtgggtctctgaggagcagcccaagctccgggcagggacagccaatgagacactgaatcctccggccaccacctccctctgcccacctataggaaatggggctgcagggacaagtgacccacagctaacgggctctagcagattgtgtggggagggcatgcaggtaccctccaaggaccctcctggctgcagctcctatacaggacaccacacgagaagcagcctgaggcctgctccagaatgctcaggaagacggtcttgctggtggtggtgcagtgtttatcaatggagcctgaggcagcaaaggttctggccacagcagtgtccagttgctgacaggtccacagggccaggccaggcagcttgccaagtgggaacctcaactccaggggtgtctgcacctgctggtgaggtcctgggaacagccccctagccggcgacagcaccctgatccacagcgggtcaccccagcactcacctgcgatgacggtgttgacacactcgtaaagaagggacatggcagacgtgctggagacggaaacagaggagccgggaagacggaggctgcctgcctcccattcaccccaacaagatccccagggaactgtctcagggaaaataccgagcccagggactcatcttctgattctgtgaaccccatgaagagaagccaagttccccaaagggccctctctagcagcccagaccccaccagctcgtttcactctgacagggaggtggcctgacctggcaggaggaacacagagtcgcaacccaccctacccccctgccaggtcactcaggcaccagatgtgtccacccactccagtctgatattctcagtgatgctttagttcaaacccccaaaggtcaagagaatgggccacgagagtcgggccacaaaacaggtctcgagattgagggcctcacatgaatgctttgaaaaccatggctacttcataatgactgatgatttgtttcaaacaacaggggcttccctggtggtccagtggttaagacttcatgctcctaatacagggggcccaggtttgattcctggttggggaactagatcctgcatgctggaacacgcagttccatgtgaacaagagttcacattctgcaactaaagactgagtgccacaactaacacccgtcacagtcaaataaacatacaaataatagcaaagccaacagtgtcctgagccattggccacctcccaggggatcccaggagcacgatctcctggcacttggaagctccatccccatgattcaaccacaggcaccccaagttccctacaacattctagaactaggtggggacacggtcacctcaggctattcaactcgaccagtgagaacccctgtgcaccagagctgagcaggacagctctccccactgacctaattgtggctgtttgcagactggggaaaggagcgcccaaggacatggctccaggctatggcagacctgtaggcctgcttgccactccccccatccctcctgagagcgccctcccacaccggccccaggcctacctgtggatcaggttggtgagaggctcgatcagcttcttgcccaaccttggctccaagggggtcagagcaccaaactaggggatgaagaggctgacggtcactcacagcagggatgggacagtggtctggggccctcaccaaggacacccagaggccctctggcagtgggtggggcaggccaggagaacacctaccagtttgataatcttaatgaggacccagttgttggtggaagaggtcatgagcttgaaaaagagcggggcaagggaaaggtagttcttggggttgcgtctggccagctcacagatgacgttgactgctgccgactggactcctgagaagggagggcccccatcagtaacagggtgtcctccaaggcaggtggccccccacgcactgtggcctatgggcacggctccccccaaccacctcgaggggtgtccccagagggtcagtcactcaaggtacaggacacccaccccacaaaacaacatcccaaggagcgaatgcggggtctgccggcccagaagcaacatcaccccaggagaggaatgaacacaaacagcacccagggcttggtttctaaatcccacaccaaagacacaggaacagggtggtctggagaagggcggactccaggttggtgggaaaatagaggagggtcgaggacagggtcccaaggcctagcacccctacacaggccctcagttacacgggccccacagggcctttctaactcaaatcaacataccagggtcgggatcctccagcttctccttcaggcgggggaaggcagggcgcagggactcagggtacttcaggaacaccttgtacatgatcagcaccgccttcttccggatatacggcttggtgtgtgacatctgtggggcagacggcataggtctccctgctgacgcccctgtgccctgcacccctcacctccttatctcaccttctactcccggctcacctcctgctcacctcccactagcctgtctccctcctagcccccaccccctgctcatcccccacccccctcacctccactccctcctgtgttcatctcccacatctgcctgcatctcatctctataacctgaaggaaaactctctctccagcttaactggctcctggtctctgagccctgtctgcacatttactctactgccctcctccccaccaagcccaggaccacacaacagtgtcttagaatcaaatcctgccttcctgagtccatgaccccagcctgccctctggaggccaaggtccgcctccactgtcagccctggccatgagctccattggtcaccgagacctgtccccagggcaggatgctgctctgcaccccaacatgggaccccagagctcctgccctgctttcaggactgtgctctggccacgagggcctcttgtctgtaggtgggcacactcctcacctgttggggccctggaaacctggcctgagaaagctgccctgccctctagacccagcaccaagacaaatccctaccgccctcctgtgggcgtgtgactaccgtcacctgaacgggtcctcacgcctcctgaagtgggccagagggtcagtactgttggctttgtcagccagggtctctgtacagtctgccctggctgctgggaagcccagggacacggtattgggcaaaggggcgggagcatgtgtggacacatcatttacaacaggccccggacctagaagctgactctactcacagccttcaagactgcaaaccaagactggagcacccacacagcaaacaggctgcgtctggacagaacgctccgggagggacgcaccgccctcgcacatgctgtgacatggtcagatggggagcctcccaatcatggagaatgaggtgccggcgaccctcagggccatgaggtctttgttcttttgtggttgttttagagtcaattccagtttcatttctctttctttcttatttttactagagttgagggctgcgatttctaagaacacatccacatttcacaacaaggttcctgcccgccctagagatcaaagctggctgggaattctgcttttcagatgaacagagccaccagacatcagactgcacccaaatgaagataaaaggtgtcctggacagagactacctgaccgtgctgcccgctgagaccactaccactgccactcatgcctcagtaagaacacagctgatgggtcaagcgcccaccaccacccccagctagaccttgcccttccggagaggaccattccagaggagttgaggtgaaagtcgggcccatcaggtgatggagggggagacggtgactaggtgtcccagctcaccccaggaacccaggctgtttccaccccccgaatgccctcagcatgactttacaaccaggttatcctggcacacgaggcagtaaaggcaaggggagggcccactcccagactcaccagtgtcatgatgtcgttggccaggtctctggcaagatctggggtaacaaaacaggataggccagtcagcgcaacgccagtgtcatactggctggggctgctcaggtcctggaaagggaatgcgagggtcagaggcgggtgctgaccatggcttgctgggccccaactgtgcccgccagccctgccctgggtctggagacatgtgggacaaggattcatgaggagcagccagttccgctctgtcaccaagaagagctgggatggctctggggggacagaggcgagggctgcccctcgctccaggtgtgtaacatggcaaaactgcagaacccagggccctgaccgcccagaggcacgcagcgggggcccccacagagagacacccacagatgactcctctaggcccctctgcaagtgttgagaagcctccactggagtcccacctctcagggagcggagaaccagcagaagaagcgcaactgccctgcctgacgccccagcctcagttcccgctgacctgcgtggaagccccgtcttggcacagagaggggggaccctccccacacttcacatgtgtaacaggtgcccccagaagtgtctgaagagttaatctcctagactgtggtgatggtacaaaaacatagggtcttaaagttcactgcaaccctggatgtggagactgggcctcacagcacatccctccactcagagtgacttgcagagcctgacacgggcagcagccacacctcacggtgtgtggaggcctccgggcaactcctacagcctgcctgccccacagcgcctgcccgggagcccagtcacctgtcccctgcagggtgaccacaccagctcctgggtagcaggcctcccccagccatctgaggacccagggccacaggctcatggcagttctgtccaggaagggtgcctctgatggccccctgaccactctcagcaagaactgatcaagtccccgggctagggcagagcagagcactcattgctctcaccacagagctgaaaaccactcagggccagagagacacaccagccaatgcccagcacccagtgggcagaaggtgccaccccctcagcaggttcccccacgagagggggcagggcttgaagagtgactaggggcagtccctcaacactaagagaactcaagaggagggccacacatgccgcccaccactgttgtttccgaggagggtggagaccatccactgcccactaacccccactctccacatgctcccatggtggggtgagaggcccctaccttgcggatctggttggtggtcagcatgatgacgtcggtcccttcgtgaaagcactgggaagccgcgaggtagccaattcgctgtgagtgcaacaaacagaggcgtcgggcacaaggggagcgggccacgcagccctggctggcccatcccccaccaggaagaggactccccgccccaagtgcgtggtctctggaacacagtggctgtcaagtcagccagcatggcctgtcactgccctgcacatcctcatcgcctgctcagtagctgatggaatgagtctcacaaacacgggataaccatgggctcccacctctgtggctggggtagcctggaggcacacccatacacaaatgtgtgacactccaacacacgggcagggcactagcccaaccttggcaaacccagcatctcatttcctctctaggagaaaccggtaggcagcatgaatgaccaggtccctcaggaggacacagcctcagcctcagatgcctgcagggcgtgttcccagggagaaccatgggacgcccctaaataggctgccggtggtggagactgctttccaggacatttactaaagcgggagacaacgtgttcagttgttataatatcaagtaatagaaaagcaatatctcaaagtggcatgagtaggctccatcagatgaaggcagagggtgctgagaagcaccaggacaactgaccagtggcgggctctggggggatgatcagtgcctgcctgtggtggtttttttttttttgaaaggttacaaatttaatttgtatcacaaaatacataaccacccctaccttaacttcactgacactacttaaaacagaaaagaaaacatggtgttaatggtgctaagaccttgctaggcagatgtatgatgggaatgggtctccagtggttgccactgtgtcccctcccagcccagcctcatcacaggacacacgccttccctcccccaggaccccacccagggggttcaggacccacagcgggctgtcccctcaccttgaatgtgaacttggaggcgctcatcacttcgatgatgttgaaggcagcccagctgatatcgtagcccagcatctgcagctgtggcaacagagccagggtcttaggctcctgcccagccccctcccccaactccctgggcccagaggatgaggagacagatgaggagagacagggtctcagcccccgcccgacagagcgagcggccagcactcacataggtcagcttgcagaccgcgttggctttcactgcgatgttgtcctgcttcagctcctgcttgacttcatcaatgcactgagagatgtattttgcctaaaacaaaaaaagaaaaattgaggagctgcgagtgtctggtttccctggtagctcagttggtaaagaatccacctgcaatgcaagagaccccaatttgattcctgggtccagaagatcccctggagaagggacaggctacccactccagtattcttgggtttcccttgtggctcagtcggtaaagaatccagctggcaggagacctaggttcgatccctgagttgggaatcctttcccctggagaagggaaaggctacccactccagtattctggcctggaaaattccatggactgtgtatagttcatggggtcacaaagagtcagacacaactgagcaattctcacttttaagtgtctggctgaaacctaagacagacacagaacacacagtgtacacttccctcgatgggaaatgtccagaagaggcaaatccagagacaaagaatgaactcctggttgccagggccagggagtggggaggtgtctgctaacaaggatggagtgatggatgttctggaattaaacagaactctctgaatgtactaaaaaccagtgcatcatacccatgagaacaaggagtcacactgtacgggtatgacaacatggctgctaccccgagaaatcctgtcagtgtgatgaactgcccacgatcccccatgggccctcctcccgaggggcaggcggggggctggggagaacaggagcagtccccagatgagctcaccagcatgttccagcccctgaaggacttgtgttcgtggcccatctgagtgagagggcccacacaggccccctgctcgctctggggccaagccatccagacagtgtaggcacatgagggccgctggggggtggggactgtccacctccagcccttgtggcccccaggtcctccaagaccagccaccctgggcaggtggcgctgcaaattcccctagggctccccatttctgagttcgtgccaccagcagcctctcctgcatgcatcaggggtctgtgtgcagcccccgccctcctctcagtggcgctgcagtatatctgcgctcggctccacggccaccacgtgtccatcctcccagcagggcagggctcggagccctcccagcttcccacttttccgacacacgctgccatggggcagggctctatgcggacacatgttttcaattttcctgggttttctgggtttctagcactcatactagaacaccaatcaaaagcctggactgacacatgaagcccagagcaaggaacgtgccccatgagacataaggctcccatccagagacacgcacagatgttacagtggcagtcgcaagaaaacccaaacctgccaacatggagtccagttgtcaccaggctgtgggggattctggtgcccgccccgccttcccaagaggaggaggagcctttgatctgaccaatagcagggtggccagcacagcagccctgctccccgtggatacaccctgcatccagtgtcaccccagacctctgggggctccagcacaggctcctggggaaggcgcccccagcgtgagccctcagccagcgtctgatatatattccatgaccgagtcggacaatggaacacaagtcaccagatccttccaacgggcttccaattactaatcccctggagcctcagtcccatacctgtgcagggatgacccctttctgcaccctggactggcagttaatgatttaaaagggaaagagcagagagaccatcccaagtgtggagaacctggccgagcacacagccctgcagacctgcttctgcagtgaaagtgacgtcgctcagtcgtgtccgactctttgcgaccccatggactgtagcctatcacgctcctccatccatgggattttccaggcaagagtaatagagtggggtgccatttccttctccagaggatcttctggacccagggattgaggggcctcccacactgtaggcagacgctttactttctgagctaccaggggcagacgctttaccgtcagcagtgcccaggggcaaacaggtgctcacaaacatgctcccatactggcacctcaacacagaagctggtcagctggtgaaaggccagcacaccatgctctctgcacatgatttccaggcggcctagggaccccttggcttagggaggccaggcagagtccgttcctgctaacatctgtgcagccatcctcagaccaagcctcccgcagccctgtctgcaagtgactctcccgcagcgcagggcaggagagaccactgggtcctgccccagctttgttcctgggcgaatgaagccgctgggaagtgaggggagacaggaagggggcggagagcctcacatgaaccctgccccacggaccccaggaccccgtccccaccagaataccacacacagcctgcactgcagcccactgcaggcacacagagccagagctccagcccagacaaggtcaccgccctaaaacacacccctccctgtaaaaccaacactgcagagaacacaacagaatccagagtgtctgcaacacaccatccacaatgtctgggtcacagtccataattattcaaatttgaaacaggagggcttccctagtgacttagtggtaaagaatccgcctgccaatgcaggagacaggttcgatccctggtccgggaagatcccacatgccacaagtcagctaagtctgtgtgccgcaactacggaagtccatgtgcctcagagcccgtgctccacaacaagggaagccaccgcaacgagaagcccaagcagcactagagagcacctcccactctccacagctgagagaagccgcgcagcaacaaagactaaaaaacaaaacccctgcttaacttaaaaaaaaattagaaacaggaaactataacctatatccaagaagaaaaacaaaagatggccagcaaagaccaaccctgagatgtctctagggatggaatgaacatatagagctttcaactcagctactgtacccaggctctcagggccaaaaagaaaatgtacttgtaatgaataaagagaggacgtctcacagagaaagcaaagctacacagaaccatcaggtggaaatccggggaagggaaacagcagggactgaggagggacggaagctgaggagagaggtggcagcatgacggtgggacaagagcgacgccttgaacacagcagagtcagaaaagggtgcaataaaggtgcagcaagcgcacgcctgagacccagggaaggaagggcagggaaagcagctggaaataagagctcaagtctacccaaatctggtgaaagacataaactgacaacttccataaacctagcgccggttctccgcaatacgaaacacaaaggaaaatcacacccagacacatcacagacaaagtgccgaaaactgagactacggagacagtctccagagcagccagaggaggacccagagggaagccctgagctaggggaggcgggggctcagggctccccacccgagaccgtccctcagagatgaaagcagagtaaccacccccccacagcgaccctgcacctcagagcaccccctggggcaacagccgagcccccaaaagtgactgacccaaggaaggaagacccttcctcaacactaatgttcagccacaacacaagtgcacagcgcacaggcttggggttcctacaggcaggacagggaggaaagaactgtgaaatattagaaggatatgcttcactcaggagtgtttacatatttatctaaaacagagttacacatacgaagttaaagtaagaaacatgggagaaaacggtatattagtctttgtagtctgatttacacgcaacattgctaacaatgaagtattttttctcctttttacaaagaagaaaaaaaaaaaaaaaggccagagtatacaaaggatctagatccagtaaattatacaggcagatgtaggagatattgtagggagggtcccagaccaccgcaatacaacgaatatcgcaataaagtgagtcacacaaactaagcggtctcctggtgcacgtaaaagctacattcacactactctgttgtctgctgaatgtgccacatcattgtgtctaaaaaaacattaagtacacaccttaattaaaaatactttattgtgggacttccctggtggtccagtggctaagattctgagttcccaatgcagagggtcagggttcgatccctggtcagggaactagatcccgtgtgccacaaataagacctggtgcagccaaacaaaatttcattgcaaaaaacgctaaccatcatctgaggcttcagcaagccatcctttttggggggatggggcaggatcttagttccctaaccagggatcaaacctgggccctcaacagtgaaagaacagatcctaaccactggaccatcagggaattcccagcaagccatatttttgctggtgaaggtcctgccttcattgtggactgggtggtcacggcagattcttaaaacaagtcaacagtgaagtctgcagaatcaatggcctcttcctttcatagatggtttctccatcatgtccaatgctatctgatggcattttacctacagaagaacttcttcacagctggagttgattttcccaagcccttatcaatgaagctacataacattccacctgtgttatcacttccacaaatgatcgtgccacgtcttatgtgggtgaggtccgtggagccccaagacaattgtgagagtaacaccagagattgctgaccgcagatcaccatcacataataactgaaaattcgtgagaattaccaaaacgtgactcagagacacaaagtgaaggaatgctgttggaaaatgtggcaacatgcttgctcgctgtggggtcatcagagaccttccatttgcgaaacacgcagtacatggaaagcatgatcacagagaaagcagtaaaataaggtctatctgtattaaaaacaaaaattagaagctattttaagatcaaaagtatacatgactacgtgttcttaacacttgtttcaaaaacagaagttggtgatgcgaacatgatgaaattctcaccccctgttctgagcagccacacttcaccacggagcacacaatgctgagatggatgtgcaaccccgaatttatccagagcaaaggacacacgcctggtatgaacccggcagctatggtaaaatagccatccaaccctgtcttcttagaagagccccctgggtcacttaagacaccccaagattcccagaggagtggggtcagaccttgaggggttgacccaagaagctgcccttgaccctgatgggttggcaggatcaaaaaccacacacctggaccagggagtctcttttaaaaaagacttctttttttaaagcagttttaggttcaagcagaactgagtggtaggtagagattcccggctcgcccgcccccacgtatgcacagcatcctcaacagtgcgcatctgtacaatcgatgaactcacagacacgtcattacccaagatccacagctggtgtcagggttcactctgtgggtcctgacagatgtatgtacactgacaggcacccagcatcactgtatcactgaacagagtcactgccctaaacccctctggccccgcccatccgccccccccttccccataaccaccgatccttctacagagctcctccttttccagaatgtcccaaagctggaatcacagtgtggagacttttcagacagtttcttccgcttagtcatgtgcgtttaaggttcctccctatctttctggggcttgatgacttctaacccaagtaaagcagcattgtcaggatgatctgtccacctcctggaggacatcatctcacttgcctggtccaccaacatttccaagaggttctctccgaatcgtcataaatatgtgggtcttgccatcaccctcggctgcctgcagggtccccagttcagagcccagagcccctccaccctgctcctgtaagcagcagtcctgagactcctgggggagagagttgctggacatggttgaggtcaccaccagagatggacatctattacgacaggggaccagagaaggctgtctctgtcactccatctacgttgccagcaacagccagctgccatctactacgatcatcacttcagtaagaaaatacactttaaccccaaaatgtaggaaaggcaagtcagtgtcagaacaggagaattctgacaatgtacaagctggcccacaatgagaacactccacaagggggggtgaacccgtcttgcctgtgcccatcacaggcccaggactcagcgtggatcagctgcaggggccgcagtcaagcctcagacttcccaacctcccacaccatctctcagtgaggtcccagagcaaggttcccagagaggcgaccgtgccccgggggatgccaggccccacctgggacatccgtgttcatcaggactgggggctcctggcacgtgaaggagccagggaggctgctccacactccagtgcccgggatgcccctccaccccgaggatgactaagtcctcgtgtccccagtgccggagggggatcccggccttgagcctgccttagccacctgcagtctttcaacctcctggagccctcacgcagctgggtatccccaggggccacacagacccccttccccagactcggtcctcacagctgccgccacccatggcatctaggcctagagtgtacccttgaaaactcccccagtcaggggaaaaatgcacagaaagaggcccaaatcctgaagagacagcttcatggagtcagcaaaaggcgccacaccaagcagagggaaggcagggaggccccggggctgctgctcgaagcagaagccatagcagccctcgtggtggccacgacccaagaggacacggccagcgaggacacagccagggggaggctgaggctgctcccgctcccactcccaccacagcggcccaccctcctgtacacagcggcacataaatgcccccggtgggaaacaagccagatgtccagcaatagtccaatggataaaggaaccctggtgtagacagacaacacacccctgtcggcgacggaaatgaacaagtcatgatggctctttcccgtggcagagagtgagagcggccgctgcagatgaccagaagcaagcaacactgtccagggacacacatattaagggagaaaactgagcaaagcaaggaaatgacacgcagaaaacttagcatgattactatcaccgtacttaaactgtgtaacgtttaattcagtgcaggtgtgtcacattctgcacaactaataagaattagagaaaaacagcacaaacctggaagacacaccctgtgggctgcctaggaaacacggaccatcctccccccaaccaaccccgtgaccctaggggggtcccacaactcagttgggttctgacacatactgccaggagtcagcacagaccccacaggtctgcccccaccgcacacaccaaccagctgtaaatcagggttcccagaaccccccttgcctcagggaagcacttacttatgttttccagcgtattacatagtaagggcacaacaaagccaatagacggacagctggccaaagaggcaagggggcagggcacagggcccagaggtaggatttctgccctcacagcaggcggtgtgccaccccgcacacaggtgctttcaccaaccaagactctccctgaggcccacacttcagagacttttatggaggcttcatcacaaatacatgacccatcataaactccacctgcagcccctcttccttctctagaggactggaggggagtgtctgaaagttccaagtttcaaaccatggcctggcctttctggtgccccagtcccacaaagagtcacctcatcagaacaaaagacatcccatctcccaggaaaccccaagggactcagcagcttggggccagaaaccgggggcagaaactaaacaccccaaccaggatgctcccagttacctctgttgcttaggaagctacaaaggttcccggagctctgccacaggagcagggacaggcctccttatctcacaacagcatagggtccaacaacacagtgacagcacagggaacaagggtcacctagatgaaggggcagcattaaggaacccagagaacttttccctatcaattatggtcaggggatcccacgcctaggggacactggggcgtatctgggaacactgtgattatcaagactgggggaggcctggcatcacacaggtggggccagagatgctgctcaacaccccacagtgcccaggacagcccccttcaggactgacccagactgaagtcagcagtgccaagggggagacaccctgactcagggtgtttactaaacttcctatctttagtcttctcaggttttaaaatagaaagtcttacagaataaccaaaagcaccgcaccagacgcgacacatgcttcagtaactgtccctagggcaagaagcggcagccctgcacgcacctcacggcccgaggagccccagacaccctggcaagggctgaaccccaggaaactgcatttctgaggtcagagaccctagaataacagcacttcgtacagttcaatcttaatcccagattatgcccaatttcaaaataccactccacagttaacccttggtgttgcaggggactggttccaaacccccaaagacaccagaatcctcagacactccagtccctcctatacaatgaactgctacatgacgtacacacatccttccgttcactttaactcattgtgagatgacttacaacacctgacccaatgtaagtgctgtgtattcaaatagttgccagtgtgcagcaaattcaagtcttgcttcttggaactttctggaatttttaaaaatatactttcaatcctgttggtgaatgcagaacctatggatacacacagccggactatacacaattaggactgaatttttcaagttcagaaaccagttgagtaggttagacgcaagctcagaccccacacaaaaactgacaactgcaaggtgccacctgatggagtgagctgggacacagacagagaaagtggaacccacttgattgctggcgggggcggggagggggggcggaggtgtgcacccacactcagagggttggtcctcaggagcacttcagggacgtggacagcactcaggaagggctgccaccataacaggggagaccagcacaaaaccttaacagaatctccctcaagttctatttacagaaaaaaactctccaactgatttctgggaagaagtattttatcttttcactttcataaacactgagcttattataaaaagttatgcatataattttaaaaggctgaaagaaaaggttttcccccaaatatgaaaaatactcataagaattcaacattgaaaatcatttggttttttcctagttatacacaagtttcagaagcaaggacactcccaagtgaccttcctcacctgcccacatgacctggtgctgtattaatatacactgaaactcaagcaccccagaaagatgggaatcagcccattatttttcaaacttctttgactcactgtaaaaagcatgttttccatggtaaccccactcacaggcatgcacatgcttactaccccaagcagaagcaaaagtttcacagttactctgccaggggtctggactttctagattcttctttggggagctcacagaagcctgcgttataggcactcaacaagattgggggagggggtagccgtccctcccactttacactagggaactctcccctcactcaaacaggactaagaacctggacttgggtctcacaacgtcacatgctaaattatggtgccattccatccggcttcttttagtcactgccaagcctcacttctatggtgccacaccaggagtttaagctacaatctactgtaaacagtaaactctgagggaaaactacactgctgccagtcttcctaggaatgggggatggtttgggagctaagagtaaccccagagctgcctgctatgctccccaacatctggagccagtcatgaccgaccagatcacggctcttctgatgagggaccctcaaatcctgagccacatcctgtgggaattgcccacaggcttggacagcatctgcgtggaacccaggcaccaccaccatcaaaatgccaaataatgggctccaagcctgaggatcgagccatcagttcctaccaattccaagtgaatagagcacgattcagggcactgcccctgatgacaggcttgcaccctaaaaagcagacgccctaactggaactcgcatttctccagggcaaagaccctcaacccctcctcagaatctcgcaacacactgctcaataacacccactaccagaggggggggtatctggaggtcaaccagcgcagaaaaagaaatctgagggcacaaactccttccacatatttgctttgccatgccctggggtctgaaatgcaggctgaccagctattctttcaaagagaaactaaagatcagaccaagagttcactattgttgtgaccagcagaactggccagagtgtctaacatgatgcaaaacctaggtgcagccaaagaagggaaggtgggcgagttacagaaatgaaccaaaataacctgattacatttcagcgaggtcacacccattctgaaaaagtgcaacagaggcaggaactcaagctctccgaaggaggacagtgcccggggctcttggtgcctgccagcgaattccttaatgtccctgcactttcctctcggctctgctggcttccccggcgccattgtgagggccggccaggtggcacctggtggtgggacctgtccgacagctgctctccatcggggagcctcactctcaggcaaggaaaaggggacttgctccaccttccattgtgtaagtgcaggtttgggtctccctctccggaagccagcggtctggtggtcactaactgtccccattcctcctaaatctaggtcacaggtttcgcggtggcgggagggaagaaaatggtgcccactgttacaacactacttctggaaaaccttttcccctctggctttcgggtgtctagttgaactctgcttccctattccaggactcctaagctgcttccttaattcggcctagaacgtcggctgccccaccccttacccgctaggaggggcggccccaccttctgggggactcgagcccaggaggcaaggccaattccggaccagacaccggggggcaacctggacgtgcgtttatcccagaaggagtttcctccgggggcggcccgccgaagaggagggtcccccaacaaggagtccaaggcctggggcggggcagggggctctgcattttgaacaagagatacagaaacacattcaagatcggagatccgccgctagcgagggtgggaacctgcgaagtctctttccggccacccttggggagcgggagacgggcccccaactccaagaggataaactaaggctcggagaaggaacgggcagagatacggaggtcgaggccgcaggcaggcggggctccagccgggagcagggccgcgggggcgggcggggggccggagtcaggggcagagccgggaacagggtcgggtcggactgggtcagtcagggcgagagtccgagccagggccagggtcggcgcgctgggatcacctcgtcctccttgtggttgcggatgccgcgcaccagatcctgcagattcttgtcgaacatgcggtcgatgctgcccttgaccatcttgagggccatcgcggcggccgccgctgggctcgagccccgggaggcccacggccgaccgccctgagggagcccagcggccgcgcttgccgcccgcggagcgctgtgctgccggccgccgcggcggggcggactcccaggccaggtcggcggcggctgacggggcggcggcggcagcgacccgctcggcaggccgcgctccccaccactccggctccgcgccgcgccgcttgcaaatggcggacaagatggcggccggtcagctgacggcgggagccccggcccggcggcccgcccccggaagccccgcctccctataggccgtgactctgccgcgtttccctgacgacgccaggccgtccaatggaaaagcagacaacggcctccgggcggcccagccacgccccctgcgtgtcagcgctcttccccctcataggtcagtgacctccggaactccacctacttccccgttccggaatgttaccacgccctctacgcgcgccttcttgccccgcccctaaactctgtgacagatgtgggcggggcccccacgtggagcttcttgaagaggttccctgagaagaacctagctccgccctttctgattctaaaagctgacgttgtcagagaacctccaaatgccgctctgcggtggactggtctcgtatgtcctgcaagtgtcacaaaattctgtgatatggggagtatataatatgcgcagaaagattgaaggcaggaggagaagggcaatgaagtatgaaacggttggaaggcatcatcaactcaatggacatgactgaggaaactgggagatgatgaaggacag

SEQ ID NO: 49 - DNA, 33127 bp, Hippotragus equinus
  source 1..33127: mol_type = genomic DNA
tctgattttgtcactaatggactgggtctttggctttgcatttctggcctcacccagggggagaatggtgcctggctggtgagagatgtctggaaaacacaggagcagtggctgcaatatgttcccaatattctaattactgatgacatttactcagcagcagttgtgggacagggaacagaaagttctgtgggcttgcagcctagatgacagaacacaaaagagcaactgggagattctctctctcttgctttgctaaggtataagaaacaatactatttcagctttacaagaagaacagcaagagtgatgatctctcattttatagacaagtgaatagaagcccagagaaatgcacttttcccaatgcacagaatcgtgtccccagcctagcctggagcacccatcatttttctgcatgtgtgttctctgcccgggtagttccagctctgtccgatctcgggtctgatgtttgcgtccttcattccatgctggttgtgtcactgcaggcgcaatgtgggtctccagtggagaaagttccttggaaaggagtcttgagacatttgaaagacagaagactgtaagtagacaagcgggtcagggtggggggtggccccacctgtgctggcccttgagccccactgtcctcacctccaaggacagagataaatggtggttatcagggctaaggaaactgcttcccattgttcagtcacataacctctctctagactctcttgtgtacaacaggccttgttattattattttttaaattatcttgtaccactactgtttgtagtttcttctttcttgtttatggtaattcctttgggaagagctctagttctgggggacactggcaggtgaaacctcagcttgtctaccttttctactggcagggatgccctcggccaagcagggcaagtaggtgctatcactgagagcccttgcctttcaaagtgctgggagttttcatgtgaccgcccccactctggctggtcctttttcacagaccttgttcatgcctttagtgcttctctccccaaaacagcacctcccagggtcctttcaaagataagatgcttcatctcagtttttcatagactcagaatctctaaggatggggctgtaggtgacagtttgggacacttgaggagacaggcccctgataacccaggacaaaaactgctgcctagttaccatgccaggctcactgcccccttcctagttgacagagctagggtaaggagtgaggaaaagtccaggctttcagaattaaaaacggctggaaccactggttggcgttcttttagcctgggagtgggagaaacatattttctctttcttgggaacttgaattatgaatggtcccatgcaagaactgaagtgtctggaggtaacttgccctgaaaacactgtccattggtttctttgacctggctcctttcatgtccttcagggtcctatcctttctgaggcttgtcacatggcttatcctttgattctctgaggcccccagaaatctctagtagactgccctctatctcccccactcctttgtttctcaggctaacctttttggtggagcctcctaagactgtaggatcctcaggccagagccttctggccgctggacccacagcaatgtccagtcacaatcagacaccccagcttgtattcacagacccagaccccttagggcagacagcacagtgagactgggtatggagctgtagtcattttgtttttgtggaggtgaggggagatccttagaaggggggtagggtgaaagactgaatgtgtgctcaattgtgtccgactgtgacccccatggcctgtcgcctgccaggcccctttgtataccagacaagaataccggagcgggttgccatttcctactcctactccagggaatcatcttccctaccagggaccatcaaatcgacgtctcttgtgcctcctgcattggcaggggagctcttcaccacagcgccgcctgggaggcccagcagttccttaacggttgctttctccctccctgattttggaggcagcttcgggtgtcccgggtcagacggtaaagcgtctgtctgcaatgcaggagagccgggtttgattcctgggttgggaagatcccctggagaaggaaatggcagcccactccagtattcttgcctggaaaatcccacagatggcggagcctggtaggctactgtccatggggtcacaaagagtcggacacgactgagcgacttcacttcgggtgtccctagggttaaaggtagggggcagcactgtctctggcggccagatccagaaaagcgcttaccaggagtgcagcctcagggctaagcaaccgcgtttccccaggcccgggagacagcaggtgcgcagctcgaggaacttctgtggtgcaggggactaggcgaagggaaaagaatagttcgggttccttacagaaacagccacacattttcgagaagactatatgtatttggattttagcccaacccttgcggagacttcctgaagccccgccccaacgtcaatagccacgcccactccgttctcggaagcccctcctaccagagctctcccgccccagaaagaccccagggtcccgggagccccgccccgccaccctgaggcgtgctcagcaggtggggttgagcacgcggcaggagcaggcgctgcggaaaaagcggcactggcagaaggcgcacgggtcgcagcaggcgggcgctggaggcttgcagctatcgcgggtggccacgcagggggtaggcggcgggggccgggtccgtgccacgttcttcatcggcgcctttctctgtggggaaacgccggggctccctgagccatccacgtccgccccactcgtcctcacccctgcctgggaactcctcggactagacttccccacctgctgtccaccgcccgctcgactcacgtccacagagcactctagcgggtccctgccatcaacacttaactggctcgggcctggcctcttctcttcctacgggatcccactcagctgcacggtttttaacttccatctctgttgtcttccccttccagtgtatccgcaatccctgttggttctgccttcagggtaggttcggagtctagccactttttcactaccgctgaaacccttgggcttggccactgtctgctgcccttgccccctttctgtccagtctccagcgcacaagggactaagcacatcctcccccttactgggatccctgacgccctctgtggtttggcccgcctaccactcccacgggtcttaaacacactgctccacccgcccgccctctgtgcaccgaacacagcaaatgagttcttgttgcaggcgctttgttttggggcttcctttcctgggaacattctttgctatgctgtccagtgcaggcagccacccaccatctgtggctgctgagtactttaaaggtgtctagtgcaactgaggaaccgagttttcaattttaattttaattaaaatttaaagaggaagtaaaatgtttcccattaaagacaaccacgtcaagtctgtatgttgtcaccctgcttatttaacttatatgcagagtacatcatgaaagacgctgggctggaagaagcacaagctggaatctagattgccaggagaaaataccaataacctcagatatgcagatgacaccacccttatggcagaaagtgaagaggaactaaaaagcctcttgatgaaagtgaaagaggagagtgaaaaagttggcttaaagctcaacattcagaaaatgaagatcagggcatccggtcccatcacttcatgggaaatagatggggaaacagtggaaacagtgtcagactttattttttggggctccaaaatcactgcagatggtaacttcagccatgaaattaaaagacacttactctttggaaggaaagttatgaccaacctagatagcatattcaaaagcagagacattactttgccaacaaaggtctgtctagtcaaggctatggtttttccagtggtcatgtatggatgtgagagttggactatgaagaaagctgagcaccaaagaattgatgcttttgaactgtggtgttggagaagactcttgagagtcccttggactgcaaggagatccaaccagtccattctaaaagagatcagccctgggtgttctttggaaggactgatgctaaaggtgaaaaactccaatacttcggccacctgatgcgaagagttgactcattggaaaagactctgatgctgggagggattgggggcaggaggagaaggggacgacagaggatgagatggctggatggcatcactgactcgatggacatgagtttgggtgaactctgggagttggtgatggacaagaaggcctggaatgctacaattcatggagttgcaaagagtcggacacaactgagcaactgaactgaacattgtttttttaggactgtatttcactagtgttaaaaactaggcattggaattgagagtgtaaaagtcaaagacttagagcaaaaaaagtaaaatattaataactttttattttggttacatattaaaatgataatatttgggatctactgggttaaataaaatattaatattaattgcacctggtttttttttttcctcttaaaaatctgactactagaattttaatttatatgtgtctcacactgcatttccattgaacactgcggctcaagattacagagtttctcagtcttttaagtgctgcctccttctagagaacttcccctgaccacttttccctttcttctgtctcactgccatgctttcattccttcacagtgtttatcattatctaaacagcactggttaacatgctgttctgtttctcccagaagagtgtaaactccacgagagcagttatagtctcccagaagagtgtaaactccacgagagcagttatatatctctcttgttcactactatattcccagaatttatgtaaatagattttacagttctgtcaatcatctgatctgcttgttcactttacaaaggctcaaagagaacagggaactttattgtgatcacagtgccaggtcatgccttccaatgccttgtacagtattcccggctctgtttgcaatgatctgatcaaatgaggcacactaaaataggaacactgtgcatttccacagtgccttaatctagtatttcttgaacctgtatcatggtggtacaattttaggcagtacatgaatattaaatgacactgaatcacacagtgagagaggattcttttttcagtctctttcaaatggaaaggctcagtttgatgtcaatatatccttagtgtttccccaacactttctaatccttctttgttaatgcagagagcaagtctcagatttagaacttgtggcaagcaacaccaaccagctagaatttgctaacaaggttttattttcattttactattttcatggttacttcctatttatgccaagtgatactggttttctatcatgattatatagttttttttggtttgtttttggctgtccagagtccttgttgcttcgagggcttttctctagttgtggttagtggaggctactctctagttgcagtgtttgggcctctcactgcagtggcttctcttgttgccttgcatgggctctagggcgcacaggcttcagtagttagttgcagctccctggctctagagtataggttcaatagttgcagcgcacaggcctagttgctctgaggcatgtggtggtctttccgacccaaggatccaacccatgttttctgcattggcaggaggattctttgccacagagccaccagggaagtcctgttacatagtatttttgtttttaagttttaaacaaatattaaataagtggaactcagatgtggtaaaagttgtagaaatggttctgaaatgactgaggtttgggaaacatcgcgttcatccaaaagaatgaatgacagtggaatttcaggcagggttcgagctagtttagaaagtttgagctagttattttaggcagggttcaagctagtttagtttgctgctgctgctaagtcgcttcactcatgtctgactctgtgcaaccccatagacggtagcccatgaggctcctccgtccctaggattctccaggcaagaacactggaatgggttgccatttccttctccagtttagtttaggtaagcaattttactcagcatcctggacctcagctcttggcggtctgcctcagggatcgaggtcaggaaggttttggtagctttcagtttctctggggcatgcaaccctggaaatctttcatttagtttctggccagagcttggatgtcctccccctttaagcccagccccatcccgacaatgtgaactcccagccctaccttggaaggtcttttcttcttttccgcttcatttctgctgatcttcttggatttcttgttcagtgcttcaaagagagacagaaggaacaaagccattttctgagggtccttaactgcagtgaagagggaacagagagggctctaggaagccccagggttggggagaggatgaaggtttggttggatagatcatatcttgggacttaggccagcagcttctgcagcctggctgcagacctggagccagagactgacagcaaagagtcctctgaaggaaagcgaaagggaaaatccaagaaggccctggaaaatggactcagtatctctacaaggatggtcttgtgtttctggtattcctatttcctatttctcagagctttggagccaggcagacctgatttgaatcctgactctggcacataacagctttgtggtcttggacaacctacttaatctccttaagactcaattttctcatatgcaagtaggtactgtaatacctaccttgaagagttgtgaggataaatgaggtatgtttatatagtggaaaatctgacacagatcaatgttaatgtgctccagtcccttcccatatatctagaatatcctctttttgaagtgagaggcaagtcagtaaggaatattagttttgagcttagattctggagttaaacagaacctaacccagaacctgggtgtgtattcagttcagttcagtcgctcagtcatgtcttactctttgcgacccatggaccatctctgccaatcacaaactgtatgttagttacttaatttttctaacttttaatttacttagctgtgaaataaaataggaataaaaatagtattcacttcagagtgcctatcagaaaataaatatatatgttattataattattgtcagatgaatttgaaccagaaattctccaatgctaggctctaatacccctgatattttcctctgagcagtcattttcaattctcagccctggcatgaaagaactactttctcccagacttgattatattctgcagcattttctaaatattttaccattgataggagttacgtgatttagtaagtttcagaaacgccaagttaaaccaaattcaccaagtgtcttgactttatggtttctcagagcctctatcatgctaagctgcatattagattggtgagaggcagagctttcttaaccaaacgagttaagggacacttgattcctccagaattgttctgaggaatgagcacaaaggagctctgagcgatagcaatggatcctgatatcggcttgaggagtgtttgaccccctgtagccccttctcatgggccagagcccagaggctgggccccaagccaggctacttacccacgatagagacagaagggaaatccaacaggttcatggaagagttgttcttcaggttcctttcatctctgggcttttcctcaggtgccaggtggctgtaggcagtgaggaagcacaggcacaccagcaaggtagccaggaggaggcggctgacatccatcccaggaggcttgagagtgacagagaaggcagtcaggtgggccaggggtctggcaaatgcatgtgccctcctgctttgtttctttgggcttgtgctctgacccccatcccacagcccagtgtcccagtggagctggaggaccagcaaggcttaggacagggaaggagaactcatgaaggaaaaagagaggaaaggagagatgggagaggaagaaagacaaggaagggagggagattgcaaagagaaaaagaatgcattgcaattggtctctaccttccaaagggtggggtgctgtttttctttcattttatgtcggtagctccaggagatccaaggcctaagcagaattgttgacaggtccccagtaatgcctcacagtggcagaggtcttactaaagtaccgagaataaagctcatgagttaagactcaagagaaggtgcatggataaatggctcctttagacaaatgtgtatgtcattgcatatgctatattctgacatccagaggaaatgaatgcaggtatgttttgtgtcagaaggataggatggacctgttcacataggctagctagatttattgatttattgctagctgggttttgatgaagaaaacagatcccagagtggatttcttcccacaaatgtctgtctgtctcaatcagggctcacagtttcagcatcatcttaccgtctctgaatgtgggacccccactcctcacccaccctgtgcatgttcttgctatcgtatctggacttattagttaggtggcgctagaggtgaagaacctgcctgccagtgtaggagatgcagaggcttgggtcaggaagatcccctggaggagggcatggcaacccaccccagtattcttgcctggagaagcccatggaaagaggagcctggaggactccagtccatagggtttcaaacagtcagacatgactgaagtgacttagcatgcacttgaggcaatatattccctttattttcttaagattttttttttatgtgaatcattgttaaagcctttatttgtaataatattgcttctgtttaatgttttggttttgggctgggagcatgtaagatcttagctcaaactcacaccccttgcattggaagggggagtctcaaccactggaccaccagggaagtgccccctttattgtgtgtatgtgtggagttttctgttactctcaactcaggacattctaaaggatattttcccttgcaaatagtcctgttgttacattttcaggtgtttaacgttagactcgaaagcaaaaatcgcagagtacagtttctccagctggcaaatgatggaattttttttttttaatttcacactggaataagtaattggcttgcttctagggatcatattgtataaaaaaaatctttttctttgaacaccaggatcaccatcagcataatgaaatgttcatactatgagaggtgtccaggaactgagaccagctgaaggaaaagcatatccgcagctcccaattctggagtggctgtctccttattgcacagcaggggctctctggataggagattgatcagaatcgcctgcatatttatttagttttaaaatgcatttattttggctgtgctgggtttttgttgccgcacacaggctttctctaacttcgtgagcaggggctactcttccatgtggtgtgcaggcttctcgttgcagtggcttctcttgttgcagaacacatgctctaggcatgtgggctcaggggtggtggtgcctgggcttagtggctccatggcatgtagaatcttcctggaccagggatcaaacccatgtgccctgcattggcaggtggattcctatccactgtgccagaagggaagtcctcgcctcgcctcacctgcatatttaaattgcttctctccactctctcacccactcactaagtacatatggttgacattgcataagttaactgcgagcatgatctggcttcactgtgctttctatctttgtccaatcaccaccccccacagtcaagaatgttggttttaatttttgactctttcttccctgatctttacatctgatctcttaccaaatttgactttatgctctctttaaataatcttatattttccacttcttcttcactccagcccataccttcttttcagtggaaccagttacactactcctccatcaggaggcctttgctctggcttcaacaacattatccactctgctgctgctgctgctgctgctaaatcacttcagtcgtgtccaactctgtgcgaccccatggatggcagcccaccaggttcccgtgtccctgggattctccaggcaagaacactggagtgggttgccatttccttctccaatagctcccccaatcacattttatccttccttcagggcccagctcaatgccagcattggcacatttctctctcagtttcaggttagccccaatagttctctcctttttctgaactcttccgggtcttaaacttaataccatatcgtttagtacttcattgttcttttaagtgttcatgtgggtcatctcatcagttagacttggttctttgtttcaagagcctcatggttgccttccagctgctgtagctctgctgtcatacccacctattccagtttgcctctctgcctgttttagatgccacttgaattctaaattcttggccaaccaaaaggttcttctagcccagttcagtctaactagagccatcagcgttgcctgggatggctagttggttaggactgaggaaaactatatttgaacgatttcctccattccttccttctcaactcctgggccgtctcttcctcgtaggactcccttctctctctgatgctgctgctgggctcttaacttggagagcagtttccttctctcttgttccccacatccaatcaatcagtcatttgagttctagtgatttttattcctcccatttctcacaaccatttctccctccctttccattccttcggtccctagtggtctagttcctcccacttggtcttccataacagcctcctcattggccttgactctagaacatatcaccagattaagcttccttttaaataacgtcccatttccatgcattcatgcattcatacatacatattcattcatctcgttgatagggacagataaagggacaaaaggcttccctggtagctcagctgataaagaatctgcctacaatgcaggagaccccagtttgattcctgggctggggatattcactagagaagggatagtccacccactccagtattcttggggttccctggtggctcagctggtaaagaatccacctgcaatgtagacctgggtttgatccctggattgggaagatctggagaagggaatgtctacctactccagtattctgacctggagaatcccaagcactgtatagtccatggagtcgcaaagagtcagacacgactgagcaactttcacaaagggacaaaacaggtcattaaatagttaatcccactaggggattgtaagtagaaaaaatatgggagacccttgtattactcagattaaaaaaatcaattactcagataaaaaaaaaattaggtttgcttaaccacaaaaccaagcaggcttgcttagcaacaaaaccatacaacagaagtatgagacatgcccacaaacaattaaaaaatggtggcatgagacatcttgtccagtgagctcaataagttaatgattccctaggacatgctctctgcacacataaaaaacaataatttgtggacctagcttggccacatagaacaagaaaattctcttgttcaacctagaggaggagatgatgatggaaggatgatgtctattcaagaaaaataaatttcttctccccctctctacttttactttgattataaaactgcaacccactaaattcttggggtatggcaccctgtcaccccctggcttgtaagcctcacaagcatcctattcaaataaatcatttcttaatctatcacttttcctcttcctgaattctttctgcactgaaacataaaggactgtggtacgagagctcttcagaacccccccaaatgaccccaaatgctttcatagtgaaaagtattagttaagtacctactataaaccagtgctatgctagatttttgggttacaatagtgatcaaaatacaaaatgatgcctgtccttacagaccttagatctatcagggatggctgacaagttaaataagttattctaataaagcttttgccacaggaaacctcagctagtgcatagacttggggaagttctcagagccagctgcattgaaactgagaacagagggctgatttggatttatccatgctggagaagagagtgaaggtggtgatggcagtgttccagacgctgagagtggtgtacaagcatgaaaatctaaaggcaagagaggatggtgcatttaaggaactagaaaagatcagtaaataaataaatataaatataacaggaggtggaggcaggggccagatcatgacaggacttttaaaccatggtgaggaatttggacaatatcttcaagacaatggaaaatgaatgaagagttttgaataggagagacttaatcagatttgcattgtagaaagattccttggactggggtgtgaagatggaggggacaagactgagaggaggaaaaccaattaagaggctgctactggattccaggcaatgtcattcctctagaggggtcatcctgattaccaaatgaaatacatactacatagcctcagaaaaggaccagagccctccccaagctaccttccacattccttcccagttttatcttttctaataggaagtatataccctagccaagcttagctacctcctggtcccaatacaaagctccccctttaccatttctcacgcctgaccacttctgacctaagcatagtacttagcttgttacacaagcatttatttacttatcactgaagctgaatctgtggcctctagtgactgcagtattcatttggtctttccatattttgtatagcatttgtgtggtcttcaagctaagaatggttttgacatttgtaaagtgttctattaaaaaataaaaaacaacggggaattccgtgatagtccagtggctaggactctgtgatttcactgctgaaggccagggttaagtccctggttggggaactaagatcctgcaagcttcgaggagtggccaaacaacaactagagaccctatgtggtccataaaacatagaatatttagtatctaacctttcacagaaaatgtttgctgatcctatctagaatgtgagactcacaaggggctgttaagcaagcatgaaaaatctcgcatgacacaaagatcccatgtgctgcaactaagacctgacacaaataaacaaataaatatttaaaaagtaatactgagaattcctgcactgaagtgaaaggagagttgggaaatgtgagttagaaaagaagtgactggagtttgggggagattaactgagacccaatgtgcatcacttcctctgaacacctgataatgcaggaattatcaccagcacagcaaccagcagttctaatatactagccactgcaaacaggcaggaaggagaagtcaccaggtaccatctctagactaatttaggttatagtgaattccaaggtttaatttttttaagtttcctttgttgtataagcaactcttaaggaataaactgaaaatacagtttcttttatagttacagaatctataaaactagactgagcctgggaaggatgaagtctcagtgaaattaatcttatttgtgtattaggagagggtaagaaccaatatttcttaaaccaatcctgtaagagactgtatattctaaatataatatacatccacaatacctagatgtattacgatccttggggtcagattttctttttttttaaattcaggattttgtggattttagaaaaacagtatcttctgtataccatattaaaccacatatacggggtctagaagcacccattacaaatatattaaaggtgtgaatatacaaaggataaacaaagactgagaattgatttgcatcagttcaggacagattttgttgccaaatgagttagcaaagggaaaaaaaaaaaagttttcagagttgggggactttgccatttcaggtaatgggttgggaacctatacaaagccttggtgctattactcctcagcaggggacacacactccatctgctaatacaggatcataacgctgacagcagtgacctgcgtaattgcttttcttaacagtaacctgtccttccactccgtagtagtgaagaatgttctctgatcagtggtgtcactgatggcaattcttcgtcttaaactcatcatctgctttaagttactgcttaggacttaagatgagtttctcttcagtatgtggatataaagaatccagaaaggggagtgaggtttcatggatatacctgccatttaagagactgtgtgcaccctcagctcacctgggcctctgctttctcatctgtgaaatgagaggagagaactatacaatccagtacacattacaaggcacagagtacaacttgaatacagatttgtttaatggatgaaagaatggaaagacctattttaacattctatgaatccataatttctgattcccgcttcctgaactttggggaggttaagtagtcgcacaaagaaggattttgtaaaggccacttgtgtacccttaagagctgaggcatttataaatgtattagtgtgactgaatctgattaaagtctgaaaaagagggcatgaaaagtcatggctaaatgtgagtggtttatacacctcaggagtgttgatctgtgtttgtgcgtgtgtgtgtgcacgcacttgagtactaatgcgtaagggttgattgaggggctatgggagacagcagtgtccagagcacctctgtaaggtagagagatggtgtatcagtattcagtgggcactgagtgtacaccacagacatccccttagctatgacactggggataagctgccaccttcatcctttaggtcaaggccttggtccccaaaggaaaggaaagagttgtaatgtcccagtgatcggggatggctaaccacctattgggacagaggtatagtgaaagatgagaaatgaagaagaggtgaaggcagcagaatcttcttgaagactgcaaacaatattagctgctgacctaactaggtgtttatgagctgaagtcctgacagcctgctctgggctgtgctggtggcacctgggaggggagccaggattttttttttagatgcttcctgcatggtttgtcttctcagtcattgtccataggactctgagaagctgtaggaacatgcaggtgcagatgcaatgcctggcttcacctccaacattgtggaaagggattgcacatcacgggacagagccctatgctcccgtacaccacttagagcctggggagagtgacctcctggggtatccacactggatgtatttgaatttttttataagcatgttatcactttgtaataagaaacactttgatgctttcaagcatgttatcactttgtaataagaaacactttgatgctttcacactgtggtgttggagaaggctgttgagagtcccgtggacagcaaggagatcaaaccagttaatcctaaatgaaatcaatcctgaatattcattggaaggactgatgctgaagctccaataatttggccacctgatgcaaacaaccgattcactggaaaagaccctgatgttgggaaagactgaaggcaaaaggaaaagggggtgacagaggatgagatggttggatggcatcatcaactcaatggacatgaatttgagcaaactttgggagatggtgaaggacagggaagcttggcgtgctgcagcccatggttgcaaagaattgaacacaattgagtgactgaacaacaacaacaagaaacaataaaggaggatagaaataaaatattagaagctgtttgacacaacaccaaaggattttaagaagctggacagagagttatatttgttatgtgatagtgagcctggggaattttcaagaccctcctccccttttgtaccttaaattcagcatgcgatttgctctcagtacctactgtggctgtcagtaaaatgtggggctttctcatggcatatcctcctattacctggggctcttgctctgccctggaatgttctcaaagcctgttactcttctggctcatagccacagtttctgatgtgccaaaagctgggagaagcaacacttaatttttgttgtggtttagtttctcagccaaactagctgtaccaaatactgagggtctggaccagaggagtaatatctctcattcatagttacctagattcctcacaccagatgttcagcagctgcagaaggatcccgctgccttacacatgtttcatccacctgggcagttggtgatatgcctggctgggtattacatgggaggctccaatggggctactgacccattccttaatgttgacccaggcttattagtgatgaaaatttctggggtagcaggagagtgacaatatgctttacctacttagttaacacgaagaacagccaatcaagcaacaaatactttttgaatgccatgggactcgatatgaatccctgtcacttctctccagggaagttaagtagtttctcctccctagacacactgtattgtaataatttgtttatctgtctgtctcttctaggctgaagactcattaagggcagagcctttgccttactcatctccatgcccattgcttccctactacccctagccctaatgcctaagctcagcacaaaataagccctcaatgaatatttctctcaattgagtcaatttactatatgctcaatataaatgaatatgggaattccctgtcagttcagtggttaagactcagtgctttcactgccataggcctgggttcgatccctggtaaggggaactaggatcctgaaagcttgcatggtgcagccaaaaaaaagatgaataaagggtccctagaaaaacaagtccctgactttagatggcaaacaaacaaataactaacaaaaaaaggaggagagaagtgctagagttgaggtacaagtgaaacaaatgcctcaggtaggcagaaaaaagagtgtggttaaactgctcagggtcttgagtgatttcaaggattattgttggcttctgctttcctcagcctccttccaattttgggctgtagctcctggagtgctcagacattctgtgctgctcttgccagttcttccctctttctcatggttctatttagtaaacagcctctgctgtcctttccctttggcatctccttgaatttcctgccctagagggaggcttccttttaaagccgtcaggccactggtagccaaatgtgcactgccaaagccaattactgagatttccatcttattttaatcaattatttggctagagctttaaaaaaaaaatccttattagagtacagttgctttacaatgttgtgttatttaggttggtgcaaagtaaccgcagttttgcattgtcaaactgtgctgttttaatattggaatacattcttaaataaatgtgatcatgttacatatcattttaatgcacacttcttgctttttttttagctaatgacttattacttgctgtttattttatttttattttagactagggaaatgatgtctagataaaaagtaagttcaagcaatgttcttattcgagttcaaaatggtgcgtaaagcagcagagacaacttgcaacatcaacagggcttttggcacaggaaccgttggcgaatgtacagtgcagtggtggttcaagaagttttgcaaaggagacaaaagccttgaagatgaggagtgcagtggctggccatcagaagttgacaacgacaagtgagagccatcattgaagctgatcctcttactacaggagaagttgctgaagaactcaacatcaactgttttacggtcgttcagaatttgaagcaaattggaaatgtgaaaaagcgctataagtgggtgtctcatgaactgaccgaaaattttaaaaatcgtcattttgaagtgtcatcttctcttattttatgcaacaataatgaaccatttattgattgggttgtgctgtgtgacaaaaagtggatttgacatgacaactggcaacgaccagttcagtggttggactgaggagaagctccaaagcacttcccaaagccaagcttgcaccaaaaaaaggtcatggccactgcttggagatctgctgcctatccgatccactacagctttctgaatcccagcaaagtcattacatctgagaaatatactcagccaatcgatgagacgtatggaaaactgcaatgcctgcagtcagcatgatacagaaagggcccaattcttctccaccacaatgccctaccacacattgtacaaccaatgcttcaaaagttgaacgaattttggtttcttccaggtttaggcctagtagtgggattgcagggtcatatggtggttttatccctagctttttaaaggaaactcaatccaggtctctataacaacctagaggggtgggatggggaggaaggcgggagggaggttcaaaaaggagggaacatatgtataccaatggctgattcatgttaacatttggtagaaaccaacacaattctgtaaagcaattatccttcaattaaaaaataaataaatattaaaaaaaaagaaaacgttgaatacattgggctacaagttttgcctcatccgccatattcacctgacctcttgccaactatcacttcttcaagtatctggacaactttttgcagggaaaaggcttctacaacaagcaggaagcagaaaatgctttctaagaatttgtcgaaccccaacggttagattttttatggtacaagaataaactttctcactgacaaaaactgtgttacttgtaatcatcctgattttgattaataaagatatagttataatgatttaaaattaatggtccaaaattgaaattgctttctcaccaacataaatggtttctactgtacagcaaatggaagcagccctacatatacatatatcccctctttttttgatttccttcctactcaggtcatcacagagcactcagtagggttctctgagttatacagtaggttctcattagttatctattttatacatagtcaaaatatatatcatatatatcaatcccaatctcccagttcatcctactcccccttcctccccttgttgtacatgggtttgttctccatgtctgtgcctctatttctgttttgcaaataagatcatctataccatttttctagattccacatatatgcattaatatgtgatgtttggttttctctttctgacttacttcacgctatacgacagtctctaggtttatccatgtctctacaaatgacccaattttgttcctttttaagggctgagtaatattccattgtatatatgtcctgcatctactttatccattcctctgctgatggacatttaggttgcttagagcttttcttaagaagccaaatcacatagtgagaagatcattaggtcctgcacatccaaactaggttggtggcctggggttgtgggaagtagtcagtgatctgagtcaggagtacaggtgccaagttcctgatcctcttccaagggatagttctaggcatttcattacaatctcataacaaaatggggagaccattttctttctcatttctatctcatgaggtataagttaccagttcgctgcctaatttgtggggttctgtgcaaaatgaaaatgtgaaaccacttgctaaaaagttaagaatttcaaggaacaccttaaactaagaaagcatgaggccctctaagcataaggccctatgcaactgctcacatgaatactcatgaagccatttctggttataagaatgagaaagctgatactactagtgtgacatggtggctataaagaagtttctgagaaaaaaataaagtttgtggattaggggaaacattaaattacactcaatagtttcagcaataagttatataaggataagattgcttctagacattccctgcagctgtctgtgctccaggcatgagacatcttaatggagcagaggccaaaaatggacctaggttctaggcccagccctgccaggaattcactgtgggacttctggaaagttactttctctctatgggcactttttcttcacctgtacaaaaaaggatttgaattagatggtcaggtctcttctaactctaactgtaagcatctatggaggaggccccttttgtcttgtcactttagcaaagctatactgtaactaaccttaagccaggcaccttcaccaccatgctctactcatcacctgcccaagcacacttttcacatcttttgatcacataatatcttgcctaatctattggttctttctgtagatcaaaacactagaaatgaagaataagtaattaacagatgaccagatctctttcctagtcttcccttcagtaatctcacaaacaaattatatgaacaagatattatctaaagaaatatcacaagtagtcaacaagcctgcacacaggtaatatggcaataagtgtggtcccctatctcaatgattaacagataatgcccccttttcccttaaaaaactaccatggcctagcagaatcttcagagttggtttttgaggacatgagtccaccttctccctagaaagctggctttctgattaaaagcaacattttctatttctaccaacacttgcctctcaaatattaatttttgagcaacaagcaaccagacctgagttcagtaacataacctgctgtgattccatatgagcagcatccccttcagagaggctgcaacactctgttgaatattccttttgatggtaagaatttgccctctgaaaataaatctgattacaggaagcagacaatagccaagtctagtaaggatagtaatatatggcctaaatcaggagaatttataattaaaaaacaattttcattttaagctgacacattggaaggactgatgctgaagctgaaactccaatactttggccacttgatgtgaagaactgactcattggaaaagaccctgatgctaggaaaggttgaaggcaggagaaggggacgacagaggatgagatggttcaatggcatcactgatttaatggacatgagtttgaggcctggcgtgcagcagtccatggggttgcaaagagtcagacacaactgagcaactgaactgaagttgacacaaccagaattaagatagcctgttacgtgtttttactcaaaattgtaattctgagaggccataaattcattctaatgctgcaagttgcttaaaatatctttagaattctagacattctaaaggcaatttaaaagttacacaagaaaaagcaccatataatttaataatcacaacttttatcttggaatggaaacctgtttcaaataaggaccagatatgcaccccaaaaataatcaagatccttaaagaagtctccttttaaattggtcttctattttgaaaaacatatttagaagagtgtataaaatattaaacttactaggttttagaattaatgagaagagggaaattccctggtggcccagtggctaggactctgcgctatcactgatgaatgcaagtgttcaatccctggttggggaactaaaatcccacaagctgcgtggcatggtggaaaaaaaaaaaaaaagaattaatgagaagaaaattaaacaggcagggctttccaggtggcgctagtggtaaagaaccccaggagactcagcagacttgggtttgatccctgggttgggaagatcccctggaagaagacatggcaacccactccagtattcttgcctggagaatcccatggacagacaaacctggcaggctgcagtccatagggttgaaaagagtcagacacgactgaagtgacttagcatgcagcacacacaaaagagtcagaaaaggaaagttcagaagagaaagttaagtagggaggaaaagttgaagaaatataaaaactatggggattggaacaagagggtaagtgaaactctaactttatctgtaattttttttggaaggatggagtcctcaccacttgacctccagggagttccctctgtaatttgttttaaataaaaaagacttgaagcaaatatagtaataaatatggatgactctgggtggagggtacatgaaattttccatgtttaaaaatattctcacaatactgaaaaaaaaaaaaaggaagagataaattgtactgtggtctggtctctctctgtatctggtagatcacagccctttgagacgctgattagattcagagctcttaggtcttaaactttctagagagtagggcaattatttataaccaagccgagatgttgattttgtttctctctgaatgggctgtttctctttaaaaagaataaagcatggctcatccaactcacaagaccagggttgtgacttagtgttgtctatccctaagaggactccaacttgcccaggtcgggagagaagagaaggaaggaaaagttagcaccatcagcatcaatgagaatcagtcattgtcagatatgggtttatgcttgacttccagcttttctctctacaaccttgggtgaaaaatagggagcaagttatgggcagagttgtggacttgtaccttctaatctgaaaacaagggcttcattccccttgtttattttatgctatttctttcatttttggctatgccacatggcttgtgggatttttagtttcctgaccaaggattgaacccaagccctcgggactgacagcagtttcctaaccactgaattgccagggaattcccctattcaccttgtttagaatgtcatggccattcgtcatctccttctccaaatcctatacttcccttcggaagcctgtttaagtcttagcctcctccaggcccgttgcactagcctgtttctgggttcttgccttcagccaagcaagatggcgccctctacttggggactgcctggattgtcctcttttaagatttctatggaaagccagtcccaccctatgttgctctgaatccctctacctgctgatccaggcctcagggtccacaatcaatggtgtctccagttaatgttttccttcaaacaacctctgtcagctagtctgaattctgtgtgaaaacagagagggataattcacaaaacagaatttaagccacattcttcctcaaaatatcttcccttaactagtcagattccatagcatgtcttatgggctataaggatcaagtgcaaacgctctcggtcatggttaagttggtagcaactaatactactggattagttttctactttcctatctaagggcagacctctgaagaaaggaaagaagaagcaaagaaagaagggtttgagagagttttggggcactgtgttaggagggtagattctgctgagggtgagtgtgagaaagaaacttatgaaaagcacctggagagccttggtcacaaatttggctcacttctcaagattgcctcttgtgagcagttgaagaaaggtactttagggactgagccccaccttctgagggatccttttaatctgcctcatctagacacgcggggcagacaaaatattagaaagacaaggccaactgagcatgaggaattcactaatttctgaagttgtttgctcttgttctctgtctttggttaactgagttaccaaagctagggtagctttgattagcaattcagcagagattctgaacctctgggactgttgcctggataactgtaaatgtctcttaattaacatcctgtcttcattcttgtcctgtttcatccatttccaaaatagtagagatttttttttttgaggggtagggagagggggaattaaaatcacatatcatcccctgcttaaagactttaatagtttcccactgctctttaaataaaatcacaaattcttgtaaggccctgttgttactcactctgacctcatctgatagactctcccactcaattactaggttttagacatattgtgctccttctaccttggccctaatgttcattccttggtcttgaacttgattcttttagttcttcacctggctggattattggcaatctttggatctctgtacaaatattgtttgtacaaatggtggtcctcctttgaccactctatctaaaaagtgtccttccttggtatttatctgtctcatcatcctatttctttcatagcacttacccacaatgtaacaattaataattgttaataataatatttattttgtatgggctttccttttcttgtagaatttaaactccctgagggcagggaccttgctatcatattcgttttgttgctcccactacccagcagtagttggcacaaagcaaggcactcaaaaaatatttggtaaatgaatgaagagaaaagaaaaacagcaacagaaaatcctcagatttgttggtccctttgggccaacaagactggagagatgtcagatttcatatcatagcagatttcagtcagatggtggtttcattttttttcccttggcctttgttctgtcatactggggcttagacaactcttaagttgcagcagcatcccttatctgagtgcgaagatatattcaggactatggctttccttagggctcccctggtggtggctcagacagtaaagaatctgcctgcaatgcaggaaacctggattcaacccctgggttgagaagaccccctggagaagggaatggctacccactccagtattcttgcctggagaattccatagacagaggagcctggcaggctaccaaatatagggtcacaaagagtcggacgtgactgagagactaacactaacacactatggcttttcttaatatctttgatcttgcatttaatcaagaaagataaaagagggatttcctggctgtccggtggtaaagaatccacctgccaaagcaggggacactggttccatccctggtctggcatgatcccatgtgccgcggaacaactaaacctgtgtgccacaacaaaggaagccatcacaataagaagctgtgcaccacaaccagagaaagcccgtacacagcaaccaagacccagcactgccaaaagtaaaataaataaataaaaaatttaaaaagaaaggtaaaagaaataatctaatttgtggataaaaatgactaagtgaaaagtgaagtcactcagttgtgtccgactctttgtgaccccatggactgtggcccactaggctcttcagtccatggaattttccaggcaagagtactaagggaacctgaaatgaggatataagaaccacagagctttagcactgaaggagatcttaggaatcattttgtccaagaaacttaaacctggctgtgcattagggctgtcaggagaacatttgctcctttgctaacagtactttgttaagatattatttctatacaataaaatgcaccaattttatgtatcaaggttgatgaattctaactttatacacttgtgtaaccaccactcagatcaaggcatagaacatttcttccattcctgaaagttccattgtgcctctttccaggcaatatccattttcacccatcaggggtaatgtctattctgactcctaccaccatagattgattttgctggtttttgtactcacataaatggaatcacagggggtcccaggtggctcagtggtaaagaatacacctgccaagcaggagatgcaggtttgatccctgggttgggaaaatcacctggaataggaaatggcaacccacaccaatattcttgcctagagaattccacggaggaggctggtgggctacagtccacagggtcacaaaagagtaggacatgattgaatgactgagcacacaaatggaatcatactgaatgatgattcagcttttgtatctgacttcttttgctcaatataatatttttgaggcttcattcatttttttgtatgtttaagtagtttgttctttttttcaatagctgattagtattccactctaaatataccacatttgttcatccattttctcgtgtaacttttacaaaatgtaaacgccaaagcctgtcctcggcccactgaatctaaacttccaggaatggagtttgggagacatactttcaataagtttccaggcaattgtgatgtacagccatgtgtgattctgtccattcactctggttctacagataaggaaactgacagcaggaaagagatttcccaaacagacacttgaatcagctgagtcaagcttagaacattttctactgtgctacccttttccttggaagataagtcaagttgctaattactgacgagggcagagacgtgagtcataagaccttccatttatcaagtacctgttatacattaggctctgctctaggtacatgagtccaactctttgtgaccctatggactatagcccgccaggctcctctgtccatgggattctccaggcaagaatactggagtgggttgccatttccttctccagaggaatcttcctgaaccaaggacagaacttgagtctcttatctctcctgcattggtaggcaggtgctttaccactagcgccacctggaaagcttctataggcacattatgtacatttaatcctcttaacaatttgtgtatcacagctgaggacactgaaacccagagcagcccaagggacagaggtagcatgtgatagagagaggagttgatcccaagccttcctaactccagagtcacacaagaaagttggtactttagcctgaagtgaaaagaaggaaaattacaaactccttggtttggtggtcttccattctggcctagtccagcttgctacagtagaaataaaaacataacagtgttcaccccatttctcaaactggttttacaattcctttagttctgtacacagtgctctatcagttaaagtggttgactgtccgattgactaaaaatgctgccgctaaagggagggagatgtatttgcttaatcactagctcttcctcctctattgtgcctgggggtggggactgcaaatgctgccagcaggtctgtcagagatgttctccacaaatagaaagctagttccccttgactgtttcatcagggagtaaattgaccctagcaatcagagacaagaatgagtgagaaatacatgtgctagttgagatgctgaaccttgagtcctgagagactccaggactccagaaactggagtttttcaacaacacactgtgtttttcaataatgaggaaatctggaaagtataagggatgactggctgaggaaagtggagacctggcttttgtagctgatatggttgggggaagtaggatgagaatagaggggaggaagagaaaaaagcttgtggatacttacaaagactctctccctgaccaaactttagttaggtttctctgagccctctttttaactagaccttgactttggccctccattctttggcttgcatagctcagattttgcaagaatcctgtcaatttagtgagaacatccctacccttgatatatcatcattcaatatctaatcaagtttctcatcccccacctttgatgtataagcctgcctttagcaagaatcctgttaggttaggttagcaagaatccccttatccttgatgtctcctcttagtaattttccatcctctaatcctcttaatgtcctcactggctaaaaattcccaactgtccttgtttgtaacctgagttgagcctgatcttcctctcctattgcaacatccctatggcaacagtcttgagtaaagtcttctttaccattttaacccgtattggaataaacgataccaaaacgatttgatctcttgggctatatctatacacatagactgatttgacaattgtgactgaattgactagtttaattcttatgccttacaggtgacaaactgaacaatattctaataatattctagtattagaataataacattctaatattattatatataatatataataatattagaacattatatattattatattataataaatatatagtaatattagaacattattattctaatactagaatattattagaatattgttcagtttgtcagtgaagatcatggcatctggtcccatcacttcatgggaaatagatggggaaacagtgggaacagtgtcagactttattttggggggctccaaaatcactgcagatggtgactgcagccatgaaaataaaagatgtgtactccttagaaggaaagttgtgatcaacttaggtagcatattcaaaagcagagacattactttgccaacaaaggtctaactagtcaaggctatggtttttcctgtggtcatgtatggatgtgagagttgtactgtgaagaaagctgagtgccaaagcattgatgcttttgaactctggtgttggagaagactcttgagagtcccttggattgcaaggagatccaaccagtcccttctaaaggagatcagtcctgggtgttctttcaaaggaatgatgctaaagctgaaactccagtactttggccacctcatgcaaagagttgattcattggaaaagaccctgacactgggagggattgggggcaggaggagaaggggacgacagagtagtttagcagacagaggaggagatggctggatggcatcaccaactcaacggacatgagtttgagtgaactccgggagttggtgatggacagggaggcctggcgtgctgcaattcacggggttgcaaagagtcggacatgactgagcaactgaactgaactgaactgaactgattttatattattattagagaatattctaataatattcttgtctgggtttcatgtggacagcctgcttcaggactcttcttctgagaccaggaaccatgtggtaggcccaggctctgcccaagaggctctgcattagaattctaagaaggcttcatgctgtgctcctcctcaagaagcaaaaggacataaagcatcctggaagctgcatgtcaatgtgaagtctgtctgctgttctactgaaacaggattcaagagtcccaattcccagatacacattcccacactgtataaggaatgcaatgctggtaggagctgctaaaatgattaatctcctgacatcattccctttgacttgatttagttcttatcactcaacaaagatcactgtggggactttactgattatggttttactctccagaaactatttctctcttttctctggcccagtaatcatactgtcttctagtgttctgaattcctttcacttgggtattctttacttgttgagtgtggcctgaagttgggtggatggtcttctatagctctcaacaaattttcagcagaaggaagggaagaggctttgatgtcagagaaattttctgcagaaaaggatcaaggcagaccaaagggaatacagctgagcaaatcttaagaccatgtgtgaattagagaaactttgtgtttagacaaagaagaaaaggttttgagacagacatctgtgaaattgtgttttagaatgggtcgagatctctcactctcacaaaagcccctaaaatagccaaagaaaatccaaagtgactccaatgttccatctctgaagcctcctggagcctctccaatgaacatggcagaacaaaggtccagtgttgctgaaacagaacaaacgcaccacaattgaaaatattaatccaagctttcctctaaggggcattaaaatgtgctgaaacgggcatccaccctgaaaagccaaacccttggaaaggaaaaggaagatttccaacagatggaagtttggttgtctggtttggctctaataaacatgaaatgaatccattcttcacatgaagactgatctgaaatcccaaattctactctctgaaagccattagaaatctgatactactggtaacttcctgaagacattaaagaagcgctaaaatgtgattctggcatcagggctgagattttaaagtatgtctttctaagtaattttttttcttttgctgctagaaagtggaaaaagcagggtatagagtaataagaagctactagcccacaaaaggtagactgctttctttgtgctaaactactctgatccacaaaagtgaaaaaaaataaatctgtttagctttcctgaaaatgaagaaatgaagatgacccacaaaattctttaaactttcaaaagtaacagtagctttatcacccaccctcctccctgaaagcatatttaaattgataatgcttcccctcaaaaagtggaggccaaaggaatctggttctcaccttgtaacagagcaggctggggctagctcaaccctcatttcaaggacaagaacaagaaaacaaacaaccctactgcaaaaattattttaaatttcactccatctcacaggcaggaagagtctcactgatccacaacgcaaagaaaaaaatgtttcatcatcagaaaagcagcagtaaatggaacagcagagcaggtttgttttttttttttttcaaaagtagaaaaagtaaagggcagtgcttatggctagaggggctctctagccattcaaaacttaaacacagaggaggagataggatctctgtaggcagcagaagaaaagaaaatttttttttcctacttacagtgtcttttacctctaagggaagccagagctgagcgtcttccctgttcttatgcagcagaggcaagatgtgttgctgtgagatttttaaaagaccccgggaactcccagtagctggcttcctcattgcatctctgccttcagccaagtgaagactgccttcatactcattctgatggccgcaagccttgtggtctgttctctccagtctttgggattagaattggtgttgacactgagggtgtaaagggttggaaaggaagtggctgcaccgaggatacccatgggcaggatttaatgagactttaattcagaatcaaccccaggagagagaatgaaattttgccctaataagttaacctggaaaaacacatcctgccaaagaagggtttaatttagcttctttcagaaattctgggtgggctaaggagcactcagtagagaagttaaactctaggtaggcatattgctgaggcctagcctgctttattcggagaaggcaatggcaccccactccagtactcttgcctggaaaatcccatgggcggaggagcctggtaggctgcagtccatggggtcttgaagagtcggacacgactaagcgacttcactttcacttttcactttcatgcactggagaaggaaatggcaacccactccagtgttcttgcctggagaatcccaggcatgggggagcctggtaggctgccgtctatggggtcgcacagagtcggacacgactgaagcaacttagcagcagcagcagcagcagcagcagcctgctttattagtaaagttttacttattttattttactttattttattagtaaaatctctttggtctcgtaatttttaaaacttctacataaatttcaacagttgaaattctgctgacatgataagtgattagtctgtggttttcctcttcttgctcacttgagctttattcgaacaaactagaatttacaaggtcacaatttatgacccctgggtgatgtgaagttttgaagttctgcagagaagagcagcttaatataaggccatgcagcaagtatttgttttgctggtgatggtggtgaaagaatgtgataggcagtgatgatccctagtccttcattgatttatccttatttatagggatcaacttctttttcgtggtttatggatacagggacaattggaaagagaagtgaatacaaagtcagaagaggtggattctgttcaggttttgttactttctttctgcgatcttgggtaagtcatagaaactgtctgaacctgctatctcatctgctccccaccgtgggccaaaaagatcaaatgaaaccatgtagatgccttgaaaactgtggggcattccacaaatgtgatggttttctaaattttcattcattgtatgacccaccaagtaagctcttcagataaatcaagagttcaaatacggaatcaggaggagacaacatcttgagtctgatggatactagatgatgggacttgagggctatggaagatagagctaagggaaaaaaaataagaataaggagttaaaaaggagaaaagacataaaattcctagagaaaggcttgactctggtgctgattgggccttaagactttaaagtaaaagttaaagtagctcaatcatgttcaactctttgcaacgccatggactatcagttcagttcagttgctcagtcgtgtctgactctttgcaaccccatgaattgcagcacgccaggcctctctgtccatcaccatctcccggagttcactcagactcacatccatcgagtccgtgatgccatccagccatctcatcctgggtcgtccccttctcctcctgcccccaatctctcccagcatcagagtcttttccaatgagtcaactctttgcatgaggtgtccaaagtactggagcatcagctttagcatcattccttccaaagaaatcccaaggttgatctccttcagaatggactggttggatctccttgcagtccaagggactctcaagagtcttctccaacaccacggttcaaacgcatcaattcttcggcgctcagccttcttcacagtccaactctcacatccatacatgaccataggaaaaaccatagccttgactaaccatgaaattctccaagccagaatactggagtggatagctgttcccttctccaggggatcttccgaacccaggtctctcatattgcaggcggattctttaccagctgagccacaagagaagccctatgactctaaaatataatcctatttgaatatggagcaatggaatataagtgagcaatcaaaaatta

SEQ ID NO: 50 - DNA, 80550 bp, Hippotragus equinus
  source 1..80550: mol_type = genomic DNA
tgtaataaataaggcacgtctatttttaaacaatttctactttttccttcaaaaactagacgttttatacagtgctttgaaagccactgctccctaatctggcaggcagggagaagggctcaagaatctcaagattatgcactcaaattttacaatgtttaattatcttttcttgaacttttagtcaaataaaaaattatttatgatttcagcagcaattcagcatcttcagctgtaggacttgtaaacctcaatgctctaccttatctgttgctagtgaaaacaaaaaatactggaatttcattttcaataaagctaggttctgagctgatgccctgaaaaagatatttttgtcatcagacaaatgcaattcaaataggttccctaaaatgagagcatgagaccaacataaagccttgcaatattttaaaaagctaaggtgatcatgaatactgtgtcagtgcaggacaacatcatctagcagcattctctgtggcctgttataacgcactgtcgtcatcttccctgtagtctccgaccaggagtgaatgcttgtcaggttcactggtaccaacgctgtttagtgatcgtttatcagacagtagtgaatttatggaggctctactgtaattaacaattcggtccagcaaacccagtttaggagaatttcttgaggtatcctctattccaacatgaacacttatttctgaaggacttttctgtcccatttggtttcgggcatgtagttcataattctcataagttggtttcctgtaactggaaagatgcaaaagtatactagtttgaaataatcaaatgtgaaccaggcacttgttacattcaaaaatgaagagatttggacagtatgaaatgtataaaggtggtccctgctaggaaattagctcaaaaggagttgtgtgaggtcacatgatcagaaatcctacttctcagagccagtgtactagattttacacccctcagtgcttgtggttgctctgtatagactacataaggtgataattacataaagttaatatttatcattaaaaacagtttgggcttatcattaatcaatacaagaataaaacctagcaaggctgactgtggatgataaaaggaatacaaaagagaagtgtgagcaagccattatacttacagtttaaggaagagtgaagaaagtactactgaaacagatgaagcagccattgcagcagatcccatccagggctgcaaaaccaaaccaatgggcataaaaactcctaggaaataagtttggattaattagagcagacagtactaaacacactaccaatgtgttcctaatacatatatacaaatcatttccttcctcaatatttaagcaacaatttatcctcctgttggtacagatttatgtcattgccaatttttcactaacacagtgttgctgtgaacattcttgtacatgtctccttgtgtatgtttgagaacctccctagggtacatacagaggtgaaacagctggattataacatgggcacaccttcaactttaggtagatgcttctcagttgttctccaaagtggctataccagatcacaaaccccccaataatgtattagagttcatattctacaaacttatctacacttggttttgacagacattttaaaacttgttcaaatgatagagatgagatagacttactgcacttgtagttttttatgtgctaatctgtatttttatactttttctacagtgaccatatattacttgtataatttttcaaaaataacttgctctatgaattaatctccctggactttgattgttcttttactttgtcctctctgtatctgtgtttccctgttgataaccagctttgtaattgttctcatgttcttcatgttcatctttggctctctaaccagagagaacaaaaagaaagtgataattatttttctttcttttttaaaaaattatttagtttttatttatttttggctgtgctgggtcttcattgttctacatgggctttctctagttgcaacaaccagggcctactcttcactgcagtgcgcaggcttctcactgtgatggtttcagtaatcgagaagcatgggctccagcagttgtgtctcacaggcttagttgctccatggcatttgggatcttcccagaccagggaagattgaacccgtgtcccctgaattggcagtaggattcttaatcactggaccagcagggaagtctgataactatttttctcatgttattgttaacacttaccaagcccctaggtaacagggatgatcagatgcttattaaataattgtaacctgctttttggggggtcatattctttgttcaatctctctctctctctctctctctctctctctcacacacacacacacacacacacacacacacacctggctccccaacctaaaaaaaatgttggtattttaaaacattaagaacattctctgtatgttatgattacaacaatgaaacaagataaaaactgatacagagtaaaaaagatcagaaagacacgtacaaactaaaataccaacagtagttatatttgggtagtgagattaaaggtaaatttattctcttcagcaaaaataataaatgaccaagtaaataagtacatatggagaaagagatgaagcaatgtggcaagatatattaactgtgaatttaggtgaagggtatacagattttattatatcattttttcccttacttttgtaggtttgaaaatttcaaaatacaaagttggaggggaaaaacggtaaaataaaataaacctgtctgaatgattatacattttaaggcataatgaaaatgctgaaaatttaaattactgattttccctgatagctcagttggtaaagaatctgcctgcaatgcaggagactctggttcaattccttggttgggaagatccactggagaagggataggctacccactccagtattcttgggcttctcttgtgactcagctggtaaagaatccacctgcaatgcaggagaactgggtttgatccctgggttgggaagatcccctggagaaaggaaaggctacccactgcagtattctggcctggagaattccatggactgtatagtctatggggtcgcaaagagtcggacatgactgagtgactttcactttcactttaatattatccctcaccataccagcaggctacatacaaaactgggctcaaaactagtaagaagaagactaaaacttccaatatggtaggcatctaacgacttcaggaaaaaaaacaatacaagttaaccatcacataccagcagctataggaattccaatcagattataaattagagcaaagacaaaatttatccgaatcctcttgactgtcttccttgataaatcaatacttgccactacatccagaagatcattctgagaacagaaatatttatgatattaacaacagattctaacttaactagtaacttgtatttgatgccatgtatgacaaagatgatatgcatcttagggaaatatgtgaattaactcaaatctcagatactgctaaaaatttgagtcagtcttggaagaggtttttcagaatttttttctcagggttctgaaaacacttttagggttgtatgctggtacagggactaaaccccactaaaataacttcagtaagtacttgctgaagataattgtgttctatgtatattcctaaatttaattcttcatttagaagcttgtcattctcatttgctcccctgaattgagaaagtctgaaagtaattactaagacttctcatactcccatcctgaattctccctttctcaaaggtcaggaggatggaaattagaaggacagagtcatatgttcaatatacaacattatctctgaccatgcagagcagtctcacactcctcaaaggtcaggccaccagacttacccttatcaaaaccacatcagctgcttcaatggctacgtctgtgcctgtgccaatagcaattccaacattagccatggccagagctggggagtcattgattccgtctcctaccattgctacccgtttcccctcctcttgaagttgcttcaccttagcaaccttgtgggaaggtagaacttcagcaaacactttagtaatgccaacctacatgaggaaaaacaaactctactcatttcaagaaatattactgagtatgtgaaatatagggcttctctggtggttcagtggtaaagaatctgtctgccaatgcaggagatgcaggttcgacccctggtcttgcttgggaaatttcatggacagagaagcctggtgggctacagtccatggggtcacaaagagtcagacatgactgagcaactaaataacaaaaacaacaaagcctaaaatctaactgttatattttatataaaatatttatcattttacatagtgattttatatacataacaatgatggttcatcattttatatgatgaggagccttcattttccacctaccagatgtccaaattttaaaatattagtaatatctagggatagtaagactacagggaaatgagctctcttagatactgttggtgggtgtgtaaatgtgtactgtcattctggagggcatgtaccagcatctatcaaagtgggcatgtcatttggttaaggaattccactcctagctatattttggacattcttatacatgtataaaaagatgtatgcccaaggatgtatattactgccttagttgtaacaacaaaattttcaaaagcacgtaaattattattttttattagaggaatggttaagccaattatgatacattcacaccatggaattcaatgcaatgatgtggaaagaatgaagtaactttatatgttcagacatggacaaagctccatggacatggacaaggcattcatattattatctgaaagaaagtaaattgctaaacaatttgtacaaaaatgatccaatttatattgaaaataccagaactatacatctgtacatgaacaataagtatatgagaaagtataaggggagagggctggacagggagcttgggaaaaggttaacaaactttttactttatatccttctgtatctttttatacaagacagtatttatatattacttctgttagtcaatagaagaggggagaaggcattccaaagtagaaaagactaacatgagaaaagttttaaagggaaagcaaaagtggaggatcagtagcaggaaaatgctacggaagagatggttcgttctatcagtggtatccaggatggactagagagggccatgcgtggagctactgctgtactttaggcatgagaggatgagagcctagcttaggctggcagcactggtagagactacgagcaacatttcaaaggaagcatcaacagaaactgtgtacaatgtcactaagcatctcatgaattaagcaaacagctttttacttataacagttccagaaaaaagcacaaagtccttcctgtgcagacactatgtcaattcttttttaaggaaccaggtatggctactcagggataatgaatataataggtagtaccaattctttagcacctgaaggcaagaaagaaaatgtacgtgaagagttagaagttaacacatactcccaccccaactactaagtaaacccattacctgagaagcaatagatctagctgttttactgttgtctccagtcatcagaaccacttctaagcccatagatttcagaatatggacagccagttctgcttcaggcttcactgtatcagcaatagctatcaaaccgcacagctcatctaatataggagcagcagaaaatagaatttggaatatggtgaaagcagaataatattctgacttaaaatttcagaaataaatgatttttgttaaacaaagttgttcagggcttagcttaactcgaaatactcccaagaccacacaactccacagtaagtctctattcttggttgtgaaaataccacaaaccccacagtaaccccacagtaagcctctattcttggctgtgaaaatctcagagtgaggtaggggttactaatgaaggtaataataggaaaatgaaaataaactttactggatatactaaaagacttacattcttcctttagagaagtattgccaagagctccaaacacttcagctaatttaaaggcaaatgaaactgaaacccaatactttcttcctttcaaaggtgaaggggtggatgaaaacaaaactggcattttatactgggggaaaaaatcactgcaagtagctattttatttcaaaaatgaaagtaaatgatattttctgcttttgtcctggacctaaaaagggcatagtaagatactgccttcatacttagcaaagattataaatgttaactaattaatctcacagctataaacttaccctaagaaataatttaataaaagccaggcaaatgcaagagaatttaaaattaatcagtaacaattatgtattgctgacattttttattttgcattcaggctgcttttgaataaccctcatagttcagatgtctctcaaaaatacacagaaaacaactgagatcacaacactgagtcacagcgtacttaaggaaaaccttaccatcaactgctaccagtacagcagtccgacctcttctctcatgttcagtcatggaatcatttacattgctattaatggcaagaccatttctaatcatccactcccggttgccaatgagaactttgtactgctgagcattaagagtatctgaaagaaagtacagaagaaacatttagtgaacttgtttaatatttataacaaccctttagggacactcttcctctctacgcttgcagttactacattggttttttggtagaacatagcctataatggtgatttccaaatgttcaaggaacacactctgctcttctatgcctctgggcctttgcacatgttgctacctccacctggaggtcctcacctctcccctccaaataccaaattgcatcatattccttaaaagctagttcaagcattactttcttggtgatgctttccattcaacatttccttatgatcttccatggcaactgaataaagttaaaaatatttagtgtacatcagtacaaccataatggttagataagaacacagaactacaatgatatctcactaagtttaagtgggtccttagtgctttctggtaattctactgtatttccctagtccattcattctccattccttctagatggctattttataccttttcttctcccattctcataccagatgatgatgtgcttcctacttcagaaagaaaataaaagcaatcagaaaagaactttcagaagctctcattgccatatatacccaactacctaagcctctgtacatactgatctagtttcttttctgttactataaacagccccaactcctatttaaggccaacttctccacttgcataaacagatccctctcctttgcctatttcagaacatctctccaacaattctctcctctctcttctgcatcatcatattttctacttctgctgcacacagtcctatttttaaaaaagaaaacaaaacagatctcatttatctctctagctactgccccatttctttgcttctgttcatagcaaaactcctacgaagtattgtctgtatcagcttcccattctcctgtgaacctgttccaatagaacttttgtctctcttatgccaaagaattgtttatatggtacaccagtgatctttaataaatgtaaagggtaattcttagtcctcatcttacttgccctattagcatttaacacagtcgaccattctctccttgaaatactttcttcatttggcttctagagcaccacattcttatgagttacctcctaccacttctgttttctttactgatcattcttcatctccctgacctcttaatttgtagtgttgcagggcttaatccttaaacctcttccccaccaatctactctcatttcctgattttttgggggggctcacctcatggcttacagaatcttagttctctgaccagggatcgaacccaggcccatggcagtcaaagtgcctggtcctaatcactggcatgtgtgaatactcagttgcttcagtcatgtctgactctttaagaccccatgaactatagtccaccaggctcctccatccatgggattctccaggcaatactggagtgggttgccatgccctcctctaagagatcttcctgacccagggatcgaacccacatctcccacattgcaggtggattctttactgctgagccactgtggaagccccctaaccactggaccaccagggaattcccaactctttgaagattttatgcagtctcatcactttaaagaccacctatatcagcactgtccaacagaactttctgtgatgacagaaatattctacatctgctgtttaatacagtagacactaacaacatgaggctattgagcactgaaatgtgactagtatggctgaagggctaagttttaaactaaaatttaactaatttaaatagtcacatgaaactagtggctaccacactggatagcacagatctataaatggatgactcccaagtctacagacttgtatagccacctgcctccttgatagaacatttacacaacatctccacttgaacacctaacaggcagtcaaacttaacatgtcaaaaactgaactcctaatcacttttcctcaacattatctctcctgtgatctccatcttgtttgaatggtaaccccatccttctaaattggttaggctgcaaactttggcctaattcttgactcttgtttctgtcataccccatttccaatatgtgagatatatcagtcatctctcccttcaagatacatcctggggaagtccctggcagttcagtggttaggacttccattgcaaaggggcacaggtttgattcctggtggaggaactaagatcccacaagccacgtggcatgttcaaaaaaaaatagaagatacatccagaatttgaccacttcttacaacctctactgttattacattggtccaagccatcatcttttacctagattatggcaacagcccactaacttatccccttgcttctgtctttgttcctacccacagaaacagtgtatttttaccaaagaagcccaagtaatacttttaaaatattaagtcagattctgtcactcctatgctcaaaactctccaatggcttttcacctcatagtaaaaaccaaactccttacaaagttcccaatcatttactctgttccagccacagggttcctcaaactagtcaagcacactactgacttaaggcttctgtactcaatattcctcctaactggaatgcttttgtcacagatattcacataactttcttcctccctcgccttaggtttttgctcaaacagcactttctcaatgaggcctaccctgtttagcctatataaaatagcattccctccaataccacttgctcttcttcattttcttcatagcactatccatcagacagactctacttgcttatttgcacactgtctagcgttctttcaccaggaatgtaaactccatgagatagggtctttgtctattctgctcactgctgattctttagtatcttgaacagtgcttataaaacctgtcagatgaacgaaatcactatgtgtcagtgtgcttgatactatgaattcatagacaaataataaagaaatcacaacttagtagaatcaggcagataaagaaagaattatcatgcagtgtgccagactgcatgttatagttatgactaaaaaggaagagcaaatatctctgcctatgtatgtcagtcagtggaggcttcactaaagagagatgtgagctgagtcttcaaagatgagaaaatagtaaataaagtgatctaacaggcatgaaatgacacaatgtacagagaaactttaagtagttccataagaacgaaacacagggtgcatgggtgacagtggaaaaacacaagatgggtagatgggtggtgcagggaggcaggagacatatcatggggaatagatcttgaacaaaacacagagagactggactttgtcctgtcagagatggagcgcctataaagccaggatccttaacagatttccatggaggggcttagggatatatacaaatgtgcaaaacagaaattttctgagtagtgggaatagcttttatctcattcctccaaacgttcatgactcaaaaataggttataaaccactgcaataaaaggtattagtcagaaagtgatataatcaggtttgaatgttagcaaaattactcaagtacaaatgggtggggaggtgcaagtacacttaggtatgtatatcttggttttggtcagatggatagaccaacaagaaactcagtaaagtggcgttgctgcagatacggattttagagtggcggtggaaaccctacaggtggtagaataagcaataagcatgaatgagattatatagagagaatatgtaaaatcagcaaaagacaaaagaccaaaactctgaggacacccaacatttgagaggaggagaaaagagcaatcaggtgaagattaaaaagaacagccaaattggtgagaggagactctagagaaagcagggtcatggaatcaagggagaaaaaaaatttaggaaagaagaaatggtcaacattgtcaaatgccttagcgaagtcatgcggcaatgaagactgaaaactaaccactggagaggggatgaaacaaggtcattggtaaacttaaaatagtttcactagtatggatggggccgaagccagactgtgcagtgaattcagccagcttagactagtccttctagaagcttggatattaatgaaaagacagacagatgggacaaaaatctagatgggaatacagtgattttgatgggagaaatgtttctatgttgaggagaaggagctatgacaaagagttggaaaataaaagcagcaaggggatatactataacagggtgtgaggtccttgaggaatcaaaagagggtaaaatctggaccaaagatgaagggattcattaggtaagaaaaggcatacttttttctctgaaaacggaaacattctgggcaaaaaaagagaaaagaaacagaaagaacacatgtctgagaatcttaaatttctgtgcgaaaaataagccagacaatttgcttagagaactagggagaaggccataagagcttgtgaaagatagaaaaggtctggagcagctgtgatgagaaataaagacagctgaactaagacggaagatcagctagagctagggtttatcaccctccattgtaatcaaggagtgaagctgaaaaacattcttaagcaattcagtgaaataattagaaggcctgtggtgaaactgatttacaagaatgaaaccatgatgccaatctttgtttcttatgtaacagttcaatttataaggttagatacctgttaataactgtcccataagtggtactacaaaaaaaattagcttacttgagaactgagcatcaataatcatggaagacgaagttgatgactgttcattactctcatctatttgaaccagagatgcatttttaatattattttcctctatcttccagttattcttgtgtagcaagccttcaatattggtgactttacagttaatgccacagcctggcacaacctggaaatctatgcaggtacccaaggtttcagtgtccagctcctaacaaatagaaacagaaggatttcttctgctgttctaacaatccaagttcatcattagcaagatcaaagattactgctggttaattctaaacgtttagatacaatctacaggcctggttaattctaagtgtttagaataaaattgtcacttatcattgcctatttgacagtgggttttgataaggacaaaggaacagagcattttgagtataatgttcaaagttacaggagaacctcataatcctttaaaaaaatcccactccgtaagatttataccaaatttaggggaagaaaatgtggaaggtttatcaatattctctgtcctttccagtagagaattacaagttaaatatttaattctattgtcaagttagattttctatttagtacagggcaaagggtaacaaagaacagagcctttagttaccagagggcctctctagtatgattctgtgtccttagtaagccaaagaattctggtgaccatcactgtttcctggctctttatatctttgtcctctccattgtttgatttgggtgtatagaagccagatcagtaatagttaataggtaaaaaggaaagaacaaataaaaaatggcaacatcaatggtgaaactgccacattttaacagaaaaattatgtgagataatttacaaagaacttatacaaatcaataagaaaaggtaaacaatcttatgaaaaaaataggcaacacatacaagcaaacagggtatagaaagaaatgcaaataaccaatacgcatatggaaagatgctcaaccttattcacaattaagacaatgcaaagtaaacagtcaatgaataaatattttttacttactgaattggaaaaattaagtgttagtgagaatgtggggaaatgtcactcaacttctggtaaaagtataaactggtatacctttttgtgtgggtgttgataacatttgccatttaagtgttggtaacattcatcaaaatttaactatacctattctttgatccagcaattacattgataggcattaaacattagagataaacttgcaaaagctgacaaggatgttaactacaggttttaagagccaaaaagccaatcatacagtggaatataatataggcattaaaaacaatgaagcaaatctgtatgtcttgataaggaaaaaatcacttaatacaaatttttaaaaaacaccaaagactggtcattgtattatcacccttctatgtaaagtttaaaaataacaaatgttggtatatacactaaaaatggttaacagatgcacacttttgtaaatatactgaaaattattgacctgtacacgttccaagcgtgaactttagagtatgtgaattttatctcaataaagctgttgttcaaaaagcctggtaacaggttaatacttgttaaactttggagagaggaattatggaaaggggcagggaatgaggctttcctttttcattacgtaatgctgaactatctaaaatttcctcccataaatatgtattatttcttttttatttcttagttgactgaggttatctgtgctgtagggttacagttaattttcattttcatctttatacttttctgtatgaagaaattaagacatacaaaataaaattagaaaacacaagtttctctagtttcatacaaattatatatgtaaatcatgaataaacaagggaaaaattgtacctgcttgcagtatttggttatggctgctcccagagggtgttcactgttactttcagcagttcccacaatagccaggatcttattgcgtgacattctgttactttccactagaacctttacttgattcactactggggttccatgggtaatggttccagttttatcaaataccaccacctttacctgtaagaaaatcaaagcagaatgcactgtatgacttcattccagaaatgagaaaaaaggtttactgtgacaaacacattactattttgtttcttaatgagctgactttgatttaattggacttaaatggtctttgggagactaaaaagggagaataagggaagaaatatcgttagttacacgtaataaccctcccttgcaaatgttcaacgtgctgtgaacatgtgttaaatagctagaactacctgttaagagttgactgttaatcggtaacttaggcctctagtgcctctggggaaagaaaaagactttcaatactaatgaattttagatctgtaggggaaaaaaatctgggaagtaggtaaataattacaattgagtaattaatttgaagtgtgcaccagctaaaacctgggttgctttgactttattgagactagatgagaagcttggccagagaatacagctcaggaaatcaacgagggaacctcagatcaggcaggaaggaggaataatctggaattagagaacatagttgcctcacagtaaactcagacaatgaaccttgagaaatgaatagcttgaggaaccaagatgagaagagatcagttcagttcagttcagtcgctcagtcgtgtccgaatatttgtgattccatggactgtagcacgccaggccttcctgtccatcattactcttgtagcttactcaaactcatgtccattgagttggtgatgccattcaaccatctcatgctctcttgtccccttctcctcccaccttcaatctttcccagcatcagggttttttcaaatgagtcagctcttcacaacaggtggccaaagtattggagtttcagcttgagcatcagtccttccaaagaacattcaggactgatttcctttaggatggacatgttggatctccttgcagtccaagggactctcaagagtcttctccaaaaccacagttcaaaagcatcaattcttcggtgctcagttcagttcagtttagtcgctcagtcgtgtctgactctttgtgactccatgaatcacagcatgccaggcctccctgttcatcaccatctcccggagttcactcagactcacgtccatcgagtccgtgatgccatccagccatctcatcctcagttgtccccttctcctcctgcccccaattcctcccagcatcagagtcttttccagtgagtcaactcttctcatgaggtgcccaaagtattggagtttcagctttagcatcattccttccaaagaaatcccagggctgatctccttcagaatggactggttggatctccttgcagtccaagggactctcaagagtcttctccaacaccacatttcaaaagtatcaattcttcagtgctcagccttcttcacagtccaactctcacatccatacatgactattggaaaaaccatagctttgactagacagacctatgttggcaaagtaatgtatctgcattttaatatgctgtctaggttggtcatagctcttcctccaaggagcaagtgtcttttaatttcatggctgcagtcaccatctgcaatgattttggagccccccaaaataaagtctgtcactgtttccccatctatttgccatgaagtgatgggaccagatgccatgattttagttttctgatgttgagttttaagccaactttctcactttcctctttcactttcatcaagaggctctttagttcttcttcgctttctgccataaagtgtggtgtcatctgcatatctgaaattattgatatttctcccggtaatcttgattccagcttgtgtttcatccagaccagcatttctcatgatgtactctgcatacaagttaaataagcagggtgacaatatacagccttgatgtagtacttttcctatttggaaccagtctgctgtgccacgtccagtcctaactgttgcttcttgacttgtatacagatttctcaggaggtaggtcaggtgttctggtactccaatctctttaagaattttccacagtttgttgtgacccacacagtcaaaggctttggcacagccaatagatcaaaatagttttttttttggcaactctcttgcttttttgatgatgcaatggatgttggcaatttgatctatggttcctctgccttttctaaatccagcttgaacatctggaagttcacggttaacatactgttgaagcctgacttggagaattttgaacattactttgctagcatgtgagatgagtgcaattgtgcagcagtttgagcactctatggcattgcctttctttgggactagaatgaaaactgacctttttcagtcctgtggccactgctgagttttccaaatttgctggcatattgagtgcagcactttcacagcatcatcttttagtatttgaaatagctcaactggaattcctggagaaggcaatggcaccccactccagtactcttgcctggaaaatcccatggatggaggagcctggaaggctgcagtccatggggtcactaagagttggacaggactgagcaacttcactttcacttttcacttccatgcattggagaaggaaatggcaacccattccagtattcttgcctggagaatcccagggatggcggagctggtgggctgccgtctatggggtcgcacagagtcggacacaactgaagtgacttagcagcagcagcaactggaatttcatcacctccactagctttgtttgtagtgatgcttcctaaggcccacttgacttcatattccaagatgtctggctctaggtgagtgatcataccatcgtgaatatctgggtcatgaagatcttttttgtatagttcttctgtgtattcttgccatctcttcttaatatcttctgcttctgttaggtccatactatttctgtcctttattgtgcccatctttgcatgaaatgttcccttggtatctctaattttcttgaagagatctttagtctttcccattctattgttttcctctatttctttgcactgatcgctaaggaaggctttcttatctctccttgctattctctggaactctgcattcaaatgggtatatctttccttttttcctttgcctttcgcttatcttcttttcacagctatttgtaaggcctcctcagacaaccattttgcctttttcttggggatggtcttgatcactgcctcctatgcaatgtcatgaacctctgtccatagttcttcaggtactctatcagatctaatcccttgaatctatttgtcacttctgctgtaaaatcgtaagggattttatttaggtcatacctgaatggtctagtggtttccctactctcttcaatttaagtctgaatttggcaataaggagttcatgatctgagccacagtcacctcccagtcttgtttttgctgactgtatggagcttctctatcttagctgcaaagaatgtaatcaatctgatttcagtattgagtctctggtgatgcccatgtgtagagtcttctcttgtgttgttccaagcgggtgtttgctatgaccagtgcgttctcttggcaaaactctattagactttgccctgcttcattctgtactccaaggccaaattttctggttacttgaaaagagatatgacaactaaatacaaagcatgattccagacaaaaaaaaaaaataactataaaggattatggagtcaactgaggaaactggaatatggacaagagattagacaacagtattttatcagtatcaacttcttgattttgatctttgtactatgtttatgtaagagactgtccttgttcttaggaaaggagcttgatatcttcagtaaagggtatgtgagatttctttatactgttcttgcaaattttatataagtttgaaattatatcaaaatttaaaattactataaaaattagtagcttgtattcactggctagatgaacttctaaagttgttctaagttgtgttatgtgttttgtagatgcatgtgtatataatttatatcctcataataagaatatactagaaggaacatggttttagttgaagtcaagtggctttgattgagattgtaatggaaattctaacatgagagagatcagggacagaattatatattcctgaaatcatagttgcaaactgtcagctggtggcagcaaagatgaaagtaagggcaagccctatcaaatgttgaacagcacaaacatggagtcacacacaaataggtgtgaggcctgacagacctgggcaaattgcctcagcaaatatctatgatatcttcctgccctaaagactagtctagaatgagttgggacaggactctaggttttccacatgagagtatactctaaagagagtaagtatggagtagagatcttatactctctgccaattcagagcagaaccaaaataacaccttttctacctccaccctcaggacaatgccagaagaagctcagcttacaggcaatgtagaaataatttaagactctgtttttcagtaggggtgctattgccagtttggatgagacaactcttagttctagggactgtcttaccttatgagccatctccagtggctcaccacctttgattagtatgccattttgagcacctactcctgtacccaccatcacagcagttggagtagccagtcccagtgaacaggggcatgcaatgcatagaactgtgatagaggcttggaaagcaaagcgtattattgtttctgttctggagatacttctgttgtagcccttgagaagaaacatgaattttgattactgatttagaactgaataaaacaagaagaacaaagcttaactctaaataaaaccacaattctggagtaacacataatcctacttagctatcaacatatgttttaattactagtaagaaaacactttttttcttttatgaatataagaaattattgacataactgtaaacaagttacagttctaaaattcaagatttcaattttgctgattccagagttacacactatggagtgaatataaaaaacaagaaaagtaagcttctccactccccatattgagaataagtgtttttattaggcactttcagaaatagctgcaaacatgggatctaattctcaacatatttgacccaaaacaaaaataattctgtccttctgtatactaagaccataaaactgtctttcacacttctttttgaagacaatgaaaaaaatcactcagtttgcaaaggttggttaattatatctcagtaaaattcttttggacaaagcaatgttaatgagtgcatctggtagtaaagctcttactgacattgaatatgtgcttccatgagtaaaaatgattgatagtattatgagaaatcccctaagaccctctgaactcatgagaaaaattcctgaaggaaacacattccaaaatacttctcagcaatcctcttgtttagtgagtatttaaccaatgagtggtggtttcgtcactaagtcatgtccaacctttgcgaccccatggacagaggagcctgataggctatagtccatgggattctccaggcaagaatactggagtgggttgccactgccttctccaatttaaccaatatgaatcatttcaagaaactttttaatattatactaatgatcacatcatggaatagatgttctgattctacctgttctttaattgaagggacaaacactatgaaacaatgtatatataggatggcatttttaaaagaaaaaatacaacaaagatcttcttagtaataatggttttacagtgctgtattcttactaagttctcaaatactttttttttacatttttattttttaattttttttcatttttattatttttttattttattttatttttttactttacaatattgtattggttttgccatacatcaacatgaatccgccacgggtgtacatgtgttccccattctaagcccctctcccacctcaaatacttaaactaagtgatcatctaagagttatagagagagagaactggaaggtattttcatagacatctaagcttatgctttcatatatgtcttaaatgtatacactaattccaatcctgaaatttaggtattattatcactatgttacagatgacaaaactgaagataagagaagttaagtgaattaaaggttatatctctaacatgaggcacagtccaggtttactataccactttaaataccataccatagagactatcatagactttgagagaagcagacattaatattaccttaatattgggactgggggcaggaggagaaggggacaagagaggatgagatggctggatggcatcatcaactcaatggatatgagtttgagtgaactctgggagttggtgatggactgggaggcctggcgtgctgcaattcatggggtcacaaagagtcggacagaactgagcgactgaactgaactgaatattaccttatatttataaagagttcaataaattacaaagagtttctaatatatcatttaacttttatgacaactgcaagttatgttggatgagtactattaaaatctcacttgagaaaactgaagctcgaagagaaattaaattgacctcagatcacactgattgtgacagagctgagatttcaaggttttcctcaatatatccatagtcctttgtgaaagcaaaatcatgctaggattgagactgtgtataaaatgtgaaaggtcagtataggcatcgattgagttcagtcactccgttatgtccgacactttacaaccccatggattgcagcacgccaggcttccctgtccatcatcatctcccgcagcttgctcaaactcatgtccattgagttggtgatgccatccaaccatctcatcctctgccgtccccttctcctcctgccttcaatcttttccagcaattgggtcttttctaatgagtcagttcttcacatcaggcggccaaagtattggagcttcagcttcagcatcaggagcttcagcttcagcatcagtccttccaatgaatattcaggactgatttcctttaggatggactggttggatctcctagcagtccaagagactctcaagagtcttcaccaacactacagttcaaaagcaccagttctttagcactcagctttctttatggtccaactctcacatccatacatgactactggaaaaaccacagtttgattagatggacctttgtcggcaaagtaatgtctctgctttgtaatatgctgcctaggttggttatagcttttcttccaaggtgcaaatgtcttaatttcttaggtgtgatcaccatctgcagtgattctagagcccaagaaaagacagtctgtcactgtttccactgtttccccatctatttgccatgaagtaatgggaccagacgccatgatcttcactttttgaatgttgagttttaagccagctttttccactctcctccttcactttcattaaaaggctctttagttcttctttgctttctgccataagggtggtgtcatctgcctatctgaggttactgataatgatatcaataacctcattataggcatacctcagagatactgtgggttcagtttcagaccaccaaaataaagtgagtcacaagaatttttgaatttccaaagaaggtaaaagttatgtttatactatactatacactgtgtgtgttagcctctcagtcatgtctgattctgcgaccccatgacagtagctcaccaggctcttctgtccatgggattctccaggcaataatactgtagtgggttgccattcccttctccaggggatcttccttacccagggatcaaacccaggtctcctgcatttcaggcagattctttaccaactgagccatcagggaagcccatattgtacactatactgtagtctattaagtatgaaatatcattatctctaaagaaatacgtttggtgttggtttagtcactaagttttatccgactcttgcgaccccatagactgaagcccaccaggctcccgtgtctataggattttccaggcaagaatactggagcgggttgccattttcttctccaagggatcttcctgacccagggattgaacccgggtctcctgcactgcaggcagtttctttaccaactgaactaccagggaagcccccaaaaggccaaagaaatatgtatataccttatttaaaaagtaatgctgttgtaaaaatgccatcaatagacttgacacagggctgacacaaactttcaatttgtaaaaaacacaatatctgcaaagtgcaataaagcaaaatgcactaaaacaaggtatgcctgtacttgctttgggaaaataacaagttataatgaaaaaaagctttccaaaaggaaatcttttatggctacagaaatgcaaatgttattcttatcagcttttcactccagtctgttaaagataccagtaattattaaagttattttcaaattaattacttatgcaaaagattcataaactgttttatatatgataaagagatgtttataagtcactcacgggaaagtaggtttccacgagttcaaaattcagaaatccaattataatccaaaccaaaagggtagcaatggaaataataacaataaaaggaacaaagtagccactgagtttgtctgcaaactgctggataggagcctacaattaaaaaaataataataatgatatgtatgtgcaagtctcttgttttgataatgaatacagtagtattgagcagaaatattttaataaactccatattaatacaactggaattaaacaaaggaacctatcaaaactagaccaagatttatactgagtgggctttaatgaaaatactttctgtttctagggagttaagttacctttgatgtttgtgcctcctctacaagtttgacaatttgagaaagggttgtgtctgctccaacatgggttgcacggataaggagtgacccattctggttaatggaaccagcaatcactgtgcttccagatttctttgccacaggcattgcctcacctatggaaggaaaaaagatagatttagggagcataagtaaatactatcttgaaatacaccattatttgttaattatcaaaaaatcatctagaaaggagatacttccttcatgcaacagaatctggacaaacacctaggtgaaaattgcctgactttttccttatgccagttctgggccaaaccccagggatatatctatcttaaactggaaaaacctaatgtgctaactcttttggtaggtacttttggaactccacactagtcttagatcattggttctcaacctgttcccaaggagcatttataaatgtaagagagttcttgtctgtagtaactacggatggggcacagggtattgctactccaacttagtgggtcaggatcagggatactaaatgtaccataatgtacaggatagtcagacagaactaagaactgtcccatccaaataagcgatagcacccctactgagaaatgaagaatcctaaattattttcacatgcagttcataagctgagcctcttctggtactatgataaggattgaggtaggaaaggtattagtttggttctactttagattggccttagttatctaagatctctaaaactactccaggtctattctttttatagctgaccctgatgttgaaaacatggagtcctatcccagctaagactagatgggtcgttagagcagaaactcaggaaaatttgtcaaagtgtattgggctctccagcaggaatatgacaacttcttctggttatacattctagtaattaacaatcctcagtgaaaaagagccttcgtagcataagtaaaatcacaaagtaaatctgcagaaattgatttaataaggttttaaaaataactcatatcctctatgcttattatttattcagtccacagtttttataaaaagctcttcacctttcatgtgatttttaattaatactttggattcacttcaccttcatgtcatgatactctgaaagatcatacctgtgatgagggactcatctaccatagaatgtccttcaataacacgcccatccactggaaacttgcctcctggaaccactttaataatgtctccacgttgtacaagttccacatccacttgctcttcactacatatgagttaaaacaaaagttactatgaaaatctgcttctccctctgatctttccatgcaagttttatagttcacatcatgcttatggccccattaactgctaccaatggaagttagaaccaacacttgaattaggaactacaatgtcagtctttccttttcattggtggggaatagcttagtacctgcacaaagtagcactgtaaatatttgttgaatagtcattgaacaaatacatgaaagctttagaaataaagtaatagattttatttaacaaaaccacttatttacacaattttataaggacagaaatgaaaaatacaaaagaatgaaatataatcaagtctttagctctaactttcagtttacaggtaatataggagttatagaacaagttaaataattccagaaggaaacagagacaaatggactatgggatattttcagggacaactgacagatgtttctttaacaagttaaatgtatggaaagagggaggagcagcaagaaatgagggagggagaactggagaggaggtattctagattaaaacaaacatgtcaggagaaagacaaactgtatgatgtgtgtgcatgtgtgtatgtgttcagttgtgtttgattctttgtgaccccatggcctgtagtttgccaggctcctctgtccatgggattctctggataagaacactggagtaggtagccattttcttctccagcagatcttcctgacctaaggatcaaactcacatctcctgtactggctgtgctgtgcttattcactcagttgtacccaactccctgtgatctttaccactgcaccacaagttcttactctgtatgatatcacttattatatatgtagaatctaaaaaatacaacaaactagtgaatataataaaaaagaatcagattcacggatacagagaacaaactaggggttatcagtggggagagggaagggtgaagagcaacactggtaagggattaagaggtaccaaccattaggtacaaaaaaacctacaagtatatattgttcaatatggaaaatatagccagtattttataataactacaaatggggtatacaaccttttaaactgtgaatcactatactatatacttgcaacacataatatcatacatcaactataactcaagtaaaaattaaaaaaaatacatgttagtcaaatgcaataacacatggactttgaattccattttaaacaaagaaactcaaaacattttggagacaacaggagaaatgttaataaggactgtgtattagaccatattaaagaattattgttcattttcttagatgcaatatggtattataattatataagaatatgtctttttttaaagatacaagaggaatattggcagtataaccatatgactgggatttactttaaaattctactacaacaaaagaaagatagatcatacagatgaagtaaagtgtggcaaaatgtgaataattgttaaatcttggagaaagattatgtgggtttattatacccttctctctggtttatgctcagtcaccaagtcatattcaactctttgcgaccccatggactgtaacccaccaggctcctctgtccatggaattttccaggcaagaatagtggagtgggttgccatttcctactccagcagaccttcccaactcagggatagaacccatgtctgcttcattgcaggcagattctttaccactgagccaccagtgaagccccacccttctctctacttctgtgtatattcaatatctttcctaaaaggtaaagaagaagaggaataatgaagataaatacctcaagaggatattatcagagtcaagagttacaatagttgcttctgtagcttgtagtgaaattagtttggcaagagcctctgatgttttgccctataaattaaaacacacatgtaaacaatgccaaggaagaaaaagtcttatgtaaaataaagatataatctttaacatttacctaagagaccactttaggaatgttaattagttcttatcagatgtctgactttgaaaataaaaagtacacaagatataaaatatattattaggcataattcataaaaataatgtataataagaaaaacatcagaacccaataggtacaaaggcaaaggacataaataagcaattcatttaagaagaaatataatacctgatgtgtagaataatgtttattactgatactaacagaagaaatgaaaactagagcaactctatgataccatttaatacctagtaacttggcaaaaatttagataggaatcggtgctgatgaagttgtagtaaaactacttacatactcttgatggcaaaaattgttaagattaatagcatgagcgatagaatatttatgtcctttaatcatatcttttgtaatttatcctaagatattaattcaacagaaataactattaaacatgaatatgtttaatgcaagattatctaaaattaaacactggaaacaatctaacttagaacaaaagcagaatggtttagtaaattatagcacaatgacttgagagagtattatttagaaatactgaataattatctagactgcaaaaacaggggaaaaaccttaaaatgttaagggtacaaagtggtatatataccgtatttgccactctgtaaaatataaaagaatatggaataggattggaaagttatttccattataacatgggactgtgggtgaatttttttccatcgttattttatatcttgtggtcacatcaatttttccattaataatgtgacgtaagtaaaatgtgcttgtgttgtgctgctgtttagtttgctcagtcatgtccaactctttcaaccctttggactatagcccatcaggctcttctgtccatggcatttcccaggcaagaatactggagtaggttgcggtgccttatgcaggggatcttcctgacccagggatcaaaccactggcaggcagattctttaccactgacccaccaggaagccctccaaaggcatacttaaccgaaaatactgctaaaataagaatatttcttttagtacatggttaacaacataaatcaatgtatatttccaataattggtctagaaaatattatagtcatttatctacccaagatttttaaccaatgtcacccttttttactttacctttgctacatgttccagccaccggcctagtgcaataaacacaaacagcataggaggtgtgtcaaagaaagtaacagggttcactttggctctctcatacattgcaaccagaagaataaccaaagagtaagcaaatgcaatggttgttgccagcacaatcaatacatccatatttgcagttttatgcttcagtgctttgtaggcctgaatatagaagtgccagcctccaaaaaactgtaatacagaaacagtgatcagtgctttttttaaaaaagctgacattcacatttatacctcaataactaagataaactatcaatgttaacttccttcagcttttatctaatccataaacaactaaggagaatttttttttagccacaccacgtggcttagttcccccatcagggacagaacccaggccatggagaaattcccctagagcttttttaaagctgaaacaaaagtgtttgtagtttagcagatacatgtgtgtagggattcaaattgctgtaaagcccttggcagccatcctcaatgatttaatgaatattccataatataaagaaagtcaaatgattattggatttttcttttgaagctagcaaaaacaagaactagggaaagaattacattctttgacaatgatttttttatataaaactcgccttcttttcaaaattcaacctgaatggtacatcacaagctactggctctgtccactgttttcattagaatgcataactgaaaacttacttttcattagttagagaaacatactaggatgttttaaaaatcattattgttttttatgaggatcagaaaaaggaataaatctattagaagtgttccaaaggaaaaatttatctgaaaagaagagttgaaaacatatcaagaataatgaacttaagtgccatggaaaaataataaaaataatatcactgttatgattatttaatagaataaataaataataaatatgctaaaataaaatatatcatataaaataattttaatgaaaatataaagaaataacatattttattattataataactgtaaatatgaagttgtacagagtggcagatatgaatgccaaattcatatctaaatacgaactgaactcttattatctgctctgtcattaaacaatatcctttagggattaaaatgaaattcattatctactttaatcctcagtttaaaattatttttgtaaagcatccagcataaaatgatcatacttctgaccagtatttgtcatacaattgaaaatagcctcacctactagttttgactagttttcattattaacaaatatacttgctaacatttcacttgcctgtacaggaacacacaataaaaaagatagcaaattcataatggacaatcctggcaggatctggcgctccaggaacatagaagaatgaatactgatcatttcttcttggctcatgttctgactatggtgaagacttgcaagatggtggtccataaccatcatatatatcatcagtcccattacaggtatacagaaaaacaggctcacaagaaaggcccgtcgccatctaatatagaaaagaaagatcatttgagtaaacatctaatggttaaagattctgtgtaccatagcaaaatataacttgtgaccaattcccacccagtgtaaggatgctattgaaaaaataactgacatgctaacagtatgttaaatttgtaacataaatcaaaatctgatttttattgacactccaaaagtacttactgtcttatttctcgtttatggtctaggtggcttgctgaccggtccttcttgaccaaagaagcttcaaaacccaagctctaaggaaattcatgagaaaacaattatttctctgaatttataaacattatgtacagaaattttaagctgtggtattgtcattaagaataattcaagtgcaaatcactatggggaatataaaggtgcttccttctcttgcatgcccagtcgtatctgactgttttgatgcctcagactgtagccaccaggctcctctgtccatggaattctccaggccagagtactggagtgggttgccatttccttctctattccttctcttaattatctttgtttctagtctttcatcaaagaaataaatgtttcctcaattctagttaatatctatcctactatttccaaattattgatttaatgcaagcgtagttgtcctcagtagaggttcttctatcaaaaagtaaactaaagcctctaataagtaattttggaaaaaaacaaagcagaaatctattgcttggttaagctgacaaactgtatgatgatctaataatgacagaactcagcagtaaaatcataaatcttacacttggacaagcatctactagtactgatgtatattgtagaaagtgaaagtgaagttgctcagtcgtgaccaactctttgtgactccatggactgtagcctaccaggcttctctgttcgtggaattttccaggcaagaatactggagtgggttgccatttaatcagtttatttttactcttagttttgacatctatctatccatccatacatcctcaagagcacagaaaactgaatgatagtccataaaagttagcaccatgctaaacatattattcaaggctttgcatatgtagtctttattctagcagttctagcagttctagcagaaataaataacaagaatgaaacttttcctcaataaaataaagtactgaaagaaaattatacctacataagtttcatatgaacatagtaacatacactatattttcagctgctagggaaaatgctgccttcttatattttttgacagtgtagcacagagaaaagagcaagcatgaacactggagtcaggaagattaggctcaaatccctggcatgacacttactagcttatgtgactttggggaagtaacttaacatctcataacctgagtttcctcacctacaaaatgaagacgacagtactgttgtgagaattaaatcaagagctgaagctttgcaatttgcgtacctggcacatagaagatactcgaaaatgctagtttcacaaatatgttaatggtactactgtctacattaacaggatcttatctaaatgattaatatgctttttaggtcattagaacaacaatgctacaccacattgaaacaatacatgctatacttcatatgtactgccatttatgagttactgaagaatacaggatgaatttgtcacagtgaaaaaggtttggtcttttatatttcttactttaactaaggtataagttaaagctttgacctaacaaacaatatagcatctagcaggatgtttcacttttgtaatgattaatatgaattttactcaaaagaaattatcctttacttatattttctaaacattttaaatgacctgaagttctacttcaagtcccatcctgattaatactatcaatgtgcctttagctaattcctcctgacaaagtccaaaaaataaaaaataaaacggtaacacatgcttattaaattttgagacaattattacctataaacaaaggaatcagatttttttcatcatttctttctgatataaaccagaagtgatctgagggagtgctgactggataggtaagaacatggaaatgtaaagtcttgaacttacttcaattgtatgaataatatctctgggaccaataatttctggatcatatttaatatgtgctttgttggttgccagggccacagagcagtagaagatccctctgtgttttgtgagggtagactctattttatggacacaggaggcacatgtcattcctctcacctgttaaagacaaaggctttgttattcagaaatgcacttatttccctccattaaacgtgttattactttaaactgaaagaaatcctataacatggtattaacacaaaaaatcttatctgcactattaatatgctttagatacgaccattagatcactgtttttatatcacattgaacaaagatatggtcccagctacaaaagttaagggcttcccaggtggtgctagtggtaaaagaacctggctgccaatgcagaagatgaaaaagatgcaggtttcatccctgggttgagaagatcccctggaaaaggaaatggcaccttactccagtattctggcctggagaatcccatggacagaggaaccgggtgggctacagtccatggggtcgcagacagtcagacataactgaaatgactcagctagcaacaggttaaacagaagaggatctcattaaaagtctccctcttcctgttacactcactgatagaggatttgacaactatcactgtttcttgtattcagtgccttgtttccctctaaatttttctcaccctgctcagttcagctcaattcagtgactcattcataaccaactgtttgagaccccatggtctgcagcacgccaggcttccctgtccatcaccatttctgggagcttattcaaactcatgtccatcgagttggtgatgccatccaaccatctcatcctctattatccccttctcctcctgccttcaatctttcccagcatcagggtatcttcaaatgagtcagttcttcccatcaagtagccaaataattggagtttcagcttcagcatcactcctttcaatgaatattcagaactgacttcctctggatggactggtttgatctccctgcaatccaagggactctcaagagtctttaccaacaccacagttcaaaagcatcaattctttggcgctcagctttctttgttggcaaacgtctctactttttaatatgctgtctaggttggtcatagcttttcttccaaggagcaagtgtcttttaatttcatgggtgcagtcactatctgcagtgattttggagcccaagaaaataaagtctctcactattttcattgtttccccatctatttatcctgaagtgatgggaccagatgccatgaccttagttctctgaacgttgagtattaaaccaacattttcactccactctttcactttcatcaagaggctctttagttcttcactttctgccataagggtggtgtgatctgcatatctgaggttacggatatttcccccagcaattttgattccagcttatgcttcatccagcccagcatttctgatgatgtactctgcatataagttaaataagcagggtgacaatatacagccttgacgtaatccttttcctatttggaaccagtctgttgttccatgtccaattctaactgttgcttcttgacctgcatataagtttctcaagaggcaggccaggtggtctggtactcccatctctttaagaattttccacagtttgttgtgatacacaaagtcaaaggctctagtgtagtcaatgaagcagatgtttttctgtaattctcttggttctcaatgatccaactaatgttggcaatttgatctctggttgctctgtgtgttcaaaatccagcttgaacatctggaagttcagggttcacatactatctcacatactgagaattttgagcattactttgctaacatgtgagatgagtgcaactgtgcggtagcttgagcattctttggcattgcctttctctgggattggaatgaaaactgaccttttccagtcctgtggccactgctgagttttccaaatttgctggcatattgagtgcagcacttgcacagcatcgtatttcaggatttgaaatcgctcaactggaattccatcacctctactagctttgttcatagtgatgcttcctaagtcccacttgacttcacattccaggatgtctggctctaggtgagtgatcacaccatcatgaatatctgggtcgtgaagatcttttttgtatagttcttctgtgtattctcaccacctcttcttaatatcttctgcttctgttaggtctataccatttctatcctttattgtgccctactttgcatgaaatattcccttggtatctctgattttcttgaagagatctctagtctttccagttctattggtttcctctatttctttgcattcattgctgaggaaggcttttttctctctcccttctattctttggaactctgcattcaaatggatatatctttccttttctcctttacctttcacttttcttttcacagctatttgtaaggcctcctcagacagccatttttccttttttgcatttctttttcctggtgatggtcttgatccctgtctcctctacaatgttacaaacctccatccatagttcttcaggcactctatctatcagatctaattccttgaatctgtttgtcacttccactgtaagggatttgatttaggtcatacctgaatggtctagtggttttccctactttcttcaatttaaatctgaatttggcaataaggagatatgatttgagccacagtctgctcccagtcttgttttcggtgactgcatagagcttctccatctttctgcaaaaattataatcaatctgattttggtattgaccatctggtgatgcccatgtgcagagtcttctcttgtgttgttggaagacggtgcttgctatgaccagtgcgttttcttggcaaaattctattagcctttgccctgctgcattttgtactcaaaggccaaatttgcctgctactccaaggtatctcttgacttcctacttttgcattccagtcccctataatgcaaaggagacatctgtttttggtgttagttctacaaagtcttgtagctcatcacagaactgttcaacttcagcttcttcagcattagtggttggggcatagacttggattactgtgatattgaatggtttgccttagtaatgaacagagttcattctatcgtttttgagattgcatacaagtactgcatttccctggtggcacagagggtaaagtatcttcctgcgatgcaggagacccggattcaatccctgggtcaggaagatcccctggagaaggaaatggtaacccactccagtattcttgcctgcagaatcccagggacagaggagcctggcaggttacagtacatggggtcacaaaaagtcggacacgactgagcgacttcactttcttttctttcactgcgtttctgactctttcattgactatgagggctactccatttcttctaagggattcttgcccacaatagtagatataatggccatctgagttatattaacccatttcagtccattttagctcgctgattcctaaaatgtcaatgttcactcttgccatctcctgtttgaccacttccaatttaccgtgattcatggaccttacattccaggttcctatgcagtattgttctttacaacttggaatttacttccatcaccagtcacaatcacaacagggtgttatttttgctttggctctgtctcttcattctttctggagttatttctccactgttctccagtagcatattgggcacctactggcctgggaaattcatctttctgtttcctatcattttgccttttcatactgttcatggggttctcaaggcaacaatactgaagtggtttgccatttccttctctagtggaacaccctgctaaagcatatgtatgtatgtaggtatgtatgtacatatatatgtatgtatgttcatatatatcctttagtattacttctagtgaaggttaataaatgacaaaagtgttctacctttctccaaaaatgtattttgtcctatgtcttgagtaaagttataaactctacagtggaagggcaggacttctggaatgactgtgcaaggagttcagcaaatccttgctccaaatggcaatgattaaactgcaaagtttaatcactggacaaaagtttcaaaacccaaccactgaaatattatgagaagtaaccaaaaggattatgtaacaacttacaaagtatttattcaagaatatccactaaaagaacatcatcaatagcagaggaaggatttctgaaaattctcccctccctaaaagcaatgagaaaatctgcaaaagttgtcagtaccaactatttcagaaaagttagaaagttggtgggaatgaaaattgctgcagccactatgtaaaacaagatggatcttcctcaaaaactaaaaatacaactaccatatgaccctgcaattccacttttgggtacaaatacaaagaaagcaaaaacactagttcacaaagatacaagtatctcaatgttcatagcagcattatttacaatagccaagatatcgaagcaacttaagttccatcaatagacgaatggatgaagaatatgttgtatgtatgtatatgtgtatatatatacacacacacacacacacacacacacaggggaatactactcaaccacaaaaagaatgaaaatttgccatttgcaacagcatgaatggagttggaggatatcatgcttagtaaaataagtcatacagagaaagatgaatactctattttatcatgtatatgtggaatctaaaaaataaaacaaatgaatataatgaacaggaacagaatcgtagagaacaaattagtggttatcaatggggagaaagtagggaagagggacaatataggggttgggattaaaaggaacaaactactatgtacaaaataagctataagtatatattgtacagcacaggatatagagccaatattttacaataacattaaacagaatataatctgtaagaattctgaatcactattctatatacctgaaactaatataatattgtaactcaactacacctcaattttaaaaaactgattaaaaaaaagtggaaattaaaagcttacagcaatacaggaagcatttattcaaaacaatcagataaattccagtaaaatagtaagctatgtggcattacaatttgctttattcccatcccctctgtccagctcggtggtagctatgaagacaaacaggccacaatcatggtgaaaaacagcatcaggggagccaccagagagaaaaaaaaggattggcatgtcttcaaagtctcattcccatagaactgccgttatttgacctgtctgatggttctctgaaatattccacttgcaaagctgtctgtctgtccccgaccatctcagtgcatacaaaaagccttttccccaggagaatctgtcaaaacaattaggggaaattatttaaccttatggctgcctgagccaacggataacagctggggaaaacaacagactaacaaaagaccctaaaagggaaaaagctgggaaggaagatgtccataagagttccagcacattcctaggaatctagaagaccatgcacatgcatagggctatgcacatgttcagggctgtgtgtatcttcagaaaagaactgaaagagccctaagttctcacctcaggctgacctttaggctctgtagaagcaggaattgaagtttaaggcaaaactgacaactgcttggctgagtgttcaaggcatgcctcaacatttacaaagagctatttagcaaagacttggatccttttttttcttttttaaaaaaaattatttattttttaaatgaaggcaactggtttacaaaatttgttgatttctgtcaaacttcaacatgaatcagccataggtatacatatatacctatatgtctgctccctcttgaaactccatctgatctccctccccatcccacccctctaggttgatacagagcccctgtttgagtcccctgagacatacagcaaattcctattggctatctattttacatacagtacagtaaacaaaaacaagaccaggagcagactgtggctcagattatgaacttattaccaaattcagacttaaattgaagaaagtagggaaaaccgctagacctttcaggtatgacctaaatcaaatcccttatgattatacagtggaagtgagaaacagatttaagggcctagatctgatagatagagtgcctgatgaactatggaatgaggttcgtgacattgtacaggagacagggatcgagaccatccccatggaaaagaaatgcaaaaaagcaaaatggttgtctggggaggccttacaaatagctgtgaaaagaagagagccaaaaagcaaaggagaaaaggaaagatataagcatctgaatgcagagttctgaagaatagcaagaagagataagaaagccttcttcagggatcaatgcaaagaaatagaggaaaacaacagaatgggaaagactacagatctcttcatgaaaattagagataccaagggaacatttcatgcaaagatgggctcaataaaggacagaaatggtatggacctaacagaagcagaagatattaagaagaggtggcaagaatacatggaagaactgtacaaaaaagatcttcacgacccagataatcatgatgatgtgatcactaatctagagccagacatcttggaaagtgaagtcaagtgggccttagaaagcatcactgtgaacaaagctagtggaggtgacagaattccagtggagctgtttcaaatcctgaaagatgatgctgtgaaagtgctgcactcaatatgccagcaaatttggaaaactcagcagtggccacaggaccggaaaaggtaagatttcattccaatcccaaagaaaggcaatgcaaaagaatgctcaaactaccacacaatttcactcatctcacacgctagtaaagtaatgctcaaaattctccaagccaggcttcagcaatacgtgaaccatgaattcctgatgttcaagctggttttagaaaaggcagaggaaccagagatcaaattgccaacatccaatggatcatagaaaaaccaagagttccagaaaaacatctatttctgctttattgactatgccaatgcctttgactgtgtggatcacaataaactgtggaaaattctgaaagagatgggaataccagaccacctgccctgcctcttgagaaatctgtatgcaggtcaggaagcaacagttagaactcgacatggaacaacagactggttccaaataggaaaaggagtatgtcaaggctgtatattgtcaccctgcttatttaacttatttgcagagtacatcatgagaaacgctgtgctggaagaaacacaagctggaatcaagattgccaggagaaatatcaataacctcagatatgcagatgataccacccttagggcagaaagtgaagaggagctaaaaagcctcttgaggaaagtgaaagaggagagtgaaaaagttggcttaaagctcaacattcagaaaacgaagatcatggcatctggtcccatcactccatgggaaatagatggagaaactgtggaaacagtgtcagactattttttgggggcttcaaaatcactgcagatggtgattgcagccatgaaattaagacgcttactccttggatgaaaagttatgaccaacctagatagcatattcaaaagcagagacattactttgccgactaaggtccgtctagtcaaggctatggtttttccagtggtcatgaatggatgtgagagttggactgtgaagaaggctgagtgccgaagaattgatgcttttgaactgtggtgttggagaagactcttgagagtcccttggactgcaaggagatccaaccagtccattctgaaggagatcagccctgggatttctttggaaggaatgatgctaaagctgaaactccagtactttggccacctcatgtgaagagttgactcattggaaaagactgatgctgggagggattgggggcaggaggagaaggggacgacagaggatgagatggctggatggcaacactgactcaatggacgtgagtctgagtgaactccaggagatgttgatgaacagggtggcctggcgtgctgcgattcatggggtcgcaaagagtcggattcaactgagtgactgaactgaactgaatgtaagtttccatgttactctctccagacatctcaccctctctcctcccctctccccatgtccataagtctgttctgtatgtctgtttctccattgctgccctgcaaataaattctttggtaccatccctctagattccatatgtacgtgttcagttcagttcagttcagttcagttcagtcgctcagttgtgtccgactctttgcgaccccatgaatcgcagtacgccaggcctccctgtccatcaccaacccccagagttcactcagactcacgtccatcgagtcagtcatgccatccagccatctcatccttggtcatccccttctcctcctgctcccaatccctctcagcatcaaagtcttttccaatgagtcaacttttcgcatgaggtggccaaagtactggagcttcggccttagcatcattccttccaaggaaatcccagggctgatctccttcagaatggactggttggatctccttgcagtccaagggactctcaagagtcttctccaacaccacagttcaaaagcatcaattcttcggcgctcagccttcttcacagcccaactctcacatccatacatgaccactggaaaaaccatagccttgactagatggaccttagtcagcaaagtaatgtctctgcttttgaatatactatctaggttggtcataactttccttccaaggagtaaacgtcttttaatttcatggctgcaatcaccatctgcagtgattttggagccccccaaaaataaagtctgacactgtgtccactgtttctccatctatctcccatggagtgatgggaccagatgccatgatcttcgttttctgaatgttgaactttaagccaactttttcagtctcctctttcactttcatcaagaggctttttagttcctcttcactttctgccataagggtggtgtcatctgtatatctgaggttattgatatttctcctggcaatcttgattccagcttgtgtttcttccagtccagtgaggcgttagtatatgctatttatctttctgactaatttcactctatataataggctccagtttcattcacctcattagaactgactcaaatacattactttttatggctgaataatattccattgtgtatatgtgccataagttctttatccattcatctgtcaatggacatctaggttgcttccgtgttctagttattgtaaacagtgctgcaacaaacattggggtacaagtggtttttcaattttggtttcctcagggtatgttcctaggagtgggattgctgcatcatatggtggtttcattcctaagggctgggatacttattggttccagatatttaaggaaatcactgtggagttgttagctaactactgagctaaccagagacttcagtggacacacataacaaagaacattgactttatataatcagttcagaaatcactaaaaaaacagtaacaatgacaaataacaagaaacaacaagccataaggctaacagtaatctttcaacagaaactctgcagaccagaaaggagtggcaggatatacttaaagtgatgaaaggaaaaaaacctacaatcaagattactctacccagcaagaatctcattcagattctaaggagaaatcaaaagctctatagacaagcaaaagctaagagaattcagcagcaccaatccagctcttcaacaaatgctaaaggcccttctctagacaggaaacacagaaaaggcctacaaaatcaaatcaaaaataataaaataaatattaacaggatcatatttatcaataatcaccttgacataaatggattaaatactccaaccaaaagacaaagactggctgaatgtatacaaaaacaagatccctatatatgctttctaccagagactcacctcaaacctaaggacacatacagactgaaagtgaggggctgaaaaaaactatttcatgcagacagagatcaaaagaaagtgggagtagcaatagttatatcagatagaataggctttaaaataaagaccatcataagagacaaagaagttaagtgaacaagacaaagtcactcagtcatgtctgactctttgcaactccatggaccataaagttcacggaattctctaggccagaatactggagtgggtagcctttcccttctccaggggatcttcccaactgagggatcgaacccaggtctcttgcattgcaggtagattctttaccagttgagccacaaggaaagcccaagaatactggagtgggtagccaatcccttctccagtggatcttcctgacccaagaatcaacccacggtctcctgcattgcaggtggattctttaccaacttagctatcagggaagccctaaggacactacctaatgatcaagggatcagtccaagaggatataacgattattaatacatatgcacccaacataggagtacctcaacacacaaggcaaatcctaactactgttaaaggggaaactgacagtaacacaataatcgtgggggactttaataccccactcacaccaatggacaggtcatccagaccaaaaattaataaggaaacacaagttttaaatgataccttggaccagttggacctaattgatatcgacagggcatttcacccccaaacaatggatttcaccttttctcaggtgcacatgaaacactctccaggagagatcacatcctgggccacaaaccaagccttggtaaatttttaaaaaactaaagtcatttcaagcaccttttctgatcacaatgctgtaagattaaaaatcaactacagggaaaatctataaaaaacacaaccatatggaggctaaacaacacatttctgaacaaccaacagatcactgaagaaatcaaaaaggaaattaaaatatgcctagaaacaaatgacaatgaaaacatgacaaccccaaacctatgggattcagtacaagtggtgctaagagggaagttcatagcagtacaaacctacctcaacaaacaagacagacatcaaatacacaacctaacctaacatccaaagcaactagaaaaagatgaacaaaaacccaccaaagttagaagaaggaaagaaatcataaagatcagagcagaaataaatgaaaaagaaatgaagaagactatagcaaagatcaataaaactaaaagctggttcttcgagaagataaacaaaatagataaaccattagcaagattcatcaagaaaaaaaagggagaagactcaaatcagtaaaattagaaatgaaaaaggagatgttacaacagacaacacagaaatacaaaagatcatgagagactactatgagcaactatatgccaataaaatggacaacttcaaagaaatggacaaattcttagaaaagtacaaccttccaaaactgaaccaggaagaaatggaagatttgaacagaccaatcacaagcacagaaattgaaactataatgaaaaatcttccaacaaacaaaagcctaggaccagatggcttcacaggtgaattctaccaaaagttacagaagagctaacacctatcctactcaaactcttccaggaaactgcagaggaaggcaaactcccaaactcattctatgaggccaccatcaccttaataccataacaagacaaagatgccacaaaaaaagaaaactacaggccaatatcactgatgaacatagatgtaaaatcctcaacaaaatgctagcaaacagaatccaataacattaaaaagaccatacatcataatcaggtgggctttattccaggaatgcaaggattattcaatatatgaaaatcaatcaatgtgatataccatataaacaaattaaaagataaaaaccatatgattgtttcaatagatgcagagaaagtctttgacaaaattcaacagccatttatgataaaaactctccagaaagtaggcacagaaggaacatacctcaacataataaaagccatatacaacaaactcatagcaaacattatcctcagtggtgaaaaactgaaagcatttcctctaaaatcaggaacaagacaagggtgcctactcttaacattacttgccttttgactttggttatggttttttctccaaacatgaaatttttatgtacccaaatttatcaatcttgtcttttatgcattttgtatgacacttaaaaagactcttcctactctaatattattttttaaacattaaattaggtgttatcattgggaaaagctaggtagtggttacaaggaaatcctctgtactatttttgcaacttctttgtgattttaaaattatttccacaatggactgatggactaatgtatgataaaacaaatagagtaaaacgttaattgtagaatacatgcagtgtgtttgagagtgttcaactgcacaattcttttgacttttccaatgtctgaaatttttataataaaacattgaaaaaaaactctaaatatgtcttctagtaatttcatggttccatttcttacattcaaatttttgtctgagctggaactttggtacaaggttaaattttttgttttaattatttaagttatacaaataaaatattttctgggttggcaaaaatgtcattttaaaccaatataacttatacctagctttatgactttatttataaaatttaagtctttaatacatctagaatttattcttttacatgctactaggtaggaataatactatatttttaaagttaattttcatttattcattcaaacccaattcctgtttattggttcttaatagagatgatgattatcttttacattctgcacttgaaagtcaccactgtcaatatctttccaatttccttcattttcattttatgttttactttcccaacattttaattattttttgatctcttttctgatttcttgccaagtttttcctggaaattctattaaccaacaaaccttcttacttacaacaagttccaaaacaccatctccttcatcagcattttctatcacaatggctccaaatccaagctctcggattaactcggctatcactgggggttgtatgagagcagggttatacctcacttctgccttgccagccatcagagccacaagtacagaatatattcctaggaatattgataagaaaaacaagtcagataacatttctcataaaagagtagtctttaaaaaaaatatttatttatttgactgtgccaggtcttaatgcagcatgtgggatctaattccctcactgggaattgaacccaggtcacctgaatttacggcattgagtgttagccactggcccattagggaagttcccaagaataactttatagtagttttcttttcatttaactatggaagggttaagtgaatctggaaaattttatttcttcacttttatacaatcttgaacccaaataaaatttttgaaaacttgtcctcatttttaaaaactttttattatggaaaatttcaaatacacacacacacacacacacacacacacacacacacacacacttaagacagaacaacataataaactcaatgtatccatctctcagcttcaataactatcaataatactgggttgctcaagtttcatatatattcctacccactcatccctactctctaccctgattattctgaagcaaatcccaaatatcatataatatgtaaaattttaaatatgtatctctaaaagataagactctttttcttggacttccctggtggtccagtggctaaaaatccacttgccaatgcagagaacatgggttcaatccctgatcacaaggatcccacatgctacagggcaactaagcccatgtaccacaacaactgagcctgcaagccacactattgaagcctgtgtccctagagctcgtgcttcacaacaagagaggccaccacaatgagaagccctcgcactgcaactagagaagccccgttcaccacaactagagaaagcccacacacagcaaaaattgaaaacccagcacagccaaaataaataaataaccctttaaaaaaagactcttaaaaaaataataataccattatcaaacctaaaataattcttcaatatcatcaaacatccaggcaatattcacatttccacaactgtcttagaactgtttaacactgtttgaattgcgatccaaatataaagtatttttaggaaatgaatataaagtatttttagaaacctgtaagatagagtcctagagaaaagaactcatttacttaggaaatcaatgtaattgtagcaaagaatctaagaatataccaacatacgcattataatattatcaaataacagtcatttctctctcaaattgtattgcctgacacacattaatctaaaatgctcttattccacccccctccaaaaagtgccatacagcttaacaaagcagttcattttatggcagtcatgctgttctctggtatcagcattttgttaacaaccactccacttctctaggtcagctattgctgtcatttccaggaagaaaattaataacatgcagcagaaatggcagttccttctaggaatctgtggcacttggtggctacctgacagggaataggaatcagcaatccataggtcagcactggggtctgataaaaatttaaaaatatccaaatactaatttaataatagtttttaatatgaaaataaactatctaatataatctaagctttctatatgaaattggctaccaaaaaaaagtactcttttctttggagaaaaaaggtagttacacactgggctttgtgagtaccaaataattcagaggatcggatcataggaaagtatcggtgataagagaagggtatagggaaaggaaaaatatcttttcacttcagttgaatgtaatctatagccaaaaagaaacagaaaatctgttttttcaagtttcaaaaatattttatacttttataaattatggacaattttttaaatttttacttcaaaatacaattagaacttttttctattcatttttaaaaatataatccagatgaaactgagggaagaccagtgccacttaattaaaaaaaaaacagaagtgaatataggtagattgtgaatgcagtgaatgttgacccgagctaggccaaagatatttctaaccaggttaaaaggtggtaaaggagcaatagaaagtaattgaaacaatcagttttagggatttaaaaaaaagatctgtaattgttatctgcagtagccattgcttgtcgcatgagaaagtctatatctgaacttctcctaaaatagttggttctaaagttaaacaagccccttggaaatttctttttgctttcattttcttgcaaccttcctcctattcttgttaatcacttaaacaaagtataatttagcccagactgcattctaattagatataatgcaagatgaaatgaaggatgtagaaatgacagaatgtggacaagataatattgaacttaagatagctctagtatataataatacattttgttacaataatgttctgatctttacatataaggtgagtttactagccataggtctgtactattactctatatactttatttccccaatagtgatgataagcttatactaatcttatttaatcagcccttgtgactatcagcaagatacctggggctagggctacctgagtaccaaacctatgacttcaggctcattaaacataatcacctatctctatggttaacaaatctactacactatgcaatgaagtccattaatgtgagtgcaaaattaaaagctaaaacatctgagtgtgactaaataaacaaacatattgcagattttctaaaaatttgtaaccaaaaatgaaaacttgtacacaatattgagtaacttttgaacacttttactgcaagtaaagatcagtaatcaaactgctgcaagagaacaattctaaaacttggctttggtccagtgcttgccctgcgtatagtaatactgaaaattatggattctagctgttagttttaagcatagctttatcagaaaatttatgtttcttaaaatccgctgcagccaaggtccataaagaatagtaatcttatgtatttccttctgctgctgctgctaagtcgcttcagtcgcatccaactctgtgcgacaccatagatggcagcccaccaggctccgccatccctgggattctccaggcaaaaacactggagtgggttgccatttccttctccaatgcatgaaagtgaaaagtgaaagtgaagtcactcagtcgtgtccaactcttagtgaccccatggactgcagcctaccaggctcctccatccatgggattttccaggcaagagcactggaatggagtgccattgccttctcctttccttctgctatttgactacaaatttcactgatattaaagtgcagccatgagattaatgagacaggaactatatctaagggaacaaaaactggctatgaggaagtcaaggttgtcctgtaaatcactgatagtctttatgaggccttggcaataatcataaacatggttacaaaacacataagaggacaaaaaggacagagttctcaaattagtacataaaatagcaagttttaagaatgtcttaccttcttctcgtcttaaattccgttcaatgtttgctacacaggaagcacaagtcataccagtgacctgtatataacacttagatgaagtctttggctcctccttgtcatgaattggtgtcatcattttagtgtgaaattcattagttgaggtcaaaagtggcatttctgatgagggctgagctattactaccaacggttcatttgtatctggtggacagggaaagattcttttcatttgaggtattctccagctgcatcctcgtcacttatcacaatccacacctcctggcactgtcaacactgctgcagctgctgctgctaagtcgcttcagtcgtgtccaactctgtgtgactccatggacaacagcccaccaggctcatctgtccacaggattctccaggcaagaatactcgagtgggttgccatttccttctccaggcactgtcaacccattcctttaaaactgtcatggacctagagccctgtgcaatgctatctttacactttccaggatgtgacttccaagttcaacactgcccatcccaattcttgggaaaatcggaactagctgaataaacagaactttatatcaagatcttcaagcccattatctctaccccaaactccagtagacagtggtttattaatagaaaggctttagttttataatgaatttctatcattatgttaatgatttacatactggcagtaaagcaattcgtgtaagtgggacaaaaagcaatctgcaaaacagcaatgcagtacaatgtcatttaaaaattgttagagtgcatacacgagaacatgcataaggaagcctaggaaggtacataccaaactactagtagaggctatttctggggaatcaggttatagtaggaatagaataacagaaagatgaacaaatttcctctatagacactgctgtatgcttgaattttaacaataatacatagtgttttttaaattaaaatgtctttggtggacaatggaagaagaggcaaggagtaagtcagcaataatcttcatttttcacaaagtattcagagaatttttctgtagaatgtttatggactgtgaaacagtggaaagcatctgtcatcccagaagctcccctgcagtcttagcggagacttagtttatccatttcagtattaatcacctcccaagaaaggagaaagtattctttttagcacttccatgtgcctgctaaaaagctaaagattttcaactctgctgcagtgataaggaggaaaagaagtgatgtggaaatttccactaatgtgttacttctttcccttgggcaaaaaactgattcaagtctatttggctagtccatagaggaaacccttcatagcagagctggttttcaggataccgaaaaaaggcatcttttgaagaaactttaacaaaagcctgaccacttccataacaaaagcctgacttctcaaatcagttataataaaggctcttaaattttgacatacaatcacctgggggatcttgttaaaatgtagattctgattcagtacattgagggtgaggcctgaaattctgtttcaataagcttccaagtgatggcagtactgccagtctgggtatagcaaaggacactttgaatagcaaaggatgagattctcctaattccaaaattagacagtctctgatcttatatgtgaatcaattcagaaaatggtattcattcagattatgagagtattatttagaacaaagaggataaaatttaccaaatagtaccaaaagttcaaaaaggaggctcatttgctcaaaggaaatagctttggcttgggggtagaaacattattttagtctagccaagagcttattcattctatcctaattattatgaagatttaaaattttgaacttggacaatgaaaagaaagtttatattaccaattactttaactcttattaaagagtaatttagttatttcaaataccagaagtaaccaaaacaccatctgcaatttcacactctagaagtacagtattgaattaaaataagtcatagaggtaagcccttttagttacaatggcatgatttctcaacaaagattcacaaaattgtgacctttaccccagtgaatgtggcaagagcaaatgcttccatctttcacagaggcagtacaggtgttaaaaagccacagtgaattaaatggctagtttctttaaactggcttttctataaactgtagcaacactacttatgtataaatgaattcaaaagactgactctcccgcatgtgaggcaacaatcagaaaagaatccaaaaatttcaagaaagggtttctagtctgatcctcaaaactggcaggtttagtctaaagtaatatgaataaatatataatcagaaaatggcttaaaaacaactatgtttatgtttaactataaacatcatgtctgcaacttactctcaaatgattcagaaaaaggtagctacgtgtgtgtgtattgtgtgtttgaatatatgtctatagacatatgtttaaagaaaagaatgataaaacaaatgcagcaacagtattaacaatggaatccgagtaaaactggtaaacaggaattctttgtactattcttgcagcttttctgtaagtttgaaattagagattaaaaagttacaaaaaaggaaaaggaatttaattgagtattttgtttgctttaattggttagtgaagacaacttcatatattatatatcttcttacgataatgacgatattggtggtcatgataaaaagcacctcctatatttctatttcgtttattaacatttattgtccacccaggactggtatgacatgaaggcgaaatgcaatgatccctctaagtctatatgaacaggtttcagagtggtagactatgaagcctggaccggcactgacactaacattcagaaaatgggcagccacaattctggtggcatcttaaactctgattgatctatagccgaaacacacaatgcagtcaattgatattaactttttatcccaataatataatatgggttactgtagtcataatgcatgttattttatggtcataatcactttgccaaggttttctacctattcattatggcttttagaatgtttgttattgttgctgcttagtcaccaagtcgtgtctgactcttttgtgaccccatgaactgtagcctaccaggctcttctgtccataggatttcccaggcaagaatactagagtgggttgccatgccctcatccaaaggatcttcctaaccctgcgactgaacccatgtctcttgcactgcgggtggattctttaccgctgagccaccggggaagtccaatgacactgtctagaaattagttattcaacttttccattaatattcagagcaagaaatttcatttagggaatttccagtttaattcaaggctaggttcaattctagttcaaaacaagttcacatgggcaaattccattggatatacatctctggtttcagttcaaggtaagagctaccagaaaacaggaagactttgggccagttctagagtcaggttaattagaatgcctaaatttgaaactacagcttaaatctactatttatctctactattttcattttctttttaaaatttttgtttgcaatatagttgatttacaatattatattagtttcaagtgtacagcatagtgaatcagccatacatatacatatatccactcttttttttttttaagattcttttcccatataggccattacagagcactgagtagagttccctgggctatacagcaggttcttattagttacctgttttatatataatagtgtgtatatgtcaaccgaatctcccaatttattcctcctccccttatcccctgctaatgtaagtttgttttctacatttgaggctctattttttcttttaaaataacatttgcttctcccatattatatatacataaatatatacaaatatacatataaccctgtcacaaaaaacttaaaatacataggaaagcacaatgaaaacaaattatcacctttaccctaccactcacaaataactacgtttaaaattttgttcatattctaccaggaattttattcatatacataaataacaaacatagcataaatccttatacatgtgtttataaaattttgaccatatgactttttcacttgctttttcatttagcaaaatatctcactttcccatggcattaagtatcttcaacaccataatttttatggcttctgagcatttcctcatatggaggtatcatgctttatttaatgtttctagtttctatataattatgcaaacatcattatgcatctttatatatgtttcatatatgctgctgacatatgtcatatttctaaaaagtagaactacagtgcctattactcatttttcactgataaaagccaaaagaattagcaaagtgtaaataaaagaacattagaggaatcaaagaaaaaaatgataattacctgacaaggaagcatcaaatcccatgttttctatggcttctctcaaggtttctggagaggttagtaaaggatcatactcaacagtccctttgccatttgcaagtgatacttgaatggattttacacctgccttttttgatatgacaccttcaatagactgcacacatgaattacaagtcatgccatcaatgtttatcacagtttcttgagttagaggctggctaactatgttcaaaggactcttttggagagatgaactggagggagagtttgaggtactctcaatttcacttgcactactaactctatattgcccttgtgatatggcctctattgcttttttcagtgtttctggagtgactaaacttgcattgtactttactatggcagatttattctctaaagaaactactacactgcttatatgttggagtgtagataaagcactttcaatatttgacacacatgatttacaatgcatgccatctatggtgaaaatgactgttgaattactggtgtatgatggactcctttgctgtgatccttctgaggatttgactggtgtgttctttagacgttctatgtcaatagctcccaatttgaggtacttgggctgttttttgatgaatgctgtaaagcccacaacttcaatctgcttttttatttcctctgctgtgataagatgaggttgataaacaacagtagcttcttgactgtccaaggaaactagttaatagaaagaaaaatatttaattcagttattcctgagccacttcagaaaacattctgtagaccaaattaataccacacataattgtttctctctcattgttgtcattatcctttcttaaaataattctgttcttttcagaaaatgttactgatgtggactagaaaaaagcaaaagatgtgaccactgtatctgtggtctccaagtttctgcatgcctgaatagaaacagaggtcaagaggaccctaggcatgttgtgttaagaaccctgaactccatgaatgccaccttggctgccttttatgctagttcaagattcatgtaacttttaattataatcattaactttacttgacattaatcctgggaatacactgtttctcaaacttcaatgaagcagtaacattctagtcccacagattcaaaacccatgcttaaaggaaaatgctaaagttaaaagaccaaaacagaaaaccaagccttataaagcaatcaaataaacaatatcagtcatactacctttaattcgctgaacaccttgcagtttcccaatttttccttcaatggtgctagtacatgaatggcaggtcatcccttccaccttcatcttcagcatgacttcacctggttgagccatactataatcttcgcaagttcctgactttttttccagagttccagtatctaaactgagatcaggaaccagctctactatctgattggcattcactatagaagggattattgtcaccactgcagttctctgctgaggggaaattttaatatctgtcacacccttggtcttgagcaatgtgctttggatatggtcccatggcggaaccagtgaagcagtaacagtcagaaacacagtttcagttaaaacagggagaggcttaggattgtggagaatagtatcaaagcccatgtcatcaatagcttcctgcagggtctttggagtttgtagtttggggtcataaataatagttgcatttttttcttccagtgaaaccttttggaaggaaattgcagaagtaattttaattaaattttatgatatggaacttaaaattatcaatcatcacaccaccatcaagaatgaaacaaataattaaatcaaatagagcttctttattagttctcatctttcctattctctttagaaagtagcacaaaatgtcttgtgtacctacaggaatggtaaagctctatgtaggtgtacttgactcaggtaatgattaggcatttgaaatgtgcacagacaaacacaccttagaatttcataacagagaacaaactactcttcatctcctttcacaaaatattccaacacttagcactctaccaattcaaaagataatttcaggaaagaggatcacctacataaaacaaattggaaatgaagtttaaagttttaaaatgttcaattaagataaacttgttgcaagaaaaggtataaacatgctggtttatgaaggccaatattcataggtttttttttttctttcacttgattttatttttttcctttcacttgattttagcaagtatttctataaccttctactatagtccagtattacttttgtgcaaaaaaagaacatctttatcatttttcctgatttgattattaaaataattattgtattcttaaagctcagcaactgaatataatttaactactacctggacatcttaccctgcatctctttgggtaacacatgggttataaagatttatgaagtagtcacatacacacacacacaaaaaaaaaactgggttgagtcagaagatttgagctccagtgtcaattctccatttataagttaaccacactcactagctctaccatcagaaaaatgaagaaatgtgctctattatcttccagggttattataaggatcatatgagtaaacaggaaagtagttctttgaagcagtaagtcatataaaagtaaacactgcaaaactaatatttatcaaacacttattatatgtgccaggaactaagattctcatgatacaaagctgatcatgacatagtcacagggagcaatgctagaacagaggacagaaaaaatgaatacccattcatccctgggaatgtgtgtcaaaaaagcttcttaggggagataatacttgaatgttaaaggaataacagaaattagcaaggacatttgaagcagggaactcatgacaaatgtaaacacaaaagtagagaaaaatgaaaggctgcataattaggcaactgctttatcatgggggctcttgtatgccaataatcatctgtactttattctataggtaatagagagtcatggaaaatttaagcaggggaatgacatagttatatttgcatttagagaagaatcattttggagtgatggaactgtgctgccctggcttggggtagttaaattaatctatgtgtgttagtcgctcagtcgtgtccgactctttgcgaccccatggactgtggcccgccaggctcctctgtccatgggattcttcagggaagagtactggagtgggtggccatttacttctccaaattaatttatacatgtgctaaaattaaccaaacctaaaaaaagcaagcaaacaaacaaaaaattcatagaactgtatgccaaaaagaagtcaatttgggggtataattttaaaaacaaaaatgaaaagattaaaaaattcagttcctcaattgcattagccacatttctagtgttcaatggccaatgtggctgccacaagggacagagtaaatacagaacattttcaccattacagaatgttccattggacagtactgctctatgtactactctacttctgatcaagtgccaaacttttaaaaagggaaggggatttttccccctctaggcttaaatatatctgatatctcataaacaagtcctgattttgagctaatccccaactcctcctgccaaatttcaatttaccaaagtacacaatgaggaagtgttgtgaaaattgatttttaaaagcaaaaatcactttatcacccaatgatttgctatactttttattgccataccctgtcttctagatataaaagacaaaaaaaaaaaaacaaggaaactatgtatataaaatactatacaaaaaagttgtattatcctatgttgttttcatgttgcaaaccagagaacacttccttattcagtaactttatttgtgtgttttaaggccaggtcagccatatctagcacaaaaaaatgttcccctttgggataacaacacttgacttttcctctgaatgctaagatatcaaagagatttttcaagcccaaggtctcaaaggaaacaaaaacaggcagcaccttcgtgtaagaggaaattcaccaagtgtttatcacaatactattctgtatgccaaatccttgagcaggaagctaaaatagcacttatttatttaacaaacatttactgaatacctatcacgtgctagttatccaacggtgagtaaaagcaagcacagactccaaagaactggaaattgctgggagcaatctgattctcggtctgtgccactctccttgatcaccaccaatgcaaaccaccttcgcctattccccacagtgctccaaagtttcaactgcttgtttttcttctcagaatctttcattaggaatcaatgttgttttgtttttttcccaggggaactacgtttctattttatcaatagttcccctgaaaataaacatccaaaagtctacaatctataaatgtggctcctatgaaggactcaaggtggagcactgttcactatatttagatgaaggtaggagtgaaagatggagaaggaaatggcaacccactccagtattcttgcctggagaatcccagagacagaggagcctagtgggctgccgtctgtggggtcgcatagagtcggacacgactgaagagacttagcagcagcagcagcagcaggagtgaaagaagaaaagaaaccaaacatactctgtggcctcaacagtattaacagtgctgtagagggtgctgtccatagatattgtaaagatccattattttaatgcataaggagttatttgtctactgaaatgtctaaaacatgaaattcaagcatcatatactttatctgtatgtaatttctgtataatttgcataaatataaaaaggttgcatcatctattctcaagcaagaaacttaagacaaatctaagggcttaagtttcttgaaacacagttcttttgacttctaattttctagaaaagctaaaaactgtgttattaccacttcttgggttgtcattagtatattttcttttgtgtattccttctcatctgaaaataaaaggtgatccaacttcctatctgaaagctaggacactgaataaattgctcaagaaatgcagcaagaaaatgaaagagctagaattcaaatgtaggtctctgtaactccaaagtccatactctttccatttatacatgatgaggctagatgatctttgatctactcgaaaaaccaaaattctatgcctgtgatttgaacaatttgtgacttataaataaaaatacctcataagtatgaaatatttctagtgtgtgaactaaattttagttctatgtttacttttcccctctacatttcatatcttctcccatatcagtttaaataaaaaatgactaacagaacgtatctccttagctttttaccaagatttgacaattatattctatattctaacatttctccatttttaaaagtcactttgggaaaggtactttgctttagcacactgaaattcccttttatccccccaggagttaactgatacttcaacataataaattcagattcagtcagttcagttcacttcagtcactcagtcgtgtccaactctttgtgaacccatgaatcacagcacgccaggcctccctgtccatcaccatctcccggagttcacccagactcgcgtccatcgagtcagtaatgccatccagccatctcatcctcggtcgtccctttctcctcctgcccccaatccctcccagcatcaaagtcttttccaatgagtcaactcttcacatgaggtggccaatgtactggagtttcagctttagcatcattccctccaaagaaatcccagggctgatctccttcagaatggactggttggatctccttgcagtccaagggactctcaagagtcttctccaacaccacagttcaaaagcatcaattctttggtgctcagccttcttcacagtccaactctcacatccatacatgaccactggaaaaaccatagcctttactagacggaccttagtcggcaaagtaatgtctctgcttttgaatatgctatctaggttggtcataacttttcttccaaggagtaagcatcttttaatttcatggctgcaatcaccatctgcagtgattttggagccccaaaaaataaagtctgacactgtttccatggtttctccatctgttttccatggagtgatgggaccggatgccatgatcttcattttctgaatgttgagctttaagccaacttcttcactctcctctttcactttcatcaagaggctttttagttcctcttcactttctgccataagggtgatgtcatctgcatatctgaggttattgatatttctcccggcaatcttgattccagcttgtgtttcttccagtccagcgtttctcatgatgtactctgcatataagttaaataagtagggtgacaatatacagccttggcgtactcctttttctatctggaaccagtctgttgttccatgtccagttctagctgttgcttcctggcctgcatacagatttctcaagaagcaggttaggtggtctggtatttccatctctttcagaattttccacagtttattgggatccacacagtcaaaggctttggcatagtcaataaagcagaaatagatgtttttctggaactctcttgcttttcccccatgctactaagccagtgggaaaatctttaaatggtttaaagcctattttctaacattttcataacaactcaatatagagggattcagaggttttgcaggagcttgaaaggatcctgtccttctacagagactaaattcagaaaagtaaaatgattcatcaataatcttgaatttctaatatgtctgattcttcttgcacatatattttgccaactaaatactatataaaatacacaataggaatcccatttatatcacatatgtctcaatataaattttattactgtttgctgaaaaaacaatatatatatattttaactgagtaacactctgatgtttcaataaaggatactgaaaattaaagtataagaggaaggcatcaagttctattgatatttatccaatttgaccaacctaaataaaagttacaacttaaaaattttaaatcaatgtacgaactagcaaaagacaattcttagagactaagacaacagcccaaaaccactctaaaaattcaaaggtcaaatgtttgaaaatgaaaaagatgtggagattttgttagtttaagttgtagtattgtttttctataaattgagtgttttgtccgaattttcattactaatataatttcattttcttcaaaaattatgtaactaatgaatgattattcattataaaaatttaaatacaaagaaaggaagtagtaaaagtccttctttacatgatttctctactgctagtttttaaccttggatttgatatgtctttgatccttggttcaactaaatcagaaacctatgcctgtttgaataactgattctacatcttcatggatggccatttattacctaagaatttatacaaggcaaaatgcctatattactctaatacagcatttgaaaaaaaagaaatgttcaatgcactgtcatcatttgccataccaaatgttaaagggaaaaagttccaaatagaaataaagatggatttctatatgctgacaggaaacaataagatgtatttgctaggtgaaaaaaagcaaggttagaacagtatgtatatagtatgcttccatttatatacaaaggagatacacacacatatatacacagttaacccttaaacaacaaggagatgggggtgagggcacccacctcatgtataactttacatttggccctccatatcctcagttccacaccctcagattcaaccaaccacagatcatgtagtactataacacatatttattgaaaaaatgtgtataagtggacccgtgcagttcaaacctaggttgttcagtcagcatatagatctacaaatgttattcatcttatattcagtctatttctaggagaattcatacataggaaactgataactggtttcttttgggaagcggattttactctggacatatgttacttttccaataattaaaaaaaaaatagttaatattaaggggagcaaggaatgtattgatccacaggatgaatttggtaactgctagcatctagattgttttttttttttttggccacactgtgcagcttgtgtgatctttgttccctggccagagattcaacccgggccctcagcagtgagtcctaaccactgaattgcaagggaattacctaagtggtcatttatttaaaggatagtctgttaggaaaatggactgcagcctttatctgagtaaaggaaaaagcacacaaaatgcagttaagtttcaaggacaaagtaatctgttaataaggcattaacctttagagccatttggtgcttatatctaattaaatttaattttacattaccactttcaaaaagaccaatctcagagaaagactttcacattatctacccattttattttccgtctgaacagaccactgtggcgattaaataaagcttcaagttaatctctttaaagtctacagtcttcgcagaacaagagtataacactcatttataaactttgcaatttaagatataatacccaaaatatatttaaatgctgaagctgcaagaggtataatcatattcattctacttatttcaaaattagagacttcttgactattcacttgccttgaatcctgttaattaaatctctaatctgttccactgtaacattttttaaataaaacaatcatactcagtttaacatcacaattatattaattcatatcagagttttattccaaatacaacaaacatctctttgactttaacatcaaaataatattaattcatatcagagttttattccaaatacaaagaacagctcctagacttagctgaaacaatgtcctcttcaaatctggtttctgaattgactacatattagtcttaattataatctcagaaactatgatccagaaaatttaaaccttaacagtctttgagaagtgaccaatatgtatgtgttaacatgttaagctgcattctgagtataaattatgttcggacaaggacaattttccatacagtgcctagaaagaggtgaattcaccttttgttgcccctgaaacataagcattatgagggaccttcattaaggaaaacagcacaaaactataaatgaaaaaacatctgtacaaatgcaaatattctaaatgagtatcaaaattacatgttataaagttttgaaacttaccaaataccataaaatccattaaagtaacttttttattaataatacctcctacacctgtataatattttctctttctacatgtttggctatatatgtactctgattgctgcttcatttaacagtgattttgtaaaatcattttatatatgattgtcaaatttaggaaaactatcaagtttctttcatatatgaacaataagatctctgggcatttcagaaaagtttacttgtgcagtgaactagttttaaatactctttgaattgataacactcatttatcacttttacactaggccctactcctttatgccatgaccctggtgtattggcatcacgggtggtaagaacattatcctaccagaacctgtagcacaaatttcattatacacagaagcaactaagaaccgtgtatgtacgtgcgtgcatgcgcatgtgcgcatgcatgctcagtcatgtccaactcttcacgaccccatggactgtaccctgcccagctcctctgtccatgaaattctccaggcaagaatactggagtgggtagccattcccttctccattcccttcttcctgacccagggatcgaacccgtgtctcttgcatctcctgtgtctcctgcattggcaggcagattctttaccaccagcaccacctgggaagcccctaacagccccttaaccccaaactaaacatattcccaattcaacctattaatcagaaccccaaaatgcctatggcacatccaatactacctacataaaagtgaagtctaaaagagctgggtcgaactggaagtacacaatggatttaaaggattgtggttaaattattttactttcacagaaaaagataaccatgggaacattgctacaattacttccaggccttagaaggggtagatgcaagtggcaggctctgaaacttaagcttaacgtcaccataaatctgtctctgggcctagaaaacaacacttagtaatatactttttaaaggaaggagaaaagaagaaggattactggtatactctgtatcatatgggcttctgactgtagaggcagagctggaaaaggcagaaaaagcatgtctatcttcatttttagcaaacaaattatgaatgtactctggaaactatatccttaagtatctgtcactaggatccatataaatcactgttgataacacaaagtgctttcatgttatacttctgctacttttcttgtacagcttaatccaatttaattgcatttttctgactttagataggccatgttaagcagtggtgaattctgggaagatgcagtaaacatagcagccttacatatgaggggggtacaataagtctctaggggaaaatttatacaggaatgtacttgcaaatgtcaaaagagaatctcatcctttagtgttacatagataactaggaaaagtttaataatctaaaacagtttgtcagaaagttgagggttttggaaaatgtattagttgtcatagacaataagaacctaagtaatttggagaaaaactatgtgaactagtttctagatggttaaaacagctttactgaaattagcacacaattagtaagacttagcttctattttgttcctcagttcagttcagtctctcagtcgtgtccgactctctgcgaacccaggaatcgcagcatgccaggcctccatatccatcaccaactcccagagttcacccaaactcatgtccattgagttggtgatgccatccagccatctcatcctctgtcgttcccttctcctcctgcccccaatccctcccagcatcagagtcttttccagtgagtcaactcttcacatgaggtggccaaagtattggagtttcagctttagcatcagtccttccaaagaacacccaggaccgatctcctttagaatggactggttagatctccttgcagtccaaaggactctcaagagtcttctccaacaccacagttcaaaagcatcaattctttggtgctcagctttctttatagtccaactctcacatccatacatgaccactggaaaaaccgtggctttgactagatggacctttgttggcaaagtaatgtctctgcttttcaatatgctgtataggctggtcataacttttcttccaaggagtaagcgtcttttaatttcatggctgcaatcaccatctgcagtgattttggagcccacaaaaataaagtctgacactgtttccactgtttccccatctatttcccatgaagtgatgggaccggatgccatgatcttcgttttctgaatgttgagctttaagccaactttttcactctcctctttcactttcctcaagaggctttttagttcctcttcactttctgccataagggattataagtatttgaggttactgatatttctcccggtaatcttgattccagcttctgcttcctccagcccagcgtttctcatgatgtactctgcatagaagttaaataagtagggtgacaatatacagccttgacgtactccttttcctatttggaaccagtctgttgttccatgtccagttctaactgttgcttcctgacctgcatagaggtttctcaacaggcaggtcaggtggtttggtattcccatctctttcagaattttccacagtttattgggatccacacagtcaaaggcattggcatagtcaataaagcagaaatagatgtttttctggaactctcttgcttttttcgatcatccagcagatgttggcaatttgatctctggttcctctgcctcttctaaaccagcttgaacatctggaagttcacggttcacgtattgcagaagcctggcttggagaatttggagcattattttactagcatgtgagatgagtgcaattgtgcagtagtttgagcattctttggcattgcctttctttgggattggaatgaaaactgaccttttccagtcctgtggccactgctgagttttccaaatttgctggcatattgagtgcagcactttcacagcatcatctttcaggatttgaaatagctcaactggaatgccatcacctccactagctttgttcgtagtgatgctttctaaggcccacttgacttcatattccaggatgtctggctcgaggtgagcgatcacaccatcgtgatcatcttggttgtgaagatgttttttgtacagttcttctgtgtattcttgccacctcttcttaatatcttctgcttctgttaggtccataccatttctgtcctttatcgagcccatctttgcatgaattgttcccttggtatctctaattttttttaagacatctctagtcttacccattctattgttttcctctatttctttgcattgatcgctgaggaaggctttcttatctctccttgctattctttagaactctgcattcagatgcttatatctttcctggcccctagcaccagccatttcagctcaagtggaaaagtttaactggtttcatttgaggataagtcaagtacatatgtcatacttattcactgaaattaaattattcatttttaagttttgggaccaaaggttgcagagctatttttgccacccctttttctaattaacaaattgcaaaaatatctgtctgatttttggacagttacaattagtgaaaaattgcaataatttttataaatttgagtattctgaatacaaacactttggtggaaacttgtagtagagttaataaaagttacctgtcatctctcagcttttccaacttgtctctctctcaaaacaaattaaaggcagcaatgtccttagggcagggaggaggggaggaggcaatgaggaagcctctaagactgtagttatgccaaggtagatggtaaatggggcttcccaggtggcattagtggtaaagagcctgcctgccaatgcagaagatgtaagagacactggtttgattcttgggtcagaaagatcctctgaaggagggcatggcaacccactccagtgtccttgcctggagaatcagaggaaaccctacatttggagcatgtgaaagtgaaaacttcatatgtaagtattcacatggatacctacaggacagaaaactcaacagaaggcatattcactgtgtaaagaaagattttcctgccacaatcatcaacatagtctcatctgaccagagtgtgtagtttagtaagcaaatgagaaacactactttcttcccaaacaaatagtaaaatggatacagtttactttgtcctctctggccaagatgacatgggaaaaaacacgtagagtttcaggtatagaaaataactgtcaacatattggtaccacaacatgtggtgaaattttgtatcaaatttcatgaagaatcactatgtgctaattagccaattttttggtaataaaaacaagacaaactgaagttaatttgcttaagatcttatgagacgtatgaatcacagacaagaacactgtaaggacaagaaagcatgaatcctgtacttcactgaaaagctaaaatccatttgaaatctctgaggaaggggttaaaacttaatgtttagattcagattaaaagacagaactcccataagtatttgatctggagatacacaaaacattctggttccaatttaatgatttgaacacttaaaatatgtaatgagcttctgattattagaatccatcagattcctaattctaaatcctatagtaaatctgatgttcagttagataaacctccctttagaatatttacatctactctgggcagcatgtctaaaatttatcttttgcatatggatctgaagtaggcaaagaaaaacctttttaggactgatgcatgctgatcaaattccaaagttgcattaactttctgtcatcattgtaatgaatactgaataaaagaaaaattacagaaaacttccagtaaatagaaccataacaaataaaaacttgttttaatgatgctgaaaacctaaacaatatattaaaacaataagtacattatacaaatgaagacacaactcagttaaaagcacacattgcctcactaagccctggcaataaaaataaacatgctgaagagtcagcaatacacactatatttaagaaaaagcctccatatattaccatcagttcagttcagttcagttcagttcagtcgctcagttgtgtccgactctttgcgaccccaggaatcgcagcactccaggcctccctgtccatcaccaactcccggagttcacccagactcgcgtccatcgaatcagtgatgccatcaagccatctcatcttcggtcgtccccgtcttctcctgcccctaatccctcccagcatcagagacttttccaatgagtcaactctttgcatgaggtggccaaagtactggagtttcagcttcagcatcatcccttccaaagaaatcccagggttgatctccttcagaatggactggttggatctccttgcagtccaagggactctcaagagtcttctccaacaccacagttcaaaagcatcaattcttcggcactcagccttcttcacagtccaactctcacatccatacatgaccacaggaaaaaccatagccttgactagatggaccttaggcggcaaagcaatgtctctgcttttcaatatgctatctaggttggtcatgacttttcttccaaggagtaagcatcttttaatttcatggctgcaatcaccatctgcagtgattttggagcccacaaaaataaagtctgacactgtttccactgtttccccatctatttcccatggagtgatgggaccagatgccatgatctttgttttctgaatgttgagctttaagccgactttactttcatcaagaggctttttagttcctcttcactttctgccataagggtggtgtcatctgcatatccgaggttattgatatttctcccagcaatcttgattccagcttgtgtttcttccagtccagcgtttctcatgatgtactctgcaaataagttaaataagcagggagacaatatacagccttgacgtactccttttcctatttggaaccagtctgttgttccatgtccagttctgttgcttcctgacctgcatacagatttctcaagaggcaggttaggtggtctggtattcccatctctttcagaattttccacagtttattgtgatccacacagtcaaaggctttggcatagccaataaagcagaaatagatgtttttctggaactctcttgctttttccatgattcagcagatgttggcaatttgatctctggttcctctgccttttctaaaaccagcttgaacatcagcaagttcacggttcacatattgttgaagcctagcttggagaattttgagcattactttactagcatgtgagatgagtgcaatggtgcggtagtttcagcattctttgccattgcctttctttgggattggaatgaaaactgaccttttccagtcctgtggccactgctgagttttccaaatttgctggcatattgagtgcagcactttcacagcatcatctttcaggatttgaaatagctcaactggaatgccatcacctccactagctttgttcacagtgatgctttctaaggcccacttgacttcacattccaagatgcctggttcgagatgagtgatcacaccatcgtgattatccgggtcatgaagatcctttttgtacagttcttctgtgtattcttgccatctcttcttaatatcttctgcttctgttaagtccataccatttctgtcctttattgagcccatctttgcatgaaatgttcccttggtatctctcattttcttgaagagatctctagtctttcccattctgttgttttcctctgtttctttgcattgatcgctgaagaaggctttcttatctcttcttgctattctttggaactctgcattcagatgcttatatctttccttttctcctttgcttttcgcttcttttcttttcacagctatttgtaaggtctccccagacagccattttgcatttttgcatttcttttccatggggatggtcttgatccctgtcttctgtacaatgtcacgaacttcattccatagttcatcaggcactctatctatcagatctaggcccttaaatctatttctcacttccactgtataatcataagggatttgatttaggtcatacctgaatggtctagtggtttttctctgctttcttcaatttaagtctgaatttggtaataagtagttcatgatctgagccatagtcagctcctggtcttgtttttgttgactgtatagagcttctccatcttttgctgcagagaatataatcaattttatttcggtgttgaccatctggtgatgtaccattatcatagtacaaatccccaaacttctggcaaggagatattgttaatgtctttgggccctcggatataagttggagagaaataggagagaacaagtggggaaccaaactgaatgaagcatgggaaagagtgctgaaattatgctctgaacaatgctgagaatgctgaagagtgacaagaaaaaaggaagtggacagggggcaggaaaaaggcttgaaaatggcatggagatatactaggaatttccaatccattagtcagggctttcctggtgcctcagatggtaaagaatccttccacagtgtgggagacctgggttcgatccttgggttgggaagatccctgtaggagggcatgtcaacccatccagtattcttgcctggaacatccccatgaacagaggagcctggcatgctgcagtccatggggtcacaaagaattggacacgaccaagtgactaagcatagtcagggacctctaccttaaacaaagtacaacaggcaggaaggctcagaacaaatcttcaaaagcatcagcaaaatacattatcaaaatcaaatgatgctgtcatgaaaataaatagcaaggaattctgtgggtgacaggtacaagttgtacttctgtgtatgtttgaaacttttctttaaaagtattctttgaccaagttgggcttatcctgggagtgcatggctagtataacatttgaaaatcaatcaatgtaattcaccatattaacagccttaaagaagaaaaacaatatgatcacctctagatgcagaaaaaccacttgaaaaagttcaatatctattcatgattacaaataaaaggtctcagaaaaccaggaagaggaaagaatttccttaacctgatacagggcatctacaaaaccatacactaatataatacttaaagatgaaggacaatgttttcccccttaatcaggaacaagacacagatgttcactttcaacactcctattaaaaattgtaatggaagttctagacagaaaatgaataagagacatatacaatagaaaggaagaaataaaattatttttatgccctgatgatataattgcttatgtggaaaatctcaaagaatctacagggaagctaacagatttaatgacagtttagcaaagttcaagatacaaagtcaacatacaaaaaccaactgcatttccgtatgtttgtaatgaacaactgaaattgaaatttttttaaaaagtaccatttaaacatcatctaaaaacagaaaacacttaatataagtttaataaaatatatgcaggatctgtacaatgaaaactacagatccctgataaggaatacctaaataaatggagagttatatcatgtgcaaaggtgtgaatacttagtattattaagatgttaattctatccaaatagatagacagaatcaacacagtcacagtcaaactcccaggcggtatttttgtagaaacctatataatgattctaaaatttatgtgtacagggaaaaaaaatagaatagccaaaacaattctgaaaaataacaaagttgagaaattatactacttgattttaaggttcattacaaagctacaataatcaagattgtgtgatatttataggacagacacacagttcaatagatcagaacagagtatatagaaatatatccgtaagtatatggtaaattgagcttcaacaaaggtgcaaaggcaattcaatggagaaaaaattacctttcaacaaatagagctgcttagcaaactggacatccatatttaagacaattaacctcaactcatacttcataatgtatacagattaatttaaaatgtcatagatctaaaggtaaaatcttttagaagacacagttgtaaaatttttgtgatcttgggtaaggtcaagatttcttagcgataacaccaaaagcatggtccataaaaaactggataaattggaattcaacaaaagtaaaaactgctgctctgggaaagacatttttaaaagattaaaaagtcaacccacagactggggaaaaaaattggaagacacatatctaagagaagacatattcagaatatatagaaaacaatcaaaattgaataattacaaaacatgcagctaaaaatttcacaagaggtttgacagacatttcacaaagaaggtatacaaatgcctaagaagcacaaaaaaagatactcaatatcattatccattaagggaatgagaattgagataccactacatacccacgagaatgtctaaaactaaaaggactggtaatacaaagtgctgtagagaatgtgagaaaagtggaatcctcacacattgctgctgggaacataaaatagcatagccactatggtaaatcatttgccagtgtctcaaacatacactgaccacatgatagaacaaatccaatcctaggaatcagcctaagagaaattagaacttatgtccacacaaagacttggatgtaaacattcagaggatttttcataatcacaaaagaaagtgaaaacaatccaatgtctctcaatagatgagtgggtaaacaaactttggtacaatccacacaagagaataacgcctcagaaacaaaaaggaaagagccagtgatacatgcaacaacatggatgaatctcagatgcacaatgttaaatgaaagatgccagactcaaaaggctatatattatgtgattctatttatatggtagtttttaaaaattaaagctataggaacaataaataaatcagtgcttatgagggtctaaaagtaaaggggaatgatttcaaagtaggttacccactagatttagtaaatgaaaatataggacagacccagttaaattaaatttcaaacaaatgacaaataatctttagtgtaagtataactcatgcaatacaatggttcttaaattgtggtcccagaaccacagctttagttaagttcttagaccccattcagatctactactaaaacagaaactctgggcgttttatgttttaaagcaatctatgttttacaagccttacaggtgattctcatgctgtggtttgagaaacactgttcactatacccatcactggcaaaaaagaaccataagaagctaatatgaagagaaaggggcacatgagcctgtttgaaaatcaatttaccatcatcaaataataactaaagagccaaagggtatataatagaggttctctgagaagggacaattgcacttatctcacacgctagtaaagtaatgctcaaaattctccaagccaggcttcagcaatacgtgaactgtgaacttcctgatgttcaagctggtttcagaaaaggcagaggaaccagagatcaaattgccaacatccgctggatcatggaaaaagcaagagagttccagaaaaacatctgtttctgctttattggctatgccaacgcctttgactgtgtggatcacaataaactgtggaaaattctgaaagagatgggaataccagaccacctaacctgcctcttgaaaaatctgtatgcaggccaggaagcaacagttagtactggacatggaacaacagactggttccaaataggaaaaggagtatgtcaaggctgtatattgtcaccctgcttatttaacttctatgcagagtacatcatgagaaacgctggactggaagaaacacaagctggaatcaagactgccgggacaaatatcaataacctcagatatgcagatgacagaaagtgaagaggaactaaaaagcctcctggtgaaagcaaaagaggagagtgaaaaagttggcttaaaacgcaacattcagaaaacgaagatcatggcatccggtcccatcccttcatgggaaatagatggggaaacagtggaaacaatgtcagacaattcagaggatttttcataatcacaattttggggggctccaaaatcactgcagatggtgattgcagccatgaaattaaaagacgcttactccttggaagaaaagttatgagcaacctagaaagcatattcaaaagtagagacattgctttgctgactaaggtctgtctagtcaaggctatggtttttcctgtggtcatgtatggatgtgagagttggactgtgaagaaggctgagcaccgaagaattgatgcttttgaactgcggtgttggagaagactcttgagagtcccttggactgcaaggagatccaaccagtccattctgaaggagatcagccctgggatttctttggaaggaatgatgctgaagctgaaactccagtacttcggccacctcatgcgaagaattgactcattggaaaagactgatgctgggagggattgggggcaggagaaggggacgacagaggatgagatggcttgatggcatcactgattcgatggacgcgagtctgagtgaactccgggagttgatgatggacagagaggcctggtgtgctgtgattcatggggtcacaaatagtcggacacaactgagcgactgaactgaactgaactgagaagggactacaggagtgatcttcagccgagggcaatttcatccctagggaacactggcaatgtctggagacatttttggtcgtcacaagtggaaggagaggctactggcatctcatggttagaggccagggatgttgctaaacatccttcaaagcactctcctaagacaaagagttatccggcccaaaatgtcaacagtgctgaaactgagaaagttggacctcgtcaaaacatatttttaaccccaaaggctttaacatcaaagacacctttatgaacatggaaatagaaagattaaaaagacagtgacaaataaaatataattcaaggcatctcatgctaaaaatattagaattattctgaaaagaatttatatagagaataatgacacagagctaaaacatcaattttgtggtaggaagcaagttgatgatgaaaataccaggctgcttttttttctttggaagttatgtgacagaataaattggagatcacaagtttgagaaccatatgcaaactaaaacacatctgtaaacactgtatgaccagaaaacattccggcccaggaatcatggaacttgagttctagttttatttggtattaggtagctgtgtaatttagcacaaatcactttcttatctgggcttcagtctgtccatgtgtaaaatgagggggttagactacttaagtcatatctaagaccccttgcagctttaacacactatgtctatgtcaaaaaaaaaacaagcacaagaaacattcaaagacattttttacaggatatagggggcatggtatcattttgtttcctttggggtagtcctgtgttgactttgctacttttggcttttgtgtttaaaaggtgttaaacaaagcttgctgctgctgctaagtcgcttcagttgtgtccgactactagcgaccccatggactgcagcctaccaggctcctccatccatgggattttccaggcaagagtactggagtgggttgtaaacaaagcttagcttttcttatttatgtataataattataataacaattcatgttcactacagagaaactagaatatatgataaatcactctttttcactaagtaggattctgagatgaattacagcaggaatgtgttaagatagtctaacaaaagtctattttagttttgcaattaaaaactaaagtgaaaatgtttagaaaattagttatactttgtatgcacgttcttagggaagactacattattattaacatactaactgtcatgatataaaagagaaagaaaccccataatccttcctttgagaaaatgtattttagttcaatatgacatcaacagtaataaaaaatactgttgttgttgttcagtcaataagtcttgtctgactctgcacaccaggattcactgtctttcactatcttccagagtttgttcaaactcatgtcagcacctatacttataaaatataaactgatacaaccataacatcaagactcaatgttcagatgtttttaaattttaaaaatatataatttattattgtctttaacaagaaaataagttaatgggccaaagaaaacttactcagcttcaaggtttgaagtatgacagtctttgtgtcatacatgttagtgtttctgcatcaatttcagtgttagaagtataatttcccagaagaattccagtcaacagtactgatttccaaagagtaacttactttaatatgatgtacaccattcagttttccaatctgctgttcaatggtccaaacacaggaactacatgtcattccttcaacagagatggtgacagaattcacactcatactcagatccattttgatttcttctttacattcctattagaaacaataaacttattaatatcagtcatggaaataacccttcctcttacatgtaccccagtgttcactgcagtgctgtttacaatagccaagacatggaaataacctaaatattcaccaacagatgaatggataaagatgtggtacatacagtggaatattacttggccataaaaaagaatgaaccatgccatttgcagcaacatggatggacccagagattatcatacaaagtgaaataagtcagacagagaaagacaaatatcatataatttatatgtggcatctaaaaaaatgatacaaatgaacttatttacaaagccagaagcagactcacagacttagagaaggaacttatggttttgtgggggaaggtgggaagcagggatagattgggaatttgggattgtcacatatacactaccatatttaaaatagataaccaatagggacctattgtatagcacagggagcgtctgtaataacctaaacgggaaaagaatttgaaaaagaatagatacatgtatatgtataactcaatcacttagctatacacctgaaactaacacaaaattgctaatcaagtatgctctaatatagaataaaaacttaaaaaacaaaaaacaacaaaaactttaagttaaaagaaaaaagaatccttcaacattcccacctgcccaactgaaaatacactactaatataattcggttagcattcttttctctcaccttattttactcccatcccagcacttttaggtcatctattcccttgatttagtgctttcttctcttagatatctgcttagctaacttcttcatctctttcaagtctttactcaaatctaatcttcctaacaagtcttacactgaccaccttgttgaaaattgcaacctacatcccttccacacacacatatactctgattgcccttatttctgccctctttttttattttcatagaacttaaaaccttctaataagctccattaatttacttgctatgtttattgcttattatctgtcttcctgttgttttaaaatgtgttcatgaattctttgtcactccttcattcaagagatcaaatttaacaactccttcgttcaagagatcaaatttgatcaagagatcaaatcgagtgtggcctcaattcagtgacttgcttccaaatcactagtggaagtgacaatgtgtgatttccaagataaaaggcactgcatttgggggggaaagtcactgtggcttgctccttatcctctcttcaatcaccccatctaggggaagccacctgctatgtcatgggacactcaagcagcattatggagaggctgacatggtgagaaattgaggcctacaatcaataaccagcaaagacataaggtctcctgccaataaacaggtgagtgaactgtcttgaacgctgattcttcagactcagttaagtctttagatgcctgcagcctcagctgacatatagacttacaacctcatgagagatcttaggccagaacctcccatctataccactccccaattcatgacccacagaaactgtgagacaataattgttggtttttttaagccactaaattttggaataatatgttatactgtaataaactcctcattaaaatgaaaattctatgaaggcaggagtctttttttttccattgataattagtttgaatcacatgaaatttccattttattgatataattgatatataacatcatattagttttaaatgtacaatgatttgatatgtgtatatattgcaaaactaccaccaaaagttaacacccatcaccacacatagttacaattttttcctgtgatgagaacttttaaggtctactatcttagtgaccttcaaatatacaatagaatattgctaactatagtcaccatgctgtacattgtatccttgggacttatttatcttatagctaggaatttacatcttttaaccatcttcatccatttttcccactccccaccccctacctctggtaaccaacccatcaatctgttctctgtgtctatgagttcaggttttttcagattccacatataagtgagttcatacaatatttgtctttctctatctgactttttcacttagcataatgccctcaaggtccattcatgttatcacaagtggcaggattttcttcatttttatggctgaataatatgcatatgtatatcacattttctttatctattcatccacagacggacattggttgtttcaacgtgttgactgttgcaaataatgctacaatgaatatgggggtgcagatatctttgagatggtgattttatttcccttggataaatacccaggagttagtagatcatatgatagttctgcttattaattttttagaacatctatactgttttccatatctattttttaaatgtaaaaatcttcacaaagctgaaagaaaaattcaacactagctgcatctttctcagtcttaatttcaactaacactaattatggaactgtactttatagtttgatttgatctgaaatagactatttttgttatttacttttagagccaaagttattccaaatgcaacacgtaacaattcagttatgtccactaattcttatgaaattagtattatcaatttttacatagattataatatccattcaatataaaagaatatagtttatctaacttttgtttttaatgacttgaaacagcctttattcaaagtaaaaagaaacaacaatctctaatgaaccacactgccagtgatagtcacattctggtaatttatgacttataatctatatgtaaaaataagctgtcatcactctgagaaacttcatcgtccttcctctagcatgagcagctgctgtcaacaggacaaaatctgaatctttgaatgaatggtaagtagaatagggaagaagcagtagaaatgagggcttccctggtggctcagtggtaaagaacccgcctgccaaagcagaagacgtgggtttgatccctgggtcaggaagatgccctgaagaaggaaatggcaacccattacagtattcttacctgggaaagcccatggacagaggagcctggcgagttacagtccacgaggtcacaaaagagttggacacaacttagcgactaaacaacagtagaaatttagaggagctagaactagttactccagctcaagaagttcttcatgctgtctgaattctccattgcatgaaatttacaatttaaatattattctattaatgaatagcttccctgttttccaaatctttattatgaaaaatttcaactacgcataaaagctgaaatagtacaatgaacatctatctgtatatcctctaatgaattcaacaactgctaacattttgctgtatttgctttatttttctaatctaagttttagagatcataatacttcagcatgcatttccaaagaattaagaactgctgcataaccgcaatactatgatcacagctaagaaaattaatcggaggcggtcctaagatggtggaggaataggacggggagaccactttctcccccacaaattcatcaaaagaacatttaaacactgagtaaattccacaaaacaacttctgaatgctggcagaggacatcaggctggtcagaatggctactatccaaaaatctacaaacaataaatgctggagagggtgtggagaaaaggaaaccctcttacactcttggtgggaatgcaaactagtacagccactatggagaacggtgtggagattccttaaaaaactggaaatagaactgccatatgacccagcaattccactactgggaatacacaccaaggaaaccagagttaaaagagacacgtgtgccccagtgttcatcgcagcactgtttataatagccaggacatggaaacaacctcgatgtccatcagcagatgaatggataagaaagctgtggtacatattcacaatggagtattactcagccgttaaaaagaatacatttgaatcagttctgatgagatggatgaaactggagccaattatacagagtgaagtaagccagaaagaaaaataccaatacagtatactaacacatatatatggaatttagaaagatggcaatgatgaccctgtatgcaggacagcaaaaaagacacagatgtgtatagcggacttttggactcagtaggagagggagagggtgagatgatttgggagaatggcattgaaacatgtataatatcatgtaagaatcgaattgccagtctatgtctgatgcaggatatggcacgcttggggctggtacgcggggatgacccagagagatgttgtggggaggggggtgtgagggggattcatgtttgggaacgcatgtacacccgtggtggattcatgtcaatgtatgccaaaaccaatacagaattgtaaagtaaaaaaaaaataaaataaaataaaatacaaactcctctttgagagttctagacactgaaaactggaattacatctcctaaaaactaggtaagatcagttacaataaaacagaagcccaaatggaacaggaaaggcaggtaattgtgaacaaagaattcttgggatatagggaattcataggcccaggttaaaagtctaaggtggggtacttaaggcaagcatgaaggctttagggctaccactagggagagggtcactggaagcacaaatatacatgaaaaggtaagtagaataatgtctaaaacaaacagattttatcaaaattttgcctaccattagtcttgtccttaaaaaagaatacacttcctcttgtagcacatggctgcttgcctctaggtcaaaacattcacacttagtaccgatatggctcagatatgttatgggtcaaaatagagcttttcagggctcatccaggtacattatcaaaactgactaaattgttttataagaaactgtcaagttcaaaaaacagaatcggtaacaaacttttggaatacaatatactcagcttatgaaggctagtttacctggttagttaggaatgtaaaactgaaatacagttttattttgggccatgtccaaggccaaagaggagctgatagagactagttaagcagcaaagcactttttaaagtgactggattatttaccctggaaatgtgtgtgtgtgtgtgtgtgtgtgtgtgtgtgtgtgtgtgttagtcactcagtcgtgtccaactctttgcgaccctgtggacttttccccgccaggctcctctgtccatgggattctc

SEQ ID NO: 51 - DNA, 198577 bp, Hippotragus equinus
  source 1..198577: mol_type = genomic DNA
ataatgccacagttattccacatacctctcaaggctgagtctaaacttgaaaaaaaatattttgtagtttatgagctggagatttttcttcttttgctactcctctagcgttcccctggagaaggaaatggcaacccactccagtattcttgcctggagaatcccatggacggaggagcctggtgggctacagtccacaggtcgcgaagagtcggacacgactgagcgacttcacttcacttcactagcgtttcccagcactgacttttctcttttccttttctaaggccccaggatatacggataaacccccccagtccacacctggagcttccctgcccgccccgcccccatccctctctgtcagggttttcaaataaaaccaaactacaggcagataatgctttacatcctaagtccacagacgaaggtcaggtaatccatttcaacgcttcctttaggatttatgactctccccaaagtctttcagaaatctcactttaagcggcgcacacaggctggcggcccagcgcacaagggccgcgcgtgtctcgggcgcggctcccaagcctcgcccgccgcctcggtttcctccgcccgggacgatgcctaccacccgctccgtttccgccagcgacggcgccgcgcacacgggcacacgggcacccgggcacacgggccgcggcgccgcgcacacgggcacccgggcacacgggccgcggcgccccgcacacgggcacacgggccgcggagccgggcacacgggccgcgcacacgggcacacgggccgcgcacacgggcacacgggcatacgggccgcggcgccgcgcacacgggcacacgggcacacgggccgcggcgccgcgcacacgggcacccgggcacacgggccgcggcgccgcgcacacgggccgcggcgccgcgcacacgggcacacgggccgcgcacacgggcacacgggcatacgggccgcggcgccgcgcacacgggcacacgggcacacgggccgcggcgccgcgcacacgggcacacgggccgcgcacacgggcacacgggccgcgcacacgggcacacgggcacacgggccgcggagccgggcacacgggccgcgcacacgggcacacgggccgcgcacacgggcacacgggccgcggcgccgcgcacacgggcacacgggcacacgggccgcggcgccgcgcacacgggcacacgggccgcggcgccgcgcacacgggcacacgggcacacgggccgcgcacacgggcacacgggccgcggcgccgcgcacacgggcacacgggcacacgggccgcgcacacgggcacacgggccgcggcgccgcgcacacgggcacacgggcacacgggccgcgcacacgggcacacgggccgcggcgccgcgcacacgggcacacgggcacacgggccgcgcgtgtctctggggcggcccgcggccctcgcctgtttcctccagacgcgcccgcagagcctcagccccgctccgcctgctcggggcccaggcctccggccttctctcccggccgcccgcggacacacggcccgtttcagggctgggcgccaggacgcggcctcaggccagccgaggcggagaagccggcgctcggggcgcctggtgccggagacgccaccgaacacgcccgcgtcctcgcggtcccgaggattccgcttcccacgcagacagagccaggccaggatttggagggggagcgaatccaaaataggcgaagaagcacatgaggacttaaggtactggacgatattgtgtgaactgctaaaatgcttctcggcacaatcggcagcttaaaaaaatactttcctctggtttaagggcattttcccgtcacggtcctttggggtggaggtcttggcaaatacgaagtccaaacagaccaaaagctcaaacgtttttggtccagtcaagtgggacagacagtaaacagaacttacatgtatcgtagagtgtattggagaggtgtataagtgctaacgggaaaaataaaagggcaaaagcagtagaagtactggaggctttgcaggtttagctgcatggacattcgtgctagttgaagctgccgattgtttcttcttccaacccggtgtggaccataggcgcagtgccccttcttcaggccaggaaggcaggcctcccctcccagcaccttccctctaagaacacaacctccaggcaacacccccccgcaaaaaaaaagcagatgaacgccttctgcctaacctccaacagccagaaacccggcttctggaacagtcagacccttttatcactttgtttgcttttcagctggttgagtcactccagccaacagtatggaacaaaaaactgtttacaggcacaagagagccaggtagagccatccaggtggggcttagtaatttgtggtggggtttccaaagacaggagattcaacaggattgtgttaaataaataaatcttatttttcttaataatgtaaaaaataaattgcattttcctttggcagtaagtagctgattcaacgttgagcctgaaagctgtttgtgttgttgttggttggttgattggttgttttttttttttttttctttttaagagactacagcttcgcttcagcggtgcatcagtgacaatgcatattatttctactgctttcatgaaccttttgcatatttgtttgcggcaggcctgtggacttcacttatggcccagataggcacccagggtgatgcaagcgcccaccagggccagactgagcagtgccttcagagacagccaggagaaatcaaacaggggccgcatactagggccatacagctccacaaaggcgtcctgcagagggggagagggcgggagaaaaagagtgttagagtataaatatttcctgttactgtaacaaaaaaagtgccagtgcagtgccggccgacagggggagaggcgtctgaagtgccttgcaccttcagaagggtgagggcaacggtcagatgtgctttggggataatgatttcagacccactcttttcactttcattcaggaaatacttattgagactgtacacacataccaggcccagcagagatacagccacgagtgaaacagaccaaaagctcaaacggtttgatccagtgaaatgggacagacagtaaacagaacttacgtgtattgtagagtgtattagagagcagtaagtgctaacgggaaaaataaaagagcaagagcaatagaaatactggaggctttgcagttttagctagcatggacattcgtaaaaataattttaaaaaaaccctaactactcctttactgaatgcttgctataggccaggcacttgtaacgaatccctgacatgcattattttctttattcttcatacccatcttaaagagtcctttactttgttcttgtgctgtaagaaagaagctgagaccattgatgctcatttcttagatttgttggggaagattggattccgggtctgggcccagtgagcatctggacaactctatctgagtatgttggcttcccaggtgacccagctgggtaaagagcatgcctgcggtgctggagacgcaggcagatgcgagacccgtcctcaggtgggaaggtcccctggaggagggcatggcgccccactccagcattcttgcctgggaaaaatcccatgggcagaggagcctgctggtctgcagccttttgggtcacagagagtcggactggcctgaagcaacggagcgtgcgtgcacatcagtgtataaagcagtgagtgaagtgtttttcccttggtggattaatcaggtatgaaggggaaaacaagatacagttccagttagccccctaaacctggaattagcacacagcttcactaagggtgacggagcatacagaggtccagcctcactgtgtgagaagcgtctgatgacgctgaccatgcttttgtctgtctggggcgtgcattgctgtggagggatcaggtattatttctgtctccccagtgctgtgcgtggtcttagtacatgtaggtgtttgagaaatgtttgttcagttaatgattaaggttttctaacatcaaacattggtttgaattctgcatttcgcctaatacattacccagatactctgcccatttgaagttattccttttacatacaaccacctctggaaatcttggcagtaatcgcaaaggtgaacatttacggcatcattaaggggaacttcctgtgttattaaatataaatgtgcacaattatttttcatgactgcataatattccaccatgtatatttatttatctgtatctatgctgtactttaaccaattctttttattttttaattaaattatttttgattggagggtaattgctttacaacatagtacttatttccgctaaacaacgtacaactgctcaactattcccgctctctgagcccctctctcctccccatcccgcccctctaggtcatcagagagtgccaggctgggctccctctgttacagagcagcgctgtgtaaattcttacctatgcatttggatttaggttttgtttttgttttttgttttgagacaaattcccagagttgaactcagttgatcaaaattgcttcccacagtcctgaagggtttgtgctgagctctcctcactctctcactgccccagtgaccttggcaccttttacaaaaagcagacaagagggaattccctggcagtccagtggttaagactctgcacttcgactgctgagagtatgggttcagtccctggttgtggaacttaagataccacaagctgtgcagccagaaaaacatgaaaacaagaactaaacagacagaaccccacaaaggcagacaagggttagggcggtgcgtctcgctgggggtggtcctgccccccccatgacacgtctttggtagtcgggtctgtctgggggagggggtgctgctggcatccgatggcagagaccaggggtgccctccagtgccccacgcaggaccggacggccccagcatgagaatcatcccccgcaagtgccagtggtgctgagactgagaagccttgtgaagaaaggttcagaagaaactccataatcacagccctcagaagacccagatggtcgatctggtgtgtccatagctttggtcaaattagcgccagatgagttagctagcctggacaagtagctgctcccttactcgtgggtgacctctaccttcggaggtactggattaacttctaccaggagagggcgcaagggttttcttcttccttaatctattgttaaacagttttctgagtttgagtcttagcagagcaaggcaatagacataaatgacacacttgcttagtgcccttggcccagagctgagctgacgatcacaactgtttgtcaggacaccgaccttccctacatgtcgggggataaacggggcaggaaggagtcaggaccaatacagagaaacttgccttttgcagagtgcacccccggaccccacagacacagcagcagacgtctaacagccctcccctccgtgctgttttctctaacgacgggaaggctggaacccccatacaccagccaaaggcatcccaactcctcagaagagcacactgggtggtaggcacttcagcttaatgtcgggagggtcggcggctgggccctgcgtccgtttagttatcaatggagttgtctgtggcgggatatggaagagactaaggcctcagccacctgacccttccagaccaggcgcccccctcgggagacaggggaagcagggagactagggccgctctgcctggtgacatcccccccccccccccgccccgggcagatgagacgcctctcccagcaccccacccctagggccggaagacctccctcagccacttgtataaatatctgtgcttcacggcccatttctgatgtgcattacaaagaaagcaatcatttctgaagtgggatgagctaacagcatctcttaacccaaagcatgggcacggagggatctgggaacgagccctgagctcaagggaggaggtctgcgtggaatcccagctttgacattttattgcctgtgaccttgaacaaattacccgaggctgagcgtcatttatctcacccataaaactggttgttgtgaagataaacgtaggtgactcgggccatttgtaaacgtggccccgagcgagaactagaggaaacatcaccctgttctctggtctgccctcttgctaacctgctgtgatcctccttaaactgccctggcctccaggcagtctgctgagcctgcttatttccagaaacaagcgaccagctccctctaaggtgtcagctcttggttctcaagatagttgatgatttctaaagaaatcgtgaattcagacgtacacacatgatgtgttctggtggaaaattggaagcgataacacacgcccagctctacttcctcatagattattaagtcaggctgtagggctgagagacatcatttaacgcgcgaccccccccccccggcccctgagatggaatctaccccataatctgcccatctatgattctaaagtgcggagcagagcctgtggtttcaggagtgaagctccaaaagctgttttcacgggggagtctccttgctttttcaaacgtcctgatcagggtgatttccgaaggctgtttgaacagtctgtcattatttgtttaagtctgaaagctgttttaaataaacacatgctcattctatgcattaaaagcaacagagagggaagaagaaagcctgggccctcgtcacgtgatttggacaaaacccccgcctatatgttcagggtgcatgcagcccctggttgtgtcgggactggccagggctctgcccgacctcaaggatgggcacggcaggtctccaggggagggccctttctccttctgttagcccccaacttcagaggggaggcaggcagcgccccagctctggaggcccttttgcagacagcttccccacagacttcacattcagaggccacagatggctggagtctgagttccagcagcgccgacctccgaggagcagggcagctaatgccccatgcccaggccctggctgcagggctgggagtcggccagggagatgtggacggaccgggtaggaacagacagctcaagtcagcgaaggtgggaggagggggtcagagcgtcctctccctgcgctgggaccactcagccccatccctcctgcccccgtccccgccacacctccctccaggcagcccactctccacacctccctccaggcagcccactctccacacctccctccaggcagcccactctccacacctccctccaggcagcccactctccacacctccctccaggcagcccactcgccaggattttcctttccccttcaggtccttcaaaaagtttcatttaaacctggttccgaataaaatgagatctaaaaaccaatgaatcagaatggcaagaactgaagaccactgagttccactgaacaggatggtgtgggggtgggggcaggagcccagataccctcacacaactcaggggctctcaggagcaggtaagcagagaggccgttcatgtttggaaatgcgcaacagaagctttaaaaatacagttcatgtgttagtgattctacttctaattatcttgaaaacaattaataaaactttaaagcaaaaatatctgaaaatatgataacgatatgttatcgtgtagtcactcagttgtgtctgactctttgtgaccccgtggactgtagcccgccgggttcccctgtccatgggattgcccaggcaagaacactggagtgggctgccattcccttctccagcggatcctcctgatccagggatcgaacccgcacctcctgtgttggcaggtgggttctctgccactgaggcaccagggatgcccagtggaatgtgggtcagtcactaaaaatcgtgccctgtacttactggcaaggaaagatgcccccagcataacactgagcgaagccgcgcagcagcctctgccagtccaggctccctgatggctcttagcactcacagggaaatggggaggtgaccttggtcggctataaacagatgggaaactcaggtccgttccggtctttgggctgactgtggatgccttctatgatcatggaagagcctaagtggggaagccatcctgcccttaagcagatcctggcctagagaatggactcgtgtgcgtccacatgcgtgtgaaactcagctagatggaggcctgccgccgtttctgctctgcacggagcagaagcaaggagaaagtcagatggcgctaagaggaagccagacgctgccatcagacggctccgatattttctgttacccgaggctttatcattttatctccacggggattgcctcccacgtgaccacctgagggccagtgcagagcacgcaccttccgtcattccaccatgtggctagggagctggggtgtttatacaccgactcctcccacttgctgggtgagggttgctcctatggaggcatccatagtccagcacttctggctggtcatgtgcacaggcaaaggggtcagagaaagccactggggaaagaggtccagatgctacatctcctgtagcttgagcgctctgaggtggtaagggcaagacgaattccacagggcaggatatgagccgctgatctgaccccctcactgtttctctagcctcattaccttctctccccaggaccagtgttaggatttcccacctaacttctctgccgttagcctagtgccctacccttcaatcttctctgcctgctgcagccacagggatccgttcagaatcccatctgtcactcccgtgcttcgacccagaccctttaacacgcaagctccccgtgctctccccacccagcttcctgctcagctctcgtcactcgataagttcatccagttcccgcaggaattcggtgcaatggtgttctgcaggcaactttctccatgtccctgggctgagctaaataatcctcagccagtccctgctcactgtattctctgaaggtcatctgtttacatgtctgtctccccctcattcagctattagcacctggaggtgcagggaccatgctttatttatccttggatccctggagcatgtttctgccacatgtcaggcactcagcatatgcttgtggaactgaaatacaccttactgtagaccaggctttccaaacacattttaatagatgatgtttttcaaaaggagcatatacaaaggacaaataaattttgcactggaacaaaatcagatgcctttttttttttttttttgctgcagcagcttctagtgtctccagtgaagaactcaagttcaggtcattcagaacggtcagcgctggatctgactggtcggtgttcgtgccacgttggcggtggcactgtgctattcagcagttttgaatagtatcccacctgaatgccctggagtctccaagggaggtacaagctgtggggcattttccaagcccgctgaaccatctgtccctctgtcagggagatccctgtctcgtgaagactgagaatgcggagtggaggtaacaaagcagtaattctgcacacgatgagagaggcagcgctggtgccccctgtacggctccggtattttctgttacccgatgctttatcattttatctccacggggattgcctcccacgtgaccacctgagggccagtgcagagcacgcaccttccgtcattccagggcagggcaggcgatcagaggcaccgaggcaactctagaccttcacgggagcagcaaggccgctggcggccccttgtcttggaatctgctaagaggtatgagtgtgtgtgcgcacactcacttgctcagtagcgtctgactctttttcgaccccatggactgcaggctcctctgtccatggggttttctccaggcaaggatcctggagtgggttgccattacctcctccaggggatcttcctgacggaggatcggacccacgtctcctgccttggcaggtgggtgcttcaccactagcaccaccgcagaagcaagggggacgcgcgttgttcccaataaacgggacccgcggtttcccctgtgcccagaggcagctgacgtccaagccccaggcgagcaggaatgctgggaaaaagaaggaagccaggcagggagggagacacctgcacagcagagggcagggctctgcctgaagctgggaggcagcgatgcccggacgcctactagggctgagatcaaagggggcgcggcggcctgcgcagcacacgcgagggagccagggctgtgtctacctgaacgcagcagctggtgaggaagtgactccacttcccgccttatcattggcccggcaggatttcctctgcagccactttgtgctgaatgagtctggaaggttccgtctggagcagagagccgtggtgggcggtggctaactccagtcccctgggagcttcctccccccacccccaccccccgcccctttactcctgaagtattgattccgggcttgggggaaaaggaaacagaaaaaaccttgacgactggagcatataaccgaaggacacacagctgcctggcctgcagatgggggcccgcgagtgtgagaggccgtgggacccttcaccgaggtcctcggggcccaccagccccgcagtaaagggggctccaccttggaggcactctgggcccagggggaggagctcgttgcgtcacaggccgaggacataaaaatgaaacctaatccaagtgtcatctgggtgtaaccagaaacctgctcgagaacgatggcaggagatgagaagcccacacaggactggcccgcccgcctgcctcgggtccagggaagattgggtgtattttgtgatgcaaattgagctgaggatgcaaatcaggcaggggcccggaggagagagggcagaaaaatgagaaccccaagggttccttcccttcgagagcagggcagagtttgaacctcatttgcaagtctattgctctggggaccccacagccacggggccagctcaaaggcagtgggccctgtccacgtgctggaggccggaaccagaggctgcctgcccggtgggacctcagaggttctgctggtctcactgctctggggctgggtagtcgctgccgtctggagagaagtgtggtgaggaatcccaggctgtactagctgtgtaaatactgcaggagtggggacttggccccctgtgggcttaggaagtgagaacagtccagagattcaaaaggtgtctgtggaaatgggccaagcaatgcgtctatagcaaaatgtgctttaaaaaaatgttaaataatcgtaccgtttggttcatcaggttcagataaaccaacgtgagactaaagccatatctgtagaagaccctgaaatctcatctttgacttgctgattcatttgggaaccaggcattttttataaggtgctgaggagtcttaaagttaaataagacacaggcctgcattataagaatggctccttgatattctcatgcgttcacagcagctttggtgagcaggagagttctataaatgcatgcaaaaaagctgtgtgtgtgtgtgtgtgtcattttgtgtgtgtgtgtgtgcattttgtgtgtgtgtgtgcattttgtgtgtgtgtgtgtgcattttgggtgtgtgtgtgtgcattttgtgtgtgtgtgtgtgtgcattttgtgtgtgtgtgtattttgtgtgtgtgtgtgcattttgtgtgtgtgtgtgcattttgtgtgtgtgtgtgtgcattttgtgtgtgtgcattttgtgtgtgtgtgtgtgtgtgtgcattttgtgtgtgtgtgtgcattttgtgtgtgtgtgtgtgcattgtgtgtgtgtgtgtgcattttgtgtgtgtgtgtgtgcattgtgtgtgtgtgtgcattttgtgtgtgtgtgtgtgcattttgggtgtgtgtgtgtgtgcattttggggcttcccaggtgcctcagtattaaaaagaattttctgccagtgtaggagatgcaggttcgatccctgggtcgggaaggtcccctggagaaggaaatggcaacccactccagtattcttgcctgggaaatcccacagacggaggagcttggcgggctgcagtccatggggttgcagagtcggacacaaccgagcgagtaaacaacaaaggcatttgcccttcgggctctggggtttgaggaaggagaccacggctgctgtcctccttcagggggtggctcccccaggaccctttaggcccagaggccgcaggaaactgcctcgcagggttttggctttaaaacaaagtgacttcatttttcttcctgaccttcctcattccactaccttcttttggcgagagagccgtgcattttctggcacttggtcctttcttgctctgggcttatgttattttcactgttagggggaaacatcccattatgatggaatttggttggaatgaaagcacatcaagcaaaaaatagtgtaattattacaactcaacaataaaaagacagatagcccaattaaagactgggcagagatttgaatagatatttcacagaagaggatctccaaatggtctagaagctcatcagtcatttagggaaatgcaaatggaaaccacaatgagatatcccttcatgccgaccagcatggctttcacctcaaaagtggacaataaccagcaccgaccaggaaggagagaaagcggagactgcacacgtcactcgtgggaaagaagagagcgcagcctctgtggagaagagtggggcttcctcaggggggtgagcggttaccccacgacccggcaattctcctcctagatgcacacccaaggtaactgagaatacatgttcacacagaaacgtgaacacacattcacatcagtgtgatttataatagcccaaagtggaagtgacccaaatgtctagcagctaatagataagcagtagggtgccatccggagaaggaagtggcaacccactccagggttcttgcctggagaatcccagggacgggagagcctggtgggctgccgtctatggggtcgcacagagttggacacgactgaagcgactcagcagcagcagcagggtaccatccacaccatggaatattacgccgccatagaaagggatgaagcattgataggagccgcaacgtggatgcaccttgaaaacggcacgctggatgaaagacgccaggcatgaaggtcacacattgcgtgccgccatgggcctccctggcggctcagatgggaaagtctgcctgaggtgggggagacccgggctcaggaagatctcctggagaaggaaatggcaacccacccggaactcttgcctagaaaatcccatggacggaggagcctggtgggttacagtccatgtggttgcaaagtcggagacgactgagcaacttcactttcatttctatgacatgtccaaattagacaaatccgtcgggacaggagtggattggggctgaggagagacgagtggacagagactgctaacgggcacaggcctttttttttttttgccagagtgataaacagttctagaatcagagaacagtgatgggtctcaagacattagaaatactaaaaccaagcagtcacgcttccctcatggtccagtggcttcccacgggtccagtgctttgcaatagaggggacattggtgtgacccctggtcgggggagatcccacatgccactgggcagcaaagcccgtgcaccgcaactgccgcgtctaaataccgagccgggcggcctcgagcgcgcgctgcgcagcaggaggagccgcagagcggccggcgccgcaactggagagcagcccgcaggcagcggccacgacccagcacaccggaaacaaacattttttaaaagtcacttagaattgaatttcgaagtttgtcaattattatttaaaatcgtattttttacacgacatgaagaagggcactatttttatgccgcacggaattggacagaaggagctgcttgttctggagcccttgctcacaggggtggccccctcgccagggtccagacctgcccggatgtgagcgtggccttcactcggtgcggccggcagcagggagacgcgcccccgccccggagagcccgctctgggctgcgccagccacgtggcccgtgaacgcggggtccggcccgccgaggaacccagggccctccctgccgccccagagcgagttcataggctggagatgggaactgcgcggatgctcgccgagccccgcagcgcggcctgagtgctgtcatcgggacaccagacaggggcgggggtgcgcggggccctgatttcccagacccgagtcgagggccgcaggcctgactctccgctggtttaagtcagcaggtgttgactgagggtggtgtggggggagagcagagaagcgcattcctaacaggaacttgctgaaagcggcctgggacctggagggcgtgtgtccaggggcggagcaggaaggggcgccggcctcggcggcccgccagcctccgggcggacctgcgctgacacctgctttcaggactggctgagaaaccagcacggcatctcttctggaagctccgcaccacgccgggcccgggccttccctccacgacaggctcaggaccccgtctgccgcccccgcgctcgaggccgccgatcctgggtcctcagtccgcggcaagcgagtcgctattaacagccctgctttacctcccaggacgctcgcatcctgcagggaagcaccccgggacacaataggccgtaccctgtgccagcggcccagtgagtcactgtgtgacggtctgcacgccacggacccatcgccttgcagaaaggctgagcgctccggagggccgggggcgcggtggcgacctgctcagcgggctccatgtgggcgtgccgcgggaaggtcggctttccttttgcagtgtatgatttagttcaggtcacctggaaagagtcaacatgaatggaaacagatgcatctcgaggcgcactgcccggctctcggacaagcctcttcctcccgcacagacagtcctcccacggccagggaggagagcagacctctcctcataaggagcacgcggccacagcctcggcctctgacgcgcagacccgggcacgggccgcgctcgggtcctggacgcgggttcgttcgcttggtgcagctttgccggcgcggctgctcatcgagatagatgccccctgggaaggcctcctgacggcgtgtgctctgtctgccgccagaacgacatgggccttaaatacgcacagaatgagaggggcactcacagggagagacagaggagggacaatcagaggacagacagacagacagaggcagacggcagggacacagagggagactgatacatacagagagggagagacagagacgcacagagtcacagagacagcgagacagaaacacagagaaagggagacagacgcgagactcccgggaagcgacagagaggagagacacagagagagagagcgggaaaggctgagaagggagagaaacagagagaaaggggacggagagagagacacagatggggttctccaggccagaacactggagtgggctttcattcccttctccaggggatcttcccaacccagggatcgaacccaagtctcccacattgctggcggattcttcaccagctgagccacaagggaagcccaagaatactggagtgggtagcttatcccttcttcagaggatcttcccaacccaggaatccaacccgggtctcctgcattgcagggcagattctttaccgtctgagtcaccccaaagcccatgcgcatactcagagacacagacagacagagacagacggctcccggggagagggggcatcctggatgggcttcgagtgggtggaggggctgaaaaccttccatcagcacagcctccgggggaccactgacccctcacgagggccccttgccgtgaagcgagccggctgtggacaccaacaaggcaggagaggacgggaggccgtcggtgtggctagcagtgggcccgctggggggcggtggcccggatggggggcggtgggcccgtggagctgcacttctcaggccacgtgcggggctggccgagtggagcctggaggcccacctgcagaggggctcgggcgtggccggctggaccccaggtgggctctgacccacactcgggcctcctccaccatctccttctcagcgagtagccggcccgggactttcacgtggccccggaggtcagcgcaggtgccccgtccagaggccctgcctcacagctcctcctgcgctgatccctgggagcagcactgctggagctgagctccaggatgcaagctcacggctgcggcctgctccacacccagccgtgcgcgctgcgcgcagagactcgggaccgtggctctcctgtgcgctcctcggtccagttgccgttgcagtcgccaagtcatgtccgactccgcaacctatgcactgcggcacgccgagcttccctgtcccgcaccacctcccagagtttgcttaagtcaatgtccattgaatcagcgatgccatccgaccatctcaccctctgccaccctcttctcctgccctcaatctttgcaagcatcagggtcttttccaatgagtcagctctttgcatcaggtggtcaaagtattggagcttcagcatcagtccttccaatgagtattcattcagggctgatttcctttaggatggactatctccttgctgtccaagggactctcccagccgatgccgaacttcagatcaaggactcagcaaacgctctcctagtacaatggctcagagacgcaagtatccgctggaaacttcctttacccctaaggtcacacgggtaagttcaagtttggggtggtgaagctttcagctaggactttggttctaacaaattgttattttcaccaagggaaccttttggccaagagcatggatcttggatccacgtgtaacatgcttcctacagaaaaaatggtacaaactttggacagcttttgcaggcactgcatggggctttttcatgagagcagccctcattcctctggctttgatttcttctttggatgcatctgaagcaagcaacccaaccccagtcaaaccactcatcccagcatttatttaaaatcgacttctgggatgagcagacagaaccgttgccccaaccccgtgaggtgactcataaacgacttcacacatcatggccttctggctacggtcaagggtggtacaggggcttcccaggcggtgcagtggtaaaaaaaaaatccacctgccaatgcaggagacacaagagacacaggttcaatccctgggtcgggaagaccccctggaggaggaaatggcagcccaccccagtattctcgcccggaaaatcccatggacagaggagcctggcaggatacagtccacggggttgcaaagagtcggacacaactgagcgactgacagaaaagactgggtcagagaggttatacaacctgcccaggtcacacagctgcagtctgaactgttcaactccaaggtatggcgccaggcctgcaggactttgcataaggggagaaaggaggtgctggattttagggcacgagactcaggcagggccagggccacgccacggtgggtgagcctgtgtgcgcaggctgggtgctccagcagaagcagcgccgtgagcagggagcacgcacaggcctggagcccccgccaccggcgctgcagtctggatgccccggaacacgcgcggcctcctggaatccctgtctgtggtttggccctggtggccgctcctgcacacgcctcctcaagagcattcaaaaaggatgtgcagaatatattttagaaaacttatgaatttttgcctaactaaaaaatttatgacattttgattccacttgtttggcttagtatgcatagaatgctaggtttctaataaaaaaaccaacagatgtgcagcaagcagcaaaggcttactgtagagcacagggaactatagtcaatatcttgtaatacctaccatggaaaataatttcagaaataatctatgtgtaactgaatcaccctgctgtgcacctgaaccgccacaggtcagcgatgaaagtgagagtgaaagtgctgctcgctcagtcatgtccgactctgccatcccatggactatatataaattaaaaaaataaaaatgacacgtggatagagatgtgagtccggaaggagaaactccttccacctccttgcagggttgtttcaccaggacttctggaacgtgaagcagtttccctgtgtctcaaaaaccaatccagcttgaggcctgttcagcacactagcatgagagaccccagcgcctcccccgtggggagaggatttcgacggttgtgcagcctcggctcatgggctccgctgagtcacagcgaccgtgtccctgcctccccgtcacgggcagcgcagggggccgggaggcccagcgaccggtgcagaccccgcctgggagcccactccccacgcaggcctcagccacccgtctcctgaccgcgggctgtcctctccgctgacttccacttggaagtgtcttcatggctgaacaaagccagagaccttcccactcctaggaagctgcccgtggagcttatacaaaacgcgtctgctcgctgcgcacttcatcctgccatgttccgttggtgtctggcaagctagacgtttgcggggcgagctggtgattggcgcggtcaggacaaacttcggagtgcttttttcatttttaaacgattcaggagtggcccctgagagacagtgtgttcaggacaaggcctctacgcaaactaaagatgcacaaatgcaggcagtgttagtcgctcggtcgtgtctgactctttgcgaccccagggactgtagcctgctgggctcctctgtccatgggactctccaggccagaatgctggagtgggtggccattcccttctccaggggatcttcccgacccagggatggagcctgagtctgttgcattgcgggcgggctctttaccacctgaaccaccagggcagccctgagatggacaagcagggcacagtggctcgtgtgcacggtgactctccgccaagccctctcgccactgcccccagcacacgaggcctggcatcctgccggcgaggcactgggcaggggaggggagcctcagtgcaggttccaagccggtcctctgagccccccacccacctgcctgagtttcccgggagagactgatgtccaccctttcagatgtatggagggctgcgcgtgggctctgtgggaccagtgctgtcttggcggccacgggaaggactggcgaggacctcccagccctcctcctggctcagtgacccagctcgtgggcacgaacgcacctgaagctcgcaggagacggggcagggtcacgggaggcgtccgcgtggccctccggccacggcacctggagaggacgctgggcctgagatcctggctgcagtctgagccagccgctagctccagaatcctccattaacccttgtggggttaaatgcctgcaggggagtgatgggccaactggagagggatttgtgccggataaacgaaaatgtctaattgtgtgctttctttgtgagttttcccctctgccaaattcttgaaattcttaggccttacaattttatgtgctttccatttcaatttgaacctgaaacgtcatttaaatgtcttctgaggtaatcctcacctactcaactcccaaaattgaaaaaaaaaattaaggttattcgactcacacctggagagtttttgaaggatatctgaccaccagtcataagctctcagttgatgaattgcagattcaaataggtaagttttacttcttggtacatcagctgggaaaggtcattttattaagggtcattttaaatgtttataattccactgccatcatatctataagacctcttatataaacttccagatataaaataagtaattccttttagcaactttcatacagtatgtttgaaagttgttagaagagttgatcttgtacttataacttggtgatggatgcattgttaatacgacaccgtggtgctcatcttgcaatatatacacacagtgaatcaccgctgtgcatctgaagtgagtaccgtattttacatcagtcgtatcaattcaggacatccctggtggtccaggggttaggagtgcgcctgccagtgcaggggacacaggttcgatccctgctccaggaagattccacgagccagagagcgagtgagcccatgcaccaataccgctgcagcccagccctctggagcctcagctctgaaacgagagaagccgccgcaatgaggcgctcacgcaccacctctagagagcagccccctgctcgctgcaactagagaaagcccactcgcagaaggaagacccagcacagccaaatgaaaaattgacattaatgaaaaatgaagacccagcacagccaatatgaaaaattcatattaattaaaaacatgtaggatttgactgccatcaagcctacaagacctttgatgagagagtaggaaattccccagttctaatgttgaaggagggagcacaccctctcggaggcaagagcctgagcagcccattgtaccttccttgttcccatgacaacccacacagtgggcaagctatggggtccgagcgtcagctaccccaggcccagaccctctccttgccgtcgagggagtctccgctccaggtttcaagggccttccttgtggcaggaggagaaagttccctcctgtcctctcaaggccctttccggccctaaggttcgtaacttgaagattctgggaccccattttccgtgtttgtgcaccaaaagcaggcataacgaaggctgcataattgggagactgggaggcaggccccccagggccttctcggttctcatggaaaggtccagacttgccattctgtctattctgggtacagtggatgcctgaatcctagagctgatctgggagaggaaactggaagccgcaagcctgacagagacgctaggaacatgcctgctactctaggcagcaacagcaagaagcactcaaaccttcaaggcactggcttccctggggctcagcagtgaagaacctgcccgccaatgcaggagacccacgtttcatccctgggttgggaagatccccctggagaaggaaatggcaacccactccttgcctgggaaatcccaaggacagaggagcctggtggctacagacactggggtcgcaaaagagtcagacacgactgagcaactcaacaccaaccagcctacaaggagccagaagggagactcgtgggcagggctcctagagtcccccctatccgatccaaggaaccagaaatgaggctccaagtcccactatctgctcctgcaaggctcctagagtccccactatccactcctgcgtcgaagtccatgcaacagtgatggaggaccacggttcacatggaatgaaaacagaatttcaataactcatagatgattttctaaaaaactgagagatgccttccctggatatatcctgcttcagttcagttcaactcagctcactcagtcgtgtccgactctttgtgaccccatgaatcgcagcacgccaggcctccctgtccatcaccaactcccagagtccacccaaacccatgtccatcgagttggtgatgccatccaaccatctcatcctctgttgtccccttctcctcctgccctcaatctttcccagcatcagggtcttttcaaatgagtcaactcttcgaatgaggtggccaaaacattggagtttcagcctcagcttcagtccttccaatgaacacccaggactgatctcctttaagatggactggttgggtctccttgcagtccaagggactctcaagattcttctccaacaccacagttcaaaagcatcaattcttcggtgctcagctttctttacagtccaactctcacatccatacatgaccactggaaaaaccatagccttgactagatggacctttgttggcaaagtaatgtctctgcttttgaatatgctatctaggttggtcataactttccttccaaggagtaagtgtcttttaatttcatggctgcagtcaccatctgcagtgattttggagcccagaaaaataaagtcagccactgtttccactgtttccccatctagttgccatgatatcctgcttatcacccataaataacactcactagtggtaactttcaatgatgttagtacatcaaccaaagggatcttatgggttttttcatccattcctcagataacggatatggtacgtgtgtgcgtgtgtgcgtgtgtgtgtgtgtgtgtgtgtgtgcccgcgcacacgcatgcatgtcccttgtgctcgattgtgtaggattctttgtgacctttggactgtaggctccagtgtccatgggatttttttaggcaagaacactggagtgggttgccatttcctcctccaggggatcttcccgacccagggattgaaccagtgtctcttgagttggcagggaggttctttactgctgagccaccagggaacttatggttgccccagacattacagagagaatgcattcagtcagttttgggttatcatgctgtggaaaatttgtttttcaatccagaaggctgttgaactgctttttttttttttttcattgcagataactcaaaactggtttggttccatgacatcagccttggcacgtgtgaagagcaagaactttgccttgtttggaaccgagaggagcctctactttctcttttccatttttatgaagacagtattttttcctcttagctggatgatgtatacttttaacattccagggggaaagtgtcagtgatatgcaagtcataataaaagaaaatcaaaagaaatgcaattacaagggacaaggaacttcatcatttttagtatgaaacgcccagaggaaaatctaatttaaaaaattaccggcaccatatgaaggagacaagaatatacagaaagatttgttactttaaaaattaacttaatctttctgggtctcggtcttatttctctttatttttaaagggcaaaaagtatcatgtgatgttggataaggagtaaagctcccatcacggcgacgtgatgctgggaagtgacaacggaatcccctggtctctgtctgtggcttgccggctggagtgcagcagggcacttcacgagttattaagagtgaatgtatattgcggatgaaaccatgtctctttcccattcatataaaggtacctattaaaaatgaaaccgtggacttccctggtggtccagcagtggttaagactccacctgcctatgcaggggaaacaggttcagtccctggcctggggagatcccacatgcctcggagaaactgagcccacgcacacgaccgagccccaggcaccctggagcccgagctcggctgcaagcgcggccaccaccacaagaagcctgcgggcatctggagagtagcccccccgtcagcagccagggagagctcgtgcacggcagccaagaccagcacagccaaaaaataaaaaataataacaaataaggtgtttttaatgaaaatgaatattcatggggcaccctgcagttgatagaattcttccatgtccatcaactgggtttgatcctccaaacgacctatagataagtcatgactcttgtcgcctctaccagactgatggtcacgaagaggttactcttccaaagacacatggtctcctgacggcggaaccaggactcaaacccagaattctgacataaagcatctcacccttccactctctcacacggccaccctgatcggagttctacgactgccagctaaaccggcttgcacagaaccaggatgtcataagctgaatacagctgtgatttgcttatttataacagctctgtctctttgaaaaagagacgtcatttaacaactatgagaaaaaaaatcaagctcacttctatcataaacgttggctgacgttaggggactttgacttatttctaacccagcgagatttaattctgccaccctcaacccatactaagagaaattggaatcattcattatttagagggagagtccaaataatattgcaatatcacaggcttcctttaaaagcctttttcttgatggaatctctgattttcctttcgggcatgaaaaataacactgttattattagaggggcctggccgagggttagcagtgaggaaggaaggagatggcgtgaataatattgatttctaaccttttatctagtttttggttggaatcaaattcagtgtttagctccatagctttctctatagtaaggattctcttgacataaggctttgagatttgaggagataaatttcctttgtccagatgtgatttttctccacttggctggagtcagcctgaaaatggaagacacggaggtctggtagaaagattcctaagggttctctccttttcaagagtggattccacagaaagctctctgctctcatctgttagcagtagtggtgggtctagtaggctcagagaaaaatagagacatcacttttctgtccactgcccactataatgatttttttcttttattttttattatttttctggcagtaccacatggcttgcaggatgttagttctctgaccaggggtggaatctgggcccagagcagcgaaagcacctcaccactgggccaccagggaattccggtgccttcttttattgctctgtacatctgctctttttgtccttcccttgtatctcaatgtgccatcctctcaccttctcttagcatctgtctttgctcgcatctagcttgtctcagggcagtcttcccaggctatgaagctgcaccactgagcctttcctgaactccccagcttggcacaggctcttgaaccaggctctgcccaggcttccagtgaggtgtttcaggctgatacaccaacagtctccacatagggataaacaagtagacccagatgggattcctaaaaaccctgaagcttagtaagcatgttttgttgaaacttctggcagtagatgttctaggaatgctggaatgcgacataaaatttgctgcctaggaaggcattacccaggtttcgagaatggagatgaattctccaacctccactgggcgactcttgtcatattcttctaattgaacaggcaatattcttcaaaaagtcctaagccatgtctccactgagaaggcaaatgggcctcttttcaacctacctacactgagccctcatggtgtttttcaataaacgactcaagaagtcatctcggtttcctcttctgtaatgagatgagggacaccccctgcttctctttcacctcgctcattgctcaaagggaattttcccccttcttgtgcattttctataaattagcctagtagatgggtcaaatgaatctgttcagacttccccccaaaattcccttccccgccctgccagtatctgtcctgaccctaagctgcttccccttgtggctcacccccctgccatcctaagcgcctgaccgtctgtcctacaggatttcccgggcatcagctcggaggccagtaggacctcagctctgaggtggacttgggggaaaagcactgttcctccccgccagttgcagacaagtgtgcgggaaggcaggagggggtgcatgagaaggtggccctggggcaggcgggtcacggccatgtggcccttgagcgggctcactgaggaagggccggggtctgcaggccatccaggcccgggggcctcggtgcaggagccccgcatgagagtggaggaggggatccatgtccacgagcaacccctggccgcgtggctttccaaacaaaaagctcctgggaagatcgtggaaatggacgtcacagcctgttccatttctggaggcccaacccaagttctcctccttcccagccctgtggatacacgctcatttccttggcagccttagataaagctattaatgtgatctgagtgcctcagagattagcatgattataaatatgagtgttcaaacacaagcaagttgaaaccaaatgcccctcaaacactggctctctgtgataggaaggtttccggtggtgccttgagcccttggataaacgagctggaaaatagagtgaaatgggcccgctggtgaatccccaaggccacgctcccacacagctaggaggagacgcactcgctgctcccgacgtatacaatccacggtggctggcagcagagctctgggcgagaatctgagaaacactaattcagaacttcaagcaggggctctggtgggcgatacagaggctctgatcaaaacaggcggtctttactccacagccaacctgcaaaacacccccttcatggtctaactgcctggtggggcttatgagaggctcctaaccaatagttataaatagccaccaaggagtttgtttatctacctaagagaaaacactgttcaagatttttaaaaacatgcatttgacaccaaagagatgtaactgctatgggcgaagaaacagcacgccagaccgagcctgctgttttgatgtggtcactatttgctaagcagacctgccacttggcaacacgttgcgcgcccaactctaggtatttgaaagtttagaagcacacctctttcaagaaattctaaaattaaagattttttcattaattcgtcaaaacctttccccaagttagtccaaaagcctgagattttacttgtcaggccatgtgaagacagaagggatcctgatggctggatctcttctttaatctcctagcactggtatcaccagtttttgtcaacctaaccgaccaacttatttgtagagcgctactcctaaatgttaaatgataaagtgtaaaaagtgttcccaggaggcaaaagatagtaacttacaagctgactgtcagcatctacatttttttaattttaaaaagctttttgtttggggatataactgattaacaacgttgtgatagtttcaggtgaacagcaaaggaactcagccacatgtacacgtatcccctctcctcgaaactcccctcccatccaggctgcccctaacatcgagcagagttccatgtgctctacagtaggtccttattggttatccattttaaatatggcagtagaatccagtatgtgattggaagatacagttgtgtgggtctggtgaaattctaggacacccactgtatcaggatggtaggtgatcaggggaaaatgcctcatcagtcttcaattccagtattttctacctatgtttctgaccatagagggcttccccagtggctcagctgtaaagaatctgcctgcaatgcaggagacataggggacgtgggcccaatccctaggtcaggaagatcctctggagggcatgggattctctctgtgggagcctcccatggacagaggagcctggtgggctgcagtccatggggtcgcaaagagttggacgtgactgaaggcagggagcacacacagtctgaccacagcgcctttggtagtgggtatgggaggctagcacacccatggaacacagttctgcctggatgccagctctcatccaataccacgagctgccagttctacccacagctaggccagctcagaactggcatccagtccagttgcaggaagacccaccacctgtcactctgtcacctgaaaacctatttcacttggcctctgattctgcactccaccctctgcccccggaggcggcgggatgctaaggacagagcacaaacgtcagaggaagacagaactgggctgcgacctgaactctgcaaatccccagccgtgtcaacgagtcggaagaattcgtcgttctcttttctttcgccggaatgcttcagtctaacttgggagatgagatcttcaacgtctcagagcctccatgtcttaattcataaaatacagaaaagaaggctctcgttcgagcgttgtcctcagaataaatgacttctgtgaagcattttagcataggcactgccatcagtcattgtgaatgcttctactcccctcatctttccgtttacctgtcagagatctcaattctcctcttctttcaaagaagtgataggaaatgcaaatgtgaaaagaaccgtgtgaaaagcttaaagctggtaaagttctttttgcaggatttgtagcttttgatttgagggatctcattaatattcccttaacatcattagtcaagggaagttcttgaaaaaacaactcaaactagactcgatacctctgagccattatacccaagcctgcaagagctctggagtcagaagaagctatgccttcctgacctcagtgcagaagggctagcctgtcctcatcaagttgggattgatgagtcaaacttctgacttttcctaagccatgaggtccccacctggaatattctatgagagccagctactacaaaaagtcaatggcaggtccagaggtggatggacagctgaaacagtcaaggggagatgaaccttccataagacaataatatttacaaatcatgtgtggctctggaaagaggaaacctgaatacagatgctagagatattcatgtaacttttactggtaccgaaaggatgaaaaccactccttcgtcacacacctgagccttccaattctgggcaactggagtttagggacaaagtctggttttgggacaaaaggcaatgcaacactatatcacaaagtttatggacgtggccacacgccttccccaaggagcggacacctcacagccttcctaacaagccagccacaacctcgctgacaggcttgcaggctgacggctctcaaatttcttatgagccccgatctaatttgttattgttcagtcgttcaatcgtgtccgactcttggcgacccggtggactgcagcacgccagacctccctgtccatcaccaactcccagagtttgctcaaacccatgtcattgagtcggtggtgccatccaaccatcccgtcctgttgtctccttctcctcctgctttcaatctttccccatcagggtcttttccaagtaaatcctagtttagaatcaaatatatccacatagaactcagtgacttcaagcccagcaccccccaaagggagctcgctaagctttcctcaatctgcctttagaagccctgtcagcgcctctgaacccacagcccggctagaagcccacaagtggcctccttccccttctccgctgccgcccaccgccgcctgccatgaggccactcctcttcctcggcccacccctgctgacccctcagccccgcggcattgctcctgtgctcccggcctcgccttgtccctccagcctactcccagcgctgcttccggggagcacccctcaaagagcagagcaactgcacccttctgtctcattcccaggccctgagcggtttcccgtccacagtgagctggccccgctgacgccctcagccccacctctccgcaagcccatctcccaccttcagctccgtgtgctgctggaagcatcagcccaaagcctggccctttcagctgaccctggctcacactgcttttccatgctcctcaggaccctgcccagacgcagaggacaattcacattggtgtacaccagaaaccaagccgacagtgtaaaggagctcttttccaattaaaattctttaaaagaagatgcaaaagaaagaaaaaaaaaaaagaccctgctcaaacaccacctcttctacgaagcctttcttgaccaagccccaccacctccccacgatgcccacttctcatcctgcccgtcaccgctccctggtgagccgccagggccccctctccccaagggcagggcctgcatcctacccaccttattcaccaggttccgacggtgccaggcaccaggtaacagctgtgaaaggatttgtgggatgaatacacaaataaattgggatcaagacaactgaaacagctcaatccataaagactgtgccatgctccagaagatggacccgtgacgcacgaagcatctcaggacggtctggagctgagcccgcgtggtatgtagtcgagtcccgagcgctgaggcggatttccgagtctacgacgtcgtagctctcggactcggcctgagatgtccgatccctctgagcccgtttcttcgtctacagagacgagggcatggcgccgctggcgcccagggctggggtgacagcggccttgagacgactttccccagcgggtccctcggccgcggcgtggggggccggcctctccgcccaccgagagggctgaaccggggcctggggccacgggaccgagcacagctcccgcctcgagggaccgacgctccgcctgaagcagcgagacgccctcactggagaggctgggagccgcccgcgaggctgacggtatcagaggggtcgggaagccgcacaccggccggctgggggcggggccgggggcggggcgggcggggcggggcggggcggggcggggcggggcggggcggggcggggcggggcggggcggggcggggcggggcgggggcgtcggcgtcgagacgcggctccgcctgccgcctctgctgccccctgtcggcgcggaggagagcagagggcgggcagggcgcccgctggggcccgcggagccctcctcttgtctgtccctggagagctcgtcacaacctctctcttctgccctcaacgccccccgcccccactttctctctcaggtcggaggtcaccaccgggggtctcccaggccctggtgtggaccaccgatgggacggagcaagggcgctgagcgcggcagggcctccggttctcctgcccggcctgcccgcgggtctccccgaggggtccccgaagcctgttgccctgaacgcctcagtgagcattcatgcagcctgctggggggcggctgcggccagaggggaggacggagagtggacggcaaggcgctcgggcagcggagggctcgtcccttgggccgaggggacggcacggaacttttccattcacagcggcccagcgccttcagctcacggaacacgactaggccgcgggcgtggaccactccaggaaaacctgtgctgagatggcgatctcaggatttccaggagagcccctggcctccacgcactagactccgggagcagccccagcctcctcgggacaacagagacgccggccaaccctgccactgggccctgggaggcaagctcgccccccgggaagccctgccgcccagccccgggggctcccccagacgccgggctgggcgttcccctgcacctcgcccgacccgacgctgcaagaaggccccctgtgcacgacccgtccgcctgaacctccagaaagagaaacaaggcctgggaggccctctcctgttctgttcaggaactgccaacccgtgggtttcagaaccgcaaggggcccctcgcctgcagtcctaacctccccatgtcttggacacccggagacgcgggtcagagcgcttgtccagaggaagctcagggctgcaggagcgatccctgacggtcggccggctgtcttctccattctctctcccctgcgctggctgcttggtgagaaaacgacacagcggagactggcgtgagcccaagccggaggccaccctccctcacgcagacagccctgaagctgttaataaataaagccttcacacacgtaaacaattacattaattgtggctctgacggtttttcccctcaaggaaccaagtcctcaattggggttaggaagaagacaaaggaagcaagaaaacggagtcccagagaagtgaaatgtcagccagcatggacggcaggaccagacacctcatgatgtgaacagtggccccaggggacaaggggcccccagagtgagtgccacccagtatgtctggaccgtgagagatggcgtatcccacggaaacccctcacctggggttggtccataaaacagcacaacaggcaactgaacagagcccccagaggggctcccccacctggctctgccatgctgttttcagtgaaaattagtactggctgcttccagctttcaccttgaactcagctgactgtatcttctctcactcattataatggtaacaccgtgtacatcgtaaaggtcacacctgtgtttatacgtcatatgtcatcaaaatactgtgaagagaacgctatgtggtctcaatcagaagatcaaaaagaaagaaagaaaaaaaaaaagagcaagaggcaggcccagcttctgacgcagggcagcttggctcttctggagccccaggatgggccggggcccaccgaggccaccagaggttgtccaggccaagtacacactgtttattgacagagagacaaactgcacctgcctggtttcagggtgaccagggaatttccactctggatacgagaaaacttttacactgtacccattctttttttctttcaaaagccaaaattagaaagaaaacaaacatatttggggctcaacatagcaggaaaaagaaactcagaggtcaagagatttcataagaaaagctctgaccgggtcttacctcacctggcttaaagtccaggggtcctgagattggggtgagagttggctgtagccccccagggccctgggaggctagctgtcctcagaaaggtgcccaggtagaggtgtccctggttcccacgctgcaggagcgggtcatgaggacgctgggggaaggagggcagaggattcctggaggagcgtttttctagtctactatagtggtgccttgaggtgcaattaataaggaactgccaagaacaattggacagaaggaacttagccattgcctccctctgccaaagcagaactaacccgatactgtttacctggccgacccgtgacctggccctcgcaggcatctcgctaattagcatattccccgtagcccaggccttggaccggctgtcacacactctcctacattctaggcctcagtccgcttgccacggggccctccaagccccccaggcggtctgccagctactcctgggacagtgagatctgttcctccctccaggggcccttacacctgtgggcacaccggctgtcagcctgttctggccccggggtccaagatccacatccatcttcaagaaggcatcctctgaagcagtgtgggaaaaaaagcttttttgcttgagaatcaccttgtattgtactgacttggaaacaggttggtcagcttcccttcaaccaggttgtaactgaaaccaatcagtcttcattaacacgcaagaggccaggggtgttttataaagctgctgctcaccatccgggcagttgtgagtcattcagtttatgtgagatcattcaggttataagatactggatgaatccacgatctacaatcatgtgaagacagatttatactctggtgattttttttttttaagtatctcaattgggttcttttctcccaagcagtgaaaatcaagttatcctctgccccgccttctccagcccctgattctaaagagagctgagaaaaactaaagagagctgggatcaagtcagacttaaacaaaacaggtagggctgggcaagtgattttcagcaaaatcacaaaaacacaactgaaagagaactattcttaagaaagactcatgtaccataaaaggggaatttccagaagcctctcttattagcaattcgctcttccattcccttcctctctagtttcaagatgagatgatgacaaaaagactgacttgtcagaaggggaaaaaaaaaaaaacacatgaaactccgtatacaaacgtgtaaacggacagagttgacacttgtgggaatttccacacctgttcttctgagggccatgaagaggagaggagagagagaaagcaaagggaagctttgcccccacctgcatccatccagagttgtgaacgctgttttcttacttttaaataaatgtcactacttactgagcacatgttttatttttcttgtggggcaaaaatagtttccccaagtaaaagttctgaaatggattctttttttttttttttcagaaactgacatagctgggaattttctgaaaactgcaagtgtatacgtttctcctttcactttccatttttacacaagcattggaggccaacatgcactagctaatttcagtagaatgttccagagcgtggggaaggacaccatcccaggggatgaggggacatttattgggcatttgtttttcataaggcctgggatatctggtactgtgggggagtcagattcaggaaatagaagaaaaaaatccaactgaatagggaaataagccaaacaaaaatggacatcaagataacaaaccacatatgaaaacacagacgcatgcacatagccagctgtagtttctacaagccgggctgaatctgctcaccttgcaaagatttcccgtacgggggtgggggaggggagactgtccatggatattcctagtctctactggccagctcttaatgtttctgaaatccctttcagtggagccatttacatcatgtcctctttttattttttccacactcaagccactttattaaacattttcctggaggtataatttacctatagaaaaatgaacatttgtgtgtgtgtgtacagttggatggatctggactaaaagcggaagccaccccctctgaagatacggacgcttttccatcctcccggaaaggtcccttgaagccatttagtttgaacattatttgcatctgaatgtttcagcgtggagatgatcagagccaaatgtgtgggagccaggctcgtcatcaatcatttactgcaaacatagcttgtgaaggttccggagacgcgaggtgagcctgcacggacacgctggcaggggtgggcgtttgtaagaggtgccgcgggatttctcaggggcaacagcatgtgggccccgctcagcagccctgctggcgagctgaccacgcctctgaagacccagaacgcttcttttctggttctgttcttcaggcatcggggttaacatgtttagaaagagggaagttgaggcgggatagtcaaatcgaccatattctcgaaggagcagaggctctgtgacagggagggtgcggccacggctctgagcactcttttccaaaatttattgcaacatcgaaagaggagttcacatgaccgggcatattagacattttcttcacatttcctgtttcccaaacttccgaggagacttcaggggaatgtctggcccggagtcaccaattcagggtgagggacagagactctcttttgcgagggtgcagccctagggccagggcgggggtggggctgggaggagaagcaaggccccaggcacttcctctggggagcgggcaggggtgccccgcgcccggaacccggactctggccgagcggcggggggccgaagaccagacgaagcaggagctgcacctctagtctcgtttctcacgaagggcggagctgcttcatggacatttgaatcggacgtcttcaaagcaaaaccggagtgaaaaaagtcccaacatactctgtagagagcaggtgttttttttttttttttttctaaatcacttttccaaaatggtaccccgaggtaatcctttcttaaatcttccagcaatcaaaacaatgtggttacaaaagtttacaactttaaaacctttcaaaggtcacctccctgcctcacaccctctcacattaagagcataacggatattttgagtcacacatattgttctttgttcaatttgcatttggtgaaatccctcctttgggctaatttagtaagcaagcagtgccttggcctcccttggtgattgttctctcctcttctctattttttgcgtgtgtcaaaaaaagttgagactcccagtggatccaatgaaggggcagcctttgtccctgaagcactctttttgctcaggtggtttttccaccatgcttgggatggaattccttctccttcacagctctgctaaggttcctgtcctctgagaccctcgcagacctcctctccttgtcccctccccacctgacctcttgtccaaccaacacacttctccatatttcaggctcagacgtttggtctccaccatctgactatattactgaaggcctcaatcaagagttctcactggtgctcggtgacagcctggagggatgggtggggaggggactgggaggggttttaggaaagggaggggacacaagtgtgcccggcagattcatactgatgttcagcagaggccatcacaatatcctcgagtactcatcctccaagccatatatatacatgcgttctcgggacttccctggtggcccagggatgaagacttcaccttccaaagcaaggggtgcgggttccatccctggtcagagagaccaggtgcctcaacgccaaaacccaaaacataaaacagaagaattgtaaccagttcaataaagacgttaaaaatggtccacaatgacgacaacatcaacaacaatcttaaaaaaaatttaggagttgttgtgccaaagtgagactgtatgagaaagactggctaaaggtggagcgaacccaagcagcccctgctccagcgcgggggtccccgcgggtggagacgctcagccgcagctccggccgcagcagctccggccgcggcagcggctctcggcccggaggctcactctccccaccaggtgctccgtgcacgccagctgccacgggaggcccgagtgctttatgagactgcctgctcactcccccggcttcatgtgtaagccaagggtgcttggcttttagaaacatatttctttctctatgagtaatttacaagtgactcatgctcagcttcaccagccagcccatgtgacccgcggtgctgggtgagtgtatctatagatgtgtaaaccaaagcagttcttagaacacagactcccccgcccacgtgctgtttatttccctccacttcacaggcaccgagcgatgatacagatgagctgccggggaccgcccgctcctcactcaaggctggaacgggcccatgcggagggaacaaaacagggcttctaacaagagcaaagacaagaccggaggaggcaagagccgggcagaccggccagcagacttccttcgtgcaagcagatgatcacggagctctgagcaaagcccaggaagacgcaggacgacgagcattcacctgagcaaacaccaccgtctctctgcgtcctagtcgagatttcagacgtaaataagtagagacagcagccttaccacctccaagcaagccaccacggcctttcctaaaacagaaaagcgttcctggggtctgtggtggctggtaactcacgcaggggaaaaagcctaatgcctccagctcgtcttcgtcactggaggacgcgcagggcctggcgtggggacgctgctgtggcgggaagggcctcgggagacacagctgccaagctcgcagagagcccgcagagagctccttctcacttcctttgctctagtcttgcctgctctgtgaagacctctgcagtctggcctctcacttgacctcccggtgccgtctgcgctcaccgtacggttcgccctcagcctgggcctgcccttgctgcttccccaccaagccccccaacatgcttgatccctgcctccacctcccaactccctgtcaccttgtcacctccatcctgcaagtctgcaccccatttccaaactcagatcatccttccaggatcctggtttggccacccaggccggctgccgtaagtgcctccatctctggaaggcctcccacgtgtcacctgtctcccctccagctccacttgaggcctgacagtcacgtttgtccagctggactacagagtgtttgaggaggggcatcctgctttttgttcccatttatccccacagtactgagccccacagcagtgggcatgcaaagttcccagttaaaagaaatactttattttagccaaaacagtattgtatgtgaggtcttaccccaccttaaatcctcaactgggaaatcaacttcactatgcgtcctaagtggaggccatgtggagagaaacaaatgccccgaattttcaacagaatggccaacatgagacgtaacgggaatttcagagcgctgtggccaagcgtgcgtccaagcactcagcacgcatcagctcatctagacgcagtagacaccgttacacccccacttctcacaggagaagactgaggcagaacaggggactcatataaagccacatggctggaaagtgctggattcaagctcaggtcatgagactccaggctgcgctcctaggtactatgctgaattcccattaacaagtatgtttgaggtatctgtcttctacacgggtatcttgccccagttaggtatactaaaaaatatcatcactcaagtgacggttaagtatcatcctgcccggaaacttttataaaaagagaagcatggttttatgggagctaaataatagcatctctttgcatgtttattcattgtttatttggctgggtcaggtccttcgttttggggcatggactctccagttgtggcgtgcaggcttggttgttccgtggcacgtgggatcttagttccaaagaaagagaaagtcaaagtgtcagtcactccgttgtctccaactctctgtgacctcatggacaccaggctcctctgcccatgggattctccaggcaggaatactggagtgagtcaccattcccttctccaggggaccttcctgacccagggattgaacccaggtctcctgcactgcaggcggattctttactgtctgagctagcagggaagccccttagttccccaaagcaagtaagtgaaaggcactcagtcgtatccgactctgcgaccccatgggctatacggtccgtggaattctccaggccagaacactggaatgggttgcctttcccttctccaagggatcttcccaacccggggattggcccagagtctccggcgttgcaggcgggctcttcacaagctgaaccaccggggcagcccaagtggtgctcgtggtaaagaaaaaaacccgcctgccgacgcaagagacagaagagactccagttcgatccctgggtcgggaaaattcccctggagaaggaaatggcagcccactccagtattcctgcctggagaatcccaaggacagaggagcctggcgggctacagtccactgggtctcaaagagtcggacacgcctgagtgactaagcacacacacacacccatttagttcccaaccagggatcagatccgagtctcctgcatcgcaaggcagattcctaaccaccggaccaccagggaattcctaaaagagcaaaagagcatctttaaaggaaagggagtaaaatctcccagtccatcccagggaccctgcagattggctctgaccatgctcagcagaaatactaggttcaaacctctgggccaccttgagggagcatccccttcaggccaatgtgactttccacccatcagaatctcccccaaatccttaatttctccacataaagaaacctaatacaacccaaatcatagctgcagttagatctgtctactgcattttcatacgatcttgcaggcccacacatggcctgcttgagaacatcagattaggtacaagaagaaaagcctcatcctggtggtcaaatcatggcaggaaatgatgccaccagcaattattcatgtattagcagttgcttaagtaccataaggcttttaggggaaaagactgtgagccactggttggaaatgaagccccattattaatgtagtcaagctattcagctggattcaataaaataaaaagccctgcccagaccagtgtctgtagtagaagatgctaagagctattttttaaaaaatctggttttattgaatccaggctttatacacagcattgcttcttcccgaatggctgaaaaatcatcccgtgcattgtaagccatttgagagaaaatagacttaaactgtatcaggaaagtacagttagatttaaggagagcgcttcataatattccaggcaatggagaccacgggagccctgggtatgctgtcaaaacaggcagcgaaaccctcctttatcaactcagctcaggttctaaaccgttcccgggagctgctgtgtgccaggacccctcccggccctggcaggccctgagcacccccaggcaaacaagccgtgagtcctgctcgtgagggatttacaacccggaggaggagacaggcatttggggccgaccagcgctggcagcagccgtctcgtttggacgaacgtacttgctgcaattctgtctctgtgtttctctgtccctctccctggactcatcgctgccacttttcacgtctctggctccgtcttcattgttctgggacagttttatccccatctcccaggcctcaagcctcagccctctcgggcctggggagccctcaagaatcacctgtgtttatccctccaactacagccttggccaactggtcctgtctccaccgccctgctcggtggccgggatctcagtggtcagtaacgcaggagaccctgctgattcctagtctcgctcggcctcaggggcttcacaagctgaaaagaagttgtgggaataatttactccttgggtgaaggcatcaggccaggtgtgtttcacatgtacctgctcgacaaacatgtacagaatgccaagagccaggtacaggcttccgtggtggctcagacggtaaggaatctgcctgcaatgcaggagacacaggatcgatccctgggttagaaagaccccctggagaagggaattgcaacagtggcgagagaggcaggattaggtgagacgctggactagagggccttcgggtctagcaaaggaatagaaaagaccttagccccagagaaagtacagaaaacaatcaaactatctgacaaggttacagaccacagatgactcccagggaagctctaactgactcaatcatcgtcataaaccagggtgcccacagtgtttattatgggaaagatgcattttgagttaaatagtcctttttagataacctggggatttaactgttctttgtcatctttataatgctgtacccaactgaaataaaaccagttaaaaactgggggatttacataagaaatgtgatttttaaaacttaaagagttcctaatctctgaaacagaggtactgatctatgaatagcaacagtctaaaaactaaagtgcaaatgaacaaaatagagcatgtgagtaagacaactcatatttttgttgccctgttttaacatgttgaacaataatctgggtggcgaaattatggaccacttgagttttcctctttgtaaagttttcctctttccatttggtatgaaaaaacagcatatcatttgagaatgaaaacaacgaagtgccccagacgggcagagggcttgtgccaggtgtcttgccaagctgtgctgtctaccgcagagcaagtccgctgtcttctgttaaacctcgggccccaatccagtaccggtgacggccagggtgcaggcccaggaggcccaagcccttggcgtgagaagccgccacgggccgcgctccctggaaggggctgtgagcctggcagccgcttggggcttcggaggctgctggggacaaggtccctgagagacgtcatggggaccaagggactgcaggggctgcccaagagaggactccaagggaaggagaaagagatcccgtggaggaggggaaacctgcccaaaccaaccctagactgagcctggaaagactcgagggcttggatgcgggcagaaggacgtcactcccgccaggtcagcggctggggcccaggcaggaccacaccctgggcactcgtttcccggggctcggcagcgcgaccccgggcaggtgggccgcagtgaggcctcagcacggcgctgtcccctccctgccccccgaggacgcctccaggcccccgccagccccgatggccccactccccccacgcgctgacgccgccctcccgcggccccccggtcccgggaccgccagcagacctcaaccaccagctggacgccgcggcctctccgctgacttcccacagcggcgtttggagctggcaccttcactcccacgactttcgtcagccatcgtgtgtcaagggcagtgtgtcagaggacacagaacacgctcaacgagaggaaacgcgctgcccgaggacatctgtgtaaggttcgctcacgaccatgggctgagacgataccttagcaggtgtcgcaccagccgtcactggctgagaccgtaccccagggctacgggagacgcacccaggcaaacgtggaactctaatgcaacacgggagactgttgcaagacagacagcatcctggtgaatcattccttagaaaggtattgaatgggctaagtaccaacaaacccttccaacgccaggctagtcacacatcatcatgttgacttttgactgcgacagctcagcactggctgaggggaaacaggacatcagataggttaggtctgggtaggaaagcattcacgactgccccatcaggaatgatccactcctctaaggacgaaagcttattcatcctatcagttgacccacttccctccctcttttcctttttccttccttccttccatggagccagacactgggctagatgcttagactacagacaagaataagataggagctcacactccagccaggcagactgtcagctagcaaaccctaatgctgcaaggtgataaggagccatgtcagcggcatgcggacagtgcgtcaggaacagacagagggggcatctctttggtggattcactggcaagcaattctccaataaacacttctcaggtgtctcatcgctggggctttggccgtcttttgccatcacccactctcaccctttcggtctgtctctccctctctccagcatctgtttgttcacctctctctctttctccatccatcatctctctgtatccatccgtccaaccacctgcaacattttcaaattgcgtaactttctaggataggttcctgtccttgccgcaggagcagcttagccacccaagaccattttgctaaagtgacagctgacagggagtgagctcctcctcctgtttgctgctgtttgctgctctttgaccccacgggctgcagcctgccaggcttccctgtcccgcactgtctccctggagccgctcctctggagtctgtcgtcaggatgctccccgttgtctgaaatggtgaggaggtgctgcctcgaggcagctgggccgaccagagggctctccaggggcccctgcgcatctcgcgtcctttgccgctaagagtccctaagtgcccttggaccacgggcggccgctgccctttcagtactgggacgagctgcccaggtcaaacgctgagttgagaaatggtggctctggggggtctgttccatgttcttagaggtcactgttgcagctggctgccgttctaataaagactgccaaccctgcactgagagtcacacctgggttacagtcattcatcgttaacatcaagagccaaaactccgtgagctgcttggactcagaattttgttacgtagcttgcattgtctaatgccttgaagcttctgatctgtttccagctggaaggaaaaggagaccactccactcactggtgagttaatttggcctctgtagcatgaatttctgcaggttccctgatcctctgttcagtataaagccctcctggaatggcagggctttttaggtggcctgcacatcttccgtgggaagaagaaaggaacctggagggaagtgtctagaaacatagctgacccatggttactggtctttctctaccatatccaaacccaagggatgggccacacgcaacagctgaacacaaataacatggcacccggcaccctggcagccccgtggtctttttttttccctatacccctcagcatgtgggaccttaattccaagagcagggattgaccctgaatttgaaggcagagtcttaaccactggaccacctcaagtaagtctctgcctcagtggccttgagtctttatcctgggggcttaactggttttcattagcgctgcttactggtccaacagcactgaatcacggcctctggttctgaagctctggtttacggtctttgagaggctcccgctcctgatctcagagcctgccaggggccccggggtctctgggcatctgataatgctcgcgccgggcgtgccccaagcgcttccaccagggtttctctgagttgccaagtgccccagggtctgctctctgcactaaatgcagacaaagaatcaccttttggttttcagacagacgccaacggcgccattgtgctttagtctctaagtcctgactctttcgcagccccaggctcctctgtgcatcaacgtctccaggcaaggacgctggagtggggtttgctatttccttctccaggggatcttcccgacccagggatcgagcccgagtctcctgtgctgcaagtggcctcctgcacttcaggtggattctctactgactgagccggcagggaagcccctagagcaactatacttcaacttaaaaagaaacagagtggcctggaccaatccactagttgacggtagagatgagactcggatccagattcagattttcggacccccactctttcttcctcccatgatacaggcgaccaaaatcgaaccgtatcttctgcactggaaggtggattctttaccactaagccatccccaggaagccctagatttcaatggacatcatcaaagtgattttaaccctaatctaaaatttgatcttttgaggacagcagtggttatctgtttacatccttttatatttttcaatgttttctttgtgattacagtgaccaagctcatataagtagcagccagactacaattataatcagtgagaatcagcacccgagaagcagcctgtcgcggtggctgacggcgcaacacaggtgtcgtcacggctcagccacttcctacagcacgatcttgggcaaggtgctaaatgcatctctgggcctcagtttgttcttctgtaaagtgggattagtgacagtactgcctcacgacgttcttgtgaggattaaaggagtcatgtgtaatatgcttaaggcagtgtgggcctggcaccccgtacgtgccgtatgaatgaataaatcatggagctaatcaacagctagcagacggggcagcactcaggagcttggtttttttaagattttttttcttttcaatgtggaccatgtcttcaaagtctttactgaatttgttacaacactgcttctgttctacattttggcttcttggccgtgaggcatgtgggatcccagatccccaaccagggactgaactctttatccccctgcattggaaggcaaagtctcaaccactggaccaccacagaagttccagatcctggttttaaaggagatacaataatacagcaaagacctcggatcagtgcctggtgcgtaataggcggggtattaattgctacccagaagcagtaaatagtagctgtgccctacttctgtttcgatccgttgttttccacctttgacctagccttgcagaactctgtggcaacacacttggcttcctctttgccattcttggcgttcagggagaaaaggcccaggccccccgaggccgggggagccctcgcctcatacggtgagacacagagccctagtcccacacacggctgtaagctgggtcccgtcgggagctcttcctcccgcttcactgtcctacaggtgtccccgcacgttctctctttacacgtgagtcttcaaatcttggggctgcctgcaccctctgaaaccttccttcacgtgtacttcttttttgcacagaaggagacacacgtacaagtgataacgtgaaaagagggtctgaaatcaaccaggcttgtcaccagaggtcattgcactgctgctggcggtcggctaggcattggggcaaagggaaatataccaattaggtgccttcgtccggaaacttaagggtccaaagaaacagccctttcattaggtgttcttggtaaatagagggtttttttgagaagttttggacaagggttaatttatctttgagatcagttcagttcagtcgcgcagtcgtgtccgactctttgcgaccccatgaatcacagcacgccaggcctccctgtccatcaccatctcccggagttcactcaaacttagtccatcgagtctgtgatgccatccagccatctcatcctctgttgtccccttctcctcctgcccccaatccctcccagcaccagagtcttttccaatgagtcaactcttcgcatgaggtggccaaaatactggagtttcaactttagcatcagtccttccaaggaacacccatggctgatctcctttagaatagactggttggatctccttgcagtccaagggactctcaggagtcttctccaacaccacagttcaaaagcatcaattctttggtgctcagctttcttcacagtccaaccctcacatccatacatgaccactggaaaaaccatagccttgactagatggacctttgttggcaaagttatgagataaagttaatcaaatatcataaactgagtttctgtgggatttttgtctctgttataatcgatgttttcttctattctgaatgcaaagtgagcttttttgtataagtctaaaatccgtgttttgctccccaacccatagccacgtgtgtgatgtgaacccacccccctgccaatgtgcaattttcaagttttagtccccatgttggcctaatgggtttaaaaacaaaacccttaatttcagagatctggccttgtaaccttttaggaagggaaaggatttaaatagcccactgatacatttcatagtgtccatcttgcaattctacaagcccagtgtgaatgagcccaattcactgcctgggttaaagaggttagaagatcctgataaagtaagacaaagtacagtgaaaatgcttagcaactgggggcccagcagggttcagaaggcttgcaagagaaaagcactagtaatcatgagataagaaggaagttactgacaacgaccagcggattgataatgccacttattctcgtacaagtctagttaagtgcattcacaaaagaactacacaaagcaacgggtaaaatgaaactggagaaccgcatggaagagagctagccaaatatatatgataaacatgcttcaagttctaggagatgaagataatacatataatgaatagaacagagatttcaactctgacctgtagctgggctgaggcatccaagacacagattcttcccatgaccccaggaaggcagagcgctgggctgagtcaaggtctatgtacttaaagacccagcgaatgaaatgcaatcccaatgaacaagttctgaaccagatggagtgcctcactgggtagttaccttatttgttctttcactcactcactcggtcagtgttatccactcattcatcatctgttgatggagaaggaatcatgcttggccctcaagagctggtgaaatggatcatatttttgaatcaaaagagaatcattttcaccccttggatctgtacagaaccaagtcatgctctcagagtaaggatcaaaacggaacctgatgaatcctaagtcaattctaccaaagcctcctagggggtcatgaaggcagaaaagtctgtctttacgatgcatgcatggagccgagctcagcactcactcttctcatcttttgccttgtttgcaccattattggcatttccactgcctctgcccaggaggactataaatagcaattaaaaacttgggggaaaaggcagtagagtgtctaccttgaaattatcttttaagacaacaaacgtttatctccgatataaaagttggactcaactgtcctctttgtctttttcctgaagaaattaacacacctaagatgaagaaaaagtcggtttcagcatgcatcatttgggctcactgttaaaatacactagaaacaccaattctttctgaacattttgggtgtcgtttcaacatgtttgttttcctagctaagctaaaaatattttcccctggtatttttgaagggacatttagactaaaataaaaataaaaataaatgacatgtttagaaagttatactcatcaaacctggagcagagtacagaaaacggatggaggaagtgaattttaggaccggtgtggtggttttcctattttgactgctctaaatatgtctggaaaaacaaactgaaataaaaaagtacatctccaccctatacaagtgaggaatgaaaaactattcctcatattgagttaaacttagaaataaattaatatatgttatataaatgtccttcctgttactacatagcaaaccctgttcctatgaactataatgattatacagaacctctttttgtaccagaccttttgtcatttggtgtattagtaactgagcttagaaattccaggcttctctggtggctcagaaggtaaagaatctgcctgtaatgtggggggagacccaggttcaatccttgggtcgggaagatcccctggagaacgaattggcaacccactccagtactcttgcctggagaatcccatggacggaggagcctggcgggctatagtccatgggtttgcaaagaattggacacaactgagcgactaacacttccacttttttttccagtgatcacagacgtttatttactgtgcagcactgacaatactcagatttgatttacagtttccttttaagtgataaaaatataataaaaattttagcacaaaaagggacattcaacacagggtttcctcccttagataatagaactcttttttaggatgtttatggttttaggaagtccagaaattccctgaaaagagttggctaaatttttttgtgttcatgattttttctggagacaggggatatagcttcagtttaattctccaaggagaaacacaggtatatgattatgtatacacacacatatactcactgaattctttgtaagactcctacagtcaggaccacttgaccctcaccttataggtgataaactgaagcctgtgtgtgtgcttagtcgctcagtcatgtccgactctttgtgaccccatggactgtagcccaccgtgctcctctgtccacgggattctccaggcaataatactgaatgggttgccattcccgtctccatggggtcatcctgacccaaggttggaacctgggtctcctgcattgcaggcagcttctttaccatccgagccaccagggaaacccaagctgaagcctggcggagctaaacggcctgtcccgtgtcatccacgagcccaggctgcatgttttctaaggcagcactcgtctcacaaaaagagaagggacccaaatgagactctgaagcctaaacattactcactgagaagcaagactgggacttaacgtttccagcaggagcttcggcacaacgggtaggtgaggggacggccacgtttactttttatttttgtctccctactcttcttttcctggtgcttgtgggtgtgtctcctgccgattacactctagtctaaaattaagcaccaaatcgtactgttcttttctgagacccagctgaagaatggaacatcactgtcctttgtaagtagcctagagacgggttctgtggccctcctcaaatgtaatcgcatctcttgacatctccagcaaaacactgaacttcgtggcattccactaagaaccacagaacacaccccctttggggggctgcatggccctcgaaatcttagtttccccactgaggatcgaacccgcgccctctggcccttgctgtgaaagtgcagtgttaagcactgggccactggggaagcccctttaaaaatgtctactgtctgccagttcacctaagatatactggatcaccagctgaagtgtaggggtgctgggacattctagagaagtctagaatgaattgtatcttgtcaaaagccacctttactaaatgcaatcttcattctaaaggccaacacgagtggtccttcagtcactctctgaggctcagaaatgattcctggaaaatcaggatgactcatgaaaaaacactagataagaatgtttgaacctaaaagttgtgttacttctcctttgttaagactcaaaagatacatgctaatttgaagactacttatttgtcagatgatgaaaaatatatataaagaaaatatatatttaacattagccttggcagtggtgactatccaaacaccatcatcaaacgagctagccgtgtgctgcactgtctgcaaactcttccacataaattatttccgggagtcatcctcaaactattgaacaaccagcatggtgtggacccaaagccaaccggaacagatttcagccggctgtaaacagctggcacagctgtgctgggcgccccagacgaattccagtcctggttagttcatctgggatccttctgctggagctgaacctgtttcccccatgggattaagaagaaactcagcggtgaggaaactcgagctcagaggtgttcggaggtggccgaggtacagatgaccctatttgtaaagcagaactggagacacagacgtagagaaggaacatacggacaccgagggggcagggagggcggtgtgggatgaactgggaggttgggactgacatccgtacaccgctaagtgtaaacccgaagcctagtgagaggtcaccacatagcgcacagggagctctcctcagtgctccgtggtgacctaaatgggaggaaaatccaaaaacaaagaggggacacccgtatgcgcagccgaccccctctgcagtgcagtagaaacccagcactgaaagcgcctatgtagggctggttttggtttgtcttctgagtcgtgtctgactctctcgaccccatggtctgtttccgaccaggctcctctgtccgtgggattctccaggcaggagcactggagcgggttgccatttcctccttcaggggatcttctccagctagggatcgaacccgtgactctcgttctcctgcattacaggcgggttctttactgctgaggcactggggaggcccccaaggcaactgcacctccattaagagagagagagagagagagacggcctggagcaacccaccggctgacggcagagacgagactcaaattcagagttttctgacccttgctcttcccccctcccagggcacaggtgaccaagagtactgccggggaggctcaggggcctgagcccacgccccgcgggatggtgatgccccgtgggatggcgagctgcccggacccctgagatgatctacccagacacgctctcacacctggcaacagggtatctctgctcgaggtttcggtgcggcctgcgcctctcagaacagactgccggggccgctcggtagcacgcgcttcaccggcatctcgaagcctccgaggggaagttctcaccccagagctctgacctgggataaagggagtccagctggctcgggtgacgggaagggggtgaaagctgtgggtggcattttcacgcacagggaactctacacaagcatctcagctccagccaccacctctgtcccctggctgggggcgtccccggacaagccgcgcgggctctgcgcgccagcgtcctgcacggcccacggaccggaggtcgcttcatcagagcagagcgcggcggcggcggcggcaaccggcgctctgaggaccggcgatcacgccgcttgcagacgcgtcagtattttccatgatggtgggacgtggccggagggacgggcctgcttccggtcctctgcagccccttctgacccgcgggagccgcggagtgtgcgacggaggccggggaggccacgcgggcggccgggccgctgggggccaggattttgcaagcttcctgctgcggctcctggccggaagctcgtctgcccagcagcgtcctgcgtgtaggagacgcttgctcaggagatgtttgttgcctgagttagaggtgagcagatgcaatgctgacggagcgagtcagcgaagcagcgagcgagtggtgcgtctggcgagtggccagggcagccgcctgccctcagtccccgggacgctccccgcccgccgcaggcagagcggaccgaacgctgttcctggagtcgctcagtcgcgtccgagtctgtgagctcctgccctgtcgccgccggggccccctgaccagggcttctccaggcgagaatgcccgagtgggctgccacgcgctcctccagggggtcctcccgacccagggactggagccatgtctcacgtctctgcactggcaggcgggttctttaccgatgggccgctggggaaggaaggtgaaggcttaactattcagccaacctttgcacttctcagctcacgcgtctctaccgcgacatgaagaacggcacgtgaacattgaaaaggctgaaacctcgcccggggcctcctataggcacaggtcccctcgaggatgacacgccagggggccctgcagtctctccgaatacctatcctgacccccaccccgccgtgggctgcccaccagcccaggatgccctgtcttgccctcaccaccccactaacagccgctccccggcacccgagaggctggcctggctgcagcgctcaccacctgccccctcagtgttgaccgtggcctggagtctctggtggtgacttcgttagtatcagagaacctagctccaggcttgatggacggatgtttgctgatgaacagtaagactttctggcaagttagactttgcccttcaagaagcttggcttttatgcttctagtgaccctcaggacatagccccggccctggagcgagcagaggcgatggactctcagaggggttggaggagcagggctccgggatgtgtctgagtttccgagcctccccgtctgcagcttggccaatcgccagggaggggaacactctccccacccagaggagttgttgttcagtcactcagtcatgtccgactctttgcaactccacggactgcagcacaccaggcttccctgtccctcaccatctgccagagtttgctcaaactcatgtccattgagtcaatgatgccatccaaccatctcatcctctgcggcccccttctcctgccctcaatgtttcccaacaacaaggtcttttctaatgtgttggctcttcccatcaggtggccaaagtattggagcttcagcttcagcaccagtccttcagtgaatattcagggttgatctcctttaggatggactggtggatctccttgcagtcggagggactctcaagagtttcttctccaacaccacagttccaagcctcgattcttcagggctcaaccttttttatggtccagctctcacatccgtgcatgactgcgggaataaccatagctttgactagacggagctttgttggcaaagtgatgtctcggctttttaatacactgtctaggtttggcactgctttccttccaaggagcaagccaggaggggacaagggtggaaaacgaacgcactcctgctcggaagaactgccccacccagtccctggcatggggtgtaggaaggacactgtctaaacaacgtcgggtcatcagccgcttcccgacgctcagagtcccggggctgaaggggtgggaacagaattggggcccctgggggcctcctggattgtgtctcctgagccaggggcctcctgataggtcaacaggagaccgggggccttgaaaacacccggcggtgataaaaactaccagctcgcagcaggttgcgctccttaatgacaccgagaaacagacttcaccaatccctcctctctggagatcacaggccacctggccacggccagccgctgagaggaaagcgctccaagattccaagagaccattgttaagaaatgtaaatggccctaaattacaaccagagatggaaatgcatctcggggagggagggacggtctgtaatccagtctcagggttgaatccaaggcccagggagaatgcggatggtttataggctttatagacaagggagaaggttctcagggcgaagaatgtccatttccattagcgattaaaacgcagtttgggaaaacaattacctgcccggggtcctgggaaaggaaagcttcctggtttctctgtcaggaagagcgattgtaaaacaagggctgagaatcgcacaaacaagattttagaactttatccaaacagctgcagttcaccttcgaggagcccagactcactcgggtctgatggatgttgcgacaccaaattcaaggtctccccgcctgctgccaagactcggcccatgggacaaaggaagaacagttgctctcttaatgggagcagaaaacaaaactctctccccccacccaactgcctgctttgttgtgaaattgtcactgtgcctttgaggagagattaaaatccgagccatgtccaatttaaagggcaggttcccaggctgggaagggagaaggtttcaagggagtagggcggggttgagggaagccagttgtatgtgaatttatggaggatttggggatcacagaagtcatgggacttgactcaattaaaacggatggaaaagcacaagtctgtcatttaaaaataatagtaaagcagcaagaatattctggctggttctctgcttccagaacctctgcttgggaacctgcttgggaacctctgaacaggtttccctgaagcacagcgtgggcgccaagcaacagttttcacctactttcccgcacttgatacacacacatttcccaacggagagcaagaaggaatggtccacccaccaaagaacgtttcctgagagccagggaggtgctcagccaagttactgcagttgggaaagaaaaagcttccagttttcaaggcagaagagtctagagagcgtcaaatagatgataagaaagcggcctggtttggcagccttgccagagtctcagacacacactggacactgcagctttccaggaggcagccctggacgcctccagagcccgagtctcatctcacctcacaccaggctctgaagaggaacccctccacacgctccctcctggtgccatttgcaaaatgaggcaagaagggtgaagccagaaaagttcgagtcccatagctctggtgtccagagggccgcctgctgggtggaggaggagagaggatcttaggacggaaggcatctctcagccaggggcttgactgcttccaggtctcaatgttactgttgatacttgcacggacatcgaccttgatagctcaagtcaagagatttctatcagatcggcccctcctcctttctaagaggagggtgacagcagtgtctgacctacaggctagaagatggagcgagtgcccgtgaaggcgtgctgcgctttgaatggcacccggcacgtggggtgctcaacagatattaaatctcatcactggcatggtgccattttctgactattccttcatttagccatttctgtatactgatacatatcaaaaagatattttgatgagtatttaatactcccttcactcacgaaagaactccaggatattcccgtgcccccgaccccggcgagcattaactcagtttatggcaacctatggtatctatcatttaagcacaattttggatatgagttttaaaaccttacatttctacaacacttctttcttttcccttcttctcccttccaaagactccagagatccctagcagagattttattaacccctgacagggtacggaaaataagttttagttttaggacgataaaggccacttaaaaggttcaaactccagcaccctcaccaaatcataaaggacagaaaagagagaaattgaagtcccgcccataaagcagaagcccttggcgttgctaggaattcttgtcctttagcaaaacctgcagcaggaatcccttccccttcatgaaacaaaacgaaccatgagttgctcctgagacagcggctcctgggacagtatttacccccctggagcaggggcggaggcgagctgcccgcccaccccgctgggcttggtctccatggcgtttccactttcccaggcctaccagggcaacgtgagtgatttgccaccagccagcaagtggccaggctgctccgagtgggaactctgcctccaagaagcagtggggaccacactgcagaggaaggagaccccctccatcccccgcagaccccgactggccatgggcctccatcccctaagcccccctgcccccaggcctcaggcccctacagcagctgctccactgggcagacacaccctctttcccattacagttacaacagaaactataagcactaaatccacccggcgtccctgtgggctcccacaggccaacactctcacagcacccgtggcaacttgtccgtgcacagacgctttgattcactgtggtccaaggggctccgcgtgcctttgaaaataaatactaaacgctgagagggtgctgtttcactttgcactctcatagctgacgatagaaggctccaaatgagacgctttcaggggtattgagcacaaagagtgagcaagacgactcattctcgcctctgcaggcagagaggaaaaggctctcgcctcttttggcgaggggttactaattcggaggatgccagttttagagcctgtctcagtttgacttgtaaatgaaaggtggaaccttgccaaaattaccccgccgggtgcctgctggcccttgtctatgttggggtggggcagaagttcaccaaaatcattagaaagttcaggaaacaaggaggtgaagcaaacaagtagaaggtggtgaggctccctaacagagcctccccggcacccgatgcagctgatccttccggtcctcaggacagagcaggatgccccagctttccttacagaaaggctcccgggctttcctgtgtcagtcaccccgggggctgacggaaatatgagtccttctgtgagtcgggcctctgagctctgtattaaaatctcctgagccagtatttcagaaccactgtctttcaggagagcagagagaaataactgatgcgaagagctggtaactttttactggaatagaagtaggcatttcttctaaagcttcttactacagagcaaccacgtgcagaacacccgtcctgtgtcaccttcaccgtcatcccatcaaatccatcgcacagccctgcagggacaatcagagaacccagcagctcagggaagttcaggggagctctgtgccctgagacacacagctggtacacggttcacccgatggcgaggccaggcgcatccgaccacacctagccccggcgcggcctcgatccccatattcatcatgggggcggggccttgatttccatattcatcctgggggcggggccttgattcccatattcatcctgggggcggggcctttattcccatattcatcctgggggcggggccttgagtcccatattcatcatgggggcggggccttgatttccatatccatcctgggggcggggcctttacttccatattcatcacgggggcggggcctttatttccatattcatcctgggggcggggccttgactcccatattcatcctgggggcggggccttgattcccatattcatcctggggggactgggctggcaggcctccctcttgccgggagcctcgggcacttgctggttaggaaccgtctctctctccaccatcccaggacagccctccatatcttctgtatttctcaattcccttcttcccttttaccctgctttgctttcatcctctctcccttccttatagcagttagtcctcagtcttcttttaaattactttttattggagtaaggttgcctaacaatggagggtcagtttctgcctcacaacaagatgaatcagctatacgtataggtgatatatttctttgtttttggctgctctgggtctttgctgctgtccgagggctctctagtcgtggtgtgcggcttccctctgcagagcgcaggctccatacttgcagcttgcaggttcggtagtttggcccaaggccccggttgtcccaaggcatgtgggatcttcccagagcagaggacgaacacacgaccccagtattccaaggcggattcttaaccactggaccacaagggaagccccaattcttcccttcttttggatttccttcccatttaggtcaccacagagcgagtcctcagccttgctcgcaccatcgctcgcaccatcactcgcacactcgcaccatcgctcgcaccatcactcgcacattcgcacaatcactcgcacaattgctcacaccatcagtcacacaatcgctcgcaccatcgctcacaccatcactcgcaccatcgctcgcacaatcacttgcacactcgcaccatcgctcgcaccatcgctcacacaatcacacagtcgctcacaccatcacccgcacaatcgctcgcaccatcagtcacacaatcgctcacaccatcacacaccatcactcgcacaatcgcttgcaccatcagtcacacaatcactcgcaccatcacacacaatcacacaatcacttgcaccatcactcgcaccattgctcgcacaatcactcacacaatcactcagattctggctcccaccgacagagtctggtgggattcagtctgggcatcagcctacaacacactcctgggtgattttagggtgcagctggggtggaggcgggtggccttactccaggctgccacatacaaccggcagaacccagaaacccgcctgaacacgcttgtggaggtcctctggccactgtcctccacaaagcaccatgaaaatgcaggaggtgacctcgggtgaccttcagccacacctgctgagaaaacgcccaactacaccagctgaccacatgggcgcggatcccgtccctggacaggctgcctcatcccgtctccctggagggactcggggaaagcctgcatggctcccctggggcctggggggcggggggaggtggtgacggaagggcagccacctcggcctccctgctgattaaacagctggaccgagagcagctgtgcagactctcctgcaagacggccaccgtaaagacgcctacacggctggcgtcatggcccaccctgcaacccgctcccagctgcattacacacacacctgaggaggacaggaaaccttccgcgcagctctgctccgtgtcggcctcctcaaggacatcttttggaccaacacaacctcatgttcccacttcgggcatctgtctaagtcgtctctttcggaccccatggactgcagcccaccaggctcctctggccatggaatcctctgggcatgaatactggagtgggtagcctttcccttctccaggggatcttcccaacccagggatcaaacctgggtctccctcactgcaggcagattctttatggtctgagcctccagggaagccaaggatgaggacaactcgtttaaagaattgccagtgtaatatggatgcagcccaccaggggtgaacgcgctgggaagggagcagcagcaaagctttggggtcttctgagaccacggaggtcacggtactgccgcggaaagcacgtgttatacgtgacgcacagctcagtacatgcaggtcaccaatgaatgggcaaatccacgacctgttgaaggtgtggctcaaacccactgtttgccatggaccagacgtgctagggaaggataacaagtgtgaggctttccacgcggagttagaccagtcagccgctcagagagcaaaggggcagaccattccatccacctctctcttggctgaaggccaagaccaagcagaggagggcagaggtggggtgtctgctcctccaggccccccagtgaggaagctgggcccccgcaggagaggctgatgagcgacctgcccacctcaccaggctccaagtcagctgagcaccacccaggtcccgggggggccctgggctcaggatgctgttccccacaagaggggcccatgcggccaccagctcagctgtgcccacagcgacctcggagagctgaagctgcctctacaagagaggaatttcaaagacactgggaactaacgcagccctgagaaaggagctgaagacgcaggctggcctctgagtggagacaagtgcggcaggggctcagaggaaggggaagccgggacgctgccctttgaacgtggggggtgggggggggccttgaaaagcaacctgtctgaggactcagtgtggacgcctgtgatcacacagctggaagagtaaacacttgcccggagagaagccctctgctctcttctccttcctgtctcttgtgcactttaagcggtgtgatttattttaccaagaataacagaatatgcctctcttcttgcctgactttgagctgccttggatggcagctcgccaaagtgcaccaatactccattccagggggtgagagcctgcctggaccctgcccctcagacatgccccatctctgggaccacacaggcggccagcacagaggaagaaaggcactctgaagacatcagatggatctgctcctgaaagctttgactccaacctgatggatgtgcgtagcggatgactgggccaggcggaagcagaccagtcagctgcaggccagtggactggaggccagcctcggccgccgccacgccaaccctggctgcgtaaccgaggcaatcttgggaataagcgtgtgatgtcatcttgctgtcattgttctcaaaccatcccggtctcctccctttctttgttcagaccttgcgctcgccaagctacctctgaagcccgtctggtttctgaagaaaacctgcctggagagagagtacgggctgggacagcaaagcaccagctgtctcatttacaaatgaacatactggccttttggttgagcacgagtccagtgggctgttaacgggagtcagtccctaagagtcagatctgtccttgaggaatcaacaaatcaggtctccgggctaccaggatgaagttcagaccttggacgatgctggattcaacaagtaatgccccctcaggggtctcctggaggtcacactcttaatcctcctgtagtaatggcccaacagacagtggaaaggcttccgcagctgcttcttgaatcactgcactttgtcttgcatgaagactgtatgtagactcagaaatgacctgtgtttcacgggcctgggtgctgtgcacggcttctgtggaagccgcgagcatctgctctgctccttaggtatatggaaaacttcgtggctggtagaaattccaatctgtttaatccttcagccatgcctgattctggtataatcagactgaaaggcagtcgaaaaggttgccagaaggagttatgagagatgcttcctcttgaagaacacaggatttaaacatcaatgcagtatactaatgcatatatgaggcatttagaaggacagtatcaacgaccctatatgcaaggcagcaaaagagacgcagatgtaaagaacagacttttggactatgagggagaaggagagggtgagatgatttgagagcatagcactgaaacatgtatattaccatatgtaaaacagacgaccgagtttcatgcatgaggcagggcacccaaagccggtgctctgggacaaccgggagggaaggggtggggggggcaggatggggacatgtgcacccgtgcgtagttcatgtacgggaaaaccactacaatactgtaaactaatcatcctccaattaaaaaaattaattaataaaaaaagaacacagaatttagtcggggagatataaactaaagtgatgaaacatactcaaagttgcaaataaaaatagagctcaaatggatagagcaatgagccagaattggctggagttgaactcaaagggcttatttttaagaaagagcagttaagtgtcatgatgaaaaggatgggtcttggaccaaacagacttgggttcacatacttgactgtgacctcataacggacaggtaagattaagcagtatgggacaaagtgcctgacgcacgggacatggtcaaggaaaggttgttgaaaaacaccgaccgtggggacctccctggtggcccggtggttaagactctgcaatgcagtgacacggcgggacccctgctcagggaatgaagaccccttacactgtggggcaacgaagccctcaccgcaaccaccgagccctcatgccacaaccagagaccctgcatgcctcagctgagacctgccacagccaaataaacacctttttctaaatactaaaaagagaaaaatatcacaaggaagggaaaggttgagagacaacacgcgggcggctcacactcgctctgcgccaggcgctgggccgcacgctttactgcatcaagccacatcaccgtctcaacaacagtgaggccgggactgtcagcgaccccaccgactgaggagcaagacccggcacagagaagccaagtgacgtgcccaaggtcgacacagccaggaagcgcagcgctgggcgctgaagccaggcgacctaggccccagagcttggagcgtgagccactttgtctttttccattgcgcatgccacattgcttctctttgaaccagatatattaccaaacaaatcgtcaaaacagcttggatttttaggatgaatatttaaaatattataaatcccttccttgtaggggagtggtctgttggaacagtttctgctgatcactcaggaatctgtccaagacagtgatgtgtacagactatttttgtctgttaatatacagtaccatataaacactgactcaaccaaagagcctgaacaataaattatcactagcccaagtgctaaaatagcacttgattttctctctgcctgagcatgctatctatttatactctgcttatttctgtggaggttcaaagtgctttatccacatttcatcatagccatagttatgtcgatttactgcctttattacacacacgtgactaatgtacccgaccctacgatgcttaatatttactacaggagtctcagtttccaactagggtttctattgaaagaattacggactgtctttcatttataattagtggacatttgccgtcaattaaaagaatagcgttttgttgtttctcttttcgataaattcatctcatttacgatctgaccgtgtgtgctgtgttgcgcttagtcgctcagtcatgtctgactctttgcaaccccatggactgtagcccgccgggttcccctgtcaacaggaattctccaggcaagaacactggaatgggttgccatgccctcttccaggggatcttcccaaccctgggatcgaaccaaggcctcctgcactgtgggtggattttttaccctctgagccgccagggaagcccatgatttgaccgtgcttgcctcttaatattaactgcaaatcgtgttcattataaattgtatttttttcttttctttacaattcaacttatggctgaccttgaaccagaacacatttgtccgtttggaatcataatacagggatttccctagcagtccatcggctaagactccgggctcccaatgcagggagcccaggtttgtttggtccctggtcaaggaactagtccatggctgccgtccatggggtcacgaagagtcggacacgactgagcgacttcactttcactcttcactttcatgcactggagaaggaaatggcagcccactccagtgttcttgcctggagaatcccagggaagggggagcctggtgggctgccgtctatgggatcgcacagagtcggacacgactgaagcgacttagcagcaaggaactagatcccacgtgccatgactgaaaagagaaaaagatcccatgtgccacaactaggacttttcaggttgattagcctattggcacagaggtattttcaaattcgacctgcaccctttcagttttagtacccatgggcaaaaacataaataaataaataaatttaggtgttgaaacagaataaggaaaagaactccaaagaacgatttcctcgactagccagagggcagatgagaccccaaactctggcatgtataaattgggaaaaactaggtttgtgtattgtctgaagataatacagctcaaggttcagaagcatgccttagtgctggacacagggaaagaaataaaaggagaattgcctttggtgttcccatcagtgacaaagaaaacaagcccaaacgcaccgcctgaggctggagcactctgttttccttcgtcctcctcttctgtgaatatccatcttcgttattgaaaacagaaactccagccttaaacgtttcctgatttttgcaaaaaggatattataccaacagtcccttttcaagaactggcagttatcacttcactctacacaagttcctgaagttttcaccttgaccaggcatatcgtctgccaatgtgactttaggaagagaagacagatgcagaagatatgagtcataaattcccacagaatcaacaacgatgttggagggatttttaggaaaaaagtcattgattccaggaatgtttttgtatcctagttatactgatatggtgagccgttaacaaggtcaagggcctagtctgtagccaatattctcattcaaagacgcttggagacacagctggatcgatgcgcagagttctccgagagaacctctgggcttctatacattccgacctctcttcccggataactgggtgcctctgttatttctctttcaggtctcagaatcattatcatttcctccagaaagtctttcataaaactgggtcagggcttctccagtccagggcttaagaacccgctttgcaacgcaggggaccctggttcgatccctgatccggcagggatcacgagagctcgggactaagccaagcaccgcaaccactgagcgcatgcactgcagcttctgaaggccgcgcgcctcacagcccgccctccgaaacaggaggagccggcgcagcccaactcgagagcagccccaatctctgcaactaggaagagccctcgcagcaacaaagacccagcacagccaaatcaatcaatcaaccaaccaaactgggtcagatggccgttccgtgaacacagccccggtgccaatcccattttactgggttggaaatgccaggatcaccttcagacaaagacgagatctcaggaaagaggtgcgggaaaggagggcgggaaggacacagagaagccagcggcggcgggggctgggaagggccggctggggcgctgctcttaccgccccggggctgccctgcgcgtccgctaggaggcggcggaaacctctgggagcaaaaccaggccacacctagagtgagttcaacgaataaaaatgacactgcttgaatgctttcaaaagcagatttcactcctgtgttttcctttgttctttatctcaagaaaataaacagtggtatggtggggtccaagtcgggcccagccccgaaggcggcggtggctctggacggctggctgcactgggccccacgcccactgggttggttcgcacgatggaaacagcagaatcgagcgggcttgggaggcttccatcagcgtcgtaagcctgcgttcaaagaccagacccacgtgcggcacagaagagttaacgatgatgacggtggaatgtgctggaaatcggcaagagcgaacaatggaaacgtgttttctgttatacctttctctttttttttcaaaattatctatttcaaaagcaaaacagactctctgagaagttaattcaccggcgccaccgtatctcaggcagaaggatacatgggcatagcaggctctctggagccagacccagtttgagcgctggttcccaaacttcctggagagttacttcagtgggtagagcctgtttccttatcatctttcagaattgtgtgcggttaagagaaaacataagtacaagtgtttaatacagaggtgggggtttaacaaggaatgtgatcaccactacctcctacactgtcagaaatagaattaaaatatcggtttagaaattatgaacgcccctaagctgaactttcccaggtggcactagtgggaaagaacctgcccaccagtgcaggagacacaggagattcagatttgatccctgggtcgggaagagcccctgggggagggcatggcagcccactccagtcctcttgcctagagaatcccatggacagaggagcctggtgggctacagtccagggggtctcaaagagttggacacgactgaagtgacaagttgaactgaagtttaactgtatatgtgacatgtgtagaagtctgaataagtaaattagaatgcaaactagaaaatgcttaaacataagagagcaaatctttaagcaatttaatacccattttactataaacacttaatatgtgtttctcaactaattttaatgtgtattttgtctaactaatcattttaattcacaatgctcacaattactaaattatagtaacagaacagtatattgtatatccttccagaaaatgtgcatacatgcatatatgtatgtttctaatttttctcaactatgaaatcatatgctccatacagacctcaacttttccactctacaataattgggcgtcttcctgtgtgactttatgtctatcacgtttttttaaacagttgcatttcagttcaaaacaatttacattcatttagccagtcttctatgtggatatttcttttttttccccactttttttttttttggctttttctgcaaaaacaaaataatgccacaatggacgtccttacatatatgtaggaaagtctcctagaaatgaaactgagtcaaagggtacgtaaagttagtattttcaaaatcaaggtcaaattgccctcccaaaattcacaagactcttaacaacatggaaaaaaaaacaaacaaaaacactagatttcttcacacttgcccaattctctcttgtcccagagatgaaggtacaatctgaagccataatattaagtgatttcactattcaccgttaaattaatgatagttccctgcagttctcaaaaatgtaaacaacgcgagaggtcctagctcaggcaaatcaagttcctccagccaagaaggaggtgtgagaagagctctccaacgacagaccaaatgattcacagacaaacgcgttcaaggttcctcacgttgactgagggtttctgtgtgctcgactcagcactaaatcctttccatacattgtctcactttagggcctgtgtatttgcgagtgtttataagcccaataaaagcctcacatattgcctgatgagccctgggaaaatgagaagcggccttcacctctggccaaacagcagtgatgataccaaagcctgctcttggcttcccctcccccgtctctcctccaaggaaaagcaggtgctgtttccaaccagcagttgcaggccagccttctatcagccccaagtccccatcagtggccatttccgacatgactgataagtttctcgatgacccctgggcttggggaaaccctcaaatatcgtctgaatcattaagacacatacgtatgtctgtgtagttgtgtggtcggatgtgttttgttgtattgaactctgtaaaaaattagtcagagaagcggtctaggtttgtttttttttttaaagggggttgaattaaccagaacacctcactcttctagctaacagaaccatttactgtacttgagataaactggggtttaccatattactcacccctgatcacaccatcaaaagttcacgttcttttctttacatttactgtcaaactaagcaaaaatatagatgcccacctcctaggataaaaaagagctatttcccatcatttcccatggtccaaatcccaagtaagtccacacttgataaagatcccctagctaattggacaccattgagatgagagcaattaattcactagttttgaatgaaaagcttgactaaatgattctgtgccatactatatattctctgggacttgctaatataaatgtagctccgtatttatttttttaattttctaaaatcttttcagaagttaggtttttctttgcattttcttttttgcaagatatttgctttacaatattgtgctggtttctgccaacatgagtcagccacaggcgtacacatgtccggtacatatgtgcacatgtgtcccctccctcttgaacctgcctcccacctcccaccccgccccacccgctaggtcgtcaccgagcactgggttgagtccccggagtcacaagcagccccctggccgtgtttcacatacggccacgtgtgtgcttcgtgctcctctctcagtccgccctgcgctcgcccccccccccactgtgtccgcaggcctgctcgctatgcctgcgtgtccacggctaccctgcagacaggcccatcagtgccgcctctccacacacacgcgcgaacacgccatgtttgtcttcctctttctgactcacttcactctgtacaacagggttagggttcatctacctcattgggactgactcaaatacgttccgttttaaagctgaggaaccctccactgcacatatgtaccacaatttctgcatccacgcttccgtcgatggacgtctaggctgcttccatgtcctggcagaagtcaggtttttgagactcaatttacgtttccgcccccagttgagaaggttgcccccccaagcacaaggacatgttccacaaaacactggaagccagacccacaccaaagtcctgtgggagtgaaggctctgcccaccagagcccacgtctcagcagagcccacgtctcaccagagcccacgtctcaccagagcccacgtctcaccagggtccacatctcaccagagtccacatctcagcagagcccacatctcagcagagcccacgtctcagcagagcccacgtctcaccagagcccacgtctcaccagagtccacgtctcaccagagcccacgtctcagcagagcccacgtctcaccagagcccacgtctcaccagagcccacgtctcaccagagcccacgtctcaccagagcccacgtctcaccagagcccacgtctcaccagagcccacgtctcaccagagcccacgtctcaccagagcccacgtctcaccagagtccacgtctcaccagagtccacgtctcagcagagcccacatctcaccagagtccacatctcagcagagcccacgtctcaccagagtccacatctcagcagagcccacgtctcaccagagcccacgtctcaccagagcccacgtctcaccagagcccacatctcaccagagcccacgtctcagcagagcccacgtctcaccagagtccacatctcagcagagcccacgtctcaccagagcccacatctcaccagagtccacgtctcagcagagcccacgtctcaccagagtccacatctcagcagagcccacgtctcaccagagcccacgtctcaccagagcccacgtctcaccagagcccacatctcaccagagcccacgtctcagcagagcccacgtctcaccagagtccacatctcagcagagcccacgtctcaccagagtccacatctcagcagagcccacgtctcaccagagcccacgtctcaccagagcccacgtctcaccagagcccacatctcaccagagcccacgtctcagcagagcccacgtctcaccagagtccacatctcagcagagcccacgtctcaccagagcccacatctcaccagagtccacgtctcagcagagcccacgtctcaccagagtccacatctcagcagagcccacgtctcaccagagcccacgtctcaccagagcccacgtctcaccagagcccacatctcaccagagcccacgtctcagcagagcccacgtctcaccagagtccacatctcagcagagcccacgtctcaccagagcccacatctcaccagagtccacatctcagcagagcccacatctcaccagagtccacatctcagcagagcccacgtctcaccagagcccacatctcagcagagcccacgtctcaccagagcccacgtctcaccagagtccacgtctcaccagagcccacgtctcaccagagtccacatctcagcagagcccacatctcaccagagtccacatctcagcagagcccacgtctcaccagagtccacatctcagcagagcccacgtctcaccagagtccacgtctcagcagagcccacgtctcaccagagtccacgtctcagcagagcccacgtctcaccagagcccacgtctcagcagagcccacgtctcaccagagcccacgtctcaccagagcccacgtctcagcagagcccacatctcaccagagcccacgtctcaccagagcccacgtctcaccagagcccacgtctcaccagggtccacatctcaccagagtccacatctcagcagagcccacatctcaccagagcccacgtctcaccagagtccacatctcagcagagcccacatctcagcagagcccacgtctcaccagagcccacgtctcaccagagcccacatctcaccagagtccacatctcagcagagcccacgtctcaccagagtccacatctcagcagagcccacgtctcaccagagcccacgtctcaccagagtccacgtctcaccagagcccacgtctcaccagagcccacgtctcagcagagcccacgtctcaccagagtccacatctcagcagagcccacgtctcaccagagtccacatctcagcagagcccacgtctcaccagagtccacgtctcagcagagcccacgtctcaccagagtccacgtctcagcagagcccacgtctcaccagagcccacgtctcagcagagcccacgtctcaccagagcccacgtctcaccagagcccacgtctcagcagagcccacatctcaccagagcccacgtctcaccagagcccacgtctcaccagagcccacgtctcaccagagcccacgtctcaccagggtccacatctcaccagagtccacatctcagcagagcccacatctcaccagagcccacgtctcaccagagtccacgtctcagcagagcccacgtctcaccagagcccacgtctcaccagagcccacgtctcaccagagcccacgtctcaccagagtccacatctcagcagagcccacgtctcaccagagcccacgtctcagcagagcccacgtctcagcagagcccacatctcaccagagtccacatctcagcagagtccacatctcaccagagtccacatctcagcagagcccacatctcaccagagcccacgtctcaccagagtccacatctcagcagagcccacatctcaccagagcccacgtctcaccagagcccacgtctcagcagagcccacgtctcaccagagcccacgtctcagcagagcccacgtctcaccagagcccacgtctcaccagagcccacgtctcaccagagcccacgtctcaccagagcccgcgtctcaccagagcccgcggtctcagcagagcccgcgtctcagcagagcccgcgtctcaccagagcccgcgtctcaccagagcccacatctcaccttccagaaagcaggaacgcaactcttgcaccacccctccccctgccaggggagaaggctttctcccagctccctttctgaaggtctagccaccggggatggttttctaagctctagaaaccctggggctgccccagcaagtgaagctgcttgaagaatctgtcttttagtcactatcaatcccctgggtcggtctgtgacaggcctgtctttgactgtatctcactttctaggcagaagatgtttcatgaggttccaggatattcagggacagaccatttgtattcagtagtgtcaaacgaaaaagtgccttttgcgcgtgtgaaatccatcagactctgtttaagcatctgagacgggtttcagggaaatcagtcattccgggcatccgtgcagagcagtggcttatggaaggagtgaaaccagccctgaagccaggataagccctgaagggtcctgatgcatgaagtggagactccagagtcagtgccagggagtaagggctcaggctagcttatttgcaaagcttaagagagcagtgcatttggacaggctgttgtatgtaactgattaatctcctaccaaatagaagtaaataaacgttgaagtgagtatgaatttttttttcaaaaaaaggatcttttatttcttttgcattattaataaaataacctagatcagctactgtggagaatagtatggaaattccttaaaaagctaaaaatagagttaccacttgatagcaaccccactcctggacacatagctattagagaaaagcataatctgagtagatacatgagcccgtgttcatcacactatttccaacagccaggacatggtagcaacctaaatgttcgtcaacagatgaatggtttaagaagatgtggtacacacacacactggaatattactcagccataaaaagagcaaagtaatgccacttgcagcaacatgaacagacctagagactgtcatgctgagtgaagccaagtcagacagagaaggacaaatatcacaatattgcttatatgtgaaatcaaaaaaaaaaaatggtatcaaggaacgtatttacaaaacagaaatggagttacagatatagaaaacaactttatggttaccagagggaaagcaggggagggataaactgggaaacggagattgacatacaggcactgaacagatgagtaatgaggaccactagagagcacagggaactactccggactctaacgacctttatgggaagaaagtctggaaaagaggggctacacgtctgcatagacccgattcactgagctgtacagcagaaagcaacacaacactgtaattaactacgctcttgtgtttaaaaaaaaaaaccctaaaaatgcagtcgctatagtttgagcacctccttccttcatctgacgctgctctgatttcgtagagaataagacaggcgtggcctctgctctcaagaagctgaaggagcaagcatgccaggccctgactgtaaagatccagaggatgaaagtaggggcagcggaggggaaggactggccggtcagctgctctgagcaggggccatctaaacagaggcttgaaaggccaggagaccagtcccaggacgatcgggaggactccaggccaggcagaggtcacaggcagtgaaaggctcacctcctgagtggtgggcgcgccgtgtcagagcgtcaggaatcagcccctgtaacttgtgagccgtgggcttcagtgtgaggtgatcggggtgaaacgcttggtaaatcaggatgaggagtcgggggaatcatcctaagcctgacaagaggtactgggagtgatcagatgaactgaaacccaactcttctgcaaagaccccaacctagaggggcccccagagacagcggggacaggagcagctgaagcgcccccgtccccggacacccctctcgcacacgtgggaagtgcagagggcaacgggctcctggggcgacagcagcctgtgaccccaggcccacagccacgacaccagcccccgtttagtcaagagtggctcaggggtgaagaatctgcctgctagtgcaggagatgcgggctcgacccctggggcgggaagattcccctggagaaggacatggcaactcactccagtatttttgctggcaaaattccctggactgaggagcctggtgggctacagtgcctggggtcgcaaaaagagtcagacacgacgagcaactaaacaacagcaaagccagcagaagaccttccctgctcctgccccaacttctagcttctcgctcctccccaggaacgtggccccagtcccatctctgtgtttagacatacagaagaatttgggcccccaagtaccagcagaccccatacttctgctaactgttacttttgggaacaaaaatacctctgaaatccttatcacatttcatccaagaaacgaggctcatccactctgcagccgtccataaatatgtttcatgacacgaagaaaactcccgaatattagcaccccgtgatgaatgtcctcatcaaccattaaagacttatttttagcagagccaaccactaagttctgagccaaatagaatgtcatgtgttacccgagaagcacatgtcagtgtggtcatcgaccagctaatccggggtgaggtgatctctggaagatgcttcttctgagaggagagggtacttcagtcatcagtgccattcagaagcttagatatattgacctaactagaacatggacttactaacgccaaacatttccattgtgttcagtgaaataacattactagatattttttattatgtacactggcaaaaaagtgccctaatttttttcaacttacatttccatactcgtatggtggccagacatcaaatgcgtggtcctaaaatgatgggatcagggacttccctggtgggccagtggttaagaatccgcctgccgacgcggggggcctgacttcgacccctaatccagggagatcccacatgccctggagcaacggagctccacggaccacggcttctgagcctgggttccaccccccggagccacaaccgcggacgcccgacggcccagagcccctctccccaagagacgccaccgcggtgaggggccaagccctgtcacgacacagcggcccccactcgctgcaattctagaaaatccctcgcagcaagaaggcctgcaacagccaaaaataaacagataataaatttaaaatgatcaacactggcctattttatctctgaaagctcgaaagccccatgcctgcactatggcagcccagccggtctgttgtgaaaaaccgtatgtatagaaaccacagacgatagtaggggagggaaataaggaaggaaaagtcactgcttcaccctcttttccggaatcactgctcacaattgctcacatctggcgtgcctcaatggtaatcatttgcaaggttcaaaaatattgaaccttgaaagtgaaataaagagctttatcttcaaaagaaaaattaaagacccagagcagaacccttgggaccatttttattacacctggataatggcaggtattactactctatgcagaagtatgtttttatgaataagctaacacacccttaggctgcaaagttgtgctttaggatatataacatgttgattcagatacaaaataaaatactgtttgcatggtaggtttttaatgaaaagtctaaaaacacatctatttaacaaacctctaatttttataaagggggcctaaaaaagcctgtttttcttttttttaaatctaactatgggtggtctcacacctagaagtggtaaaagaatcctttgtcagaccacgtcttaatttttggtatggaaaatgtggtcaccgtaattataagccagagaaagtaaagagctgaaaaagttctatgcaggaggggagtaataattcgttagcattcaataaaactgtaatttaaccagcttttaggtatgtaataatcagcttgaaaattacagcacttgacaattttctattttaccttttggctatttgtcgaagtggcttattccctccatgaaacttatgctccatgaaaacaaatgcagcgtttcccacacccctagaaacacccccaccagacctggtacacggcttgttttttgtgttcaatgaaccacaaagaatgtttcaggaacaaccccaggaaaatagggtaagaggaaatcaatcataacttgtttcgaagctattctcttaggcttccagatatttcaaatatatcctttaaaaagtttcagttatggaaaaagttcatttgtgcagactttaaatagttttggccaagaaaggagtcaatattaattaacacaggaggagggagaaagattagctgtgtaactcagtcacttagttcccaagacctttttcctggaaggcatccctcgggactgaaatacgcacatattacaatacacactggaggaagagacgcaatgagcctgtttctccctctatgtggtctttttggacttgctatgaaaagaccaaagccaagtgaggctatggaaaattaatgagaggtgagcatttcatgccgttaagatgcttagctacacaggcagcaagagagcaccacatggcccttttcacagagggtaaaacccaaaggcctttccgcaacgctggggtagagacgaacctgaaattcccaacacctggaaacgttatagctgctggtcgtctccgcttggagttcctatcattctcagatttcttaattccacgttacaccaaacgttcctcttaattgttgttgctgctgttcggtggctaagtcgtgtccagctctttgcgaccccatggactgcagcacaccaggcttccctgtccttccccgtctcctggagtttgctcagactcatgtccattgattcagtggtgccatccagtcatctcaccctctgtcgcccccttctcctcctgccctcagtcttcaatatacatatgataatcagtcttacaaatcctaatgttttagcatcttaacctgcacctcccagactgcacctcagaagaagaagtagccgaaaacaattttcgaaatctatcttcttcccgtgttttgatttcttagaacagaaaataggatgatgatgtcaaaccaagtgagaaaagtaacatttccctgaaagctatggctaagtcaactatacttcaataaaataaggtttttttttttagcatttttttttattttactttacaattctgtattggttttgccatacattgacatgaatccaccaccggtgtacatgcgttcccaaacatgaacccccctcccagccccctccccacaacatctctctgggtcatccccttgtaccagccccaagcatgccgtatcctgattcttacatgatattatacatgtttcaatgccattctcccaaatcatctcaccctctccctctccctctgagtccaaaagtccgctatatacatctgtgtctgttttgctgtctcgcatacagggtcatcattgccatctttctaaattccatatatatgtgttagtatactgtattggtgtttttctttctggcttacttcactctgtataatcggctccagtttcatccatctcatcagaactgattcaaatgtattctttttaatggctgagtaatattccattgtgtatatgtaccacagctttcttatccattcatctgctgatggacatctaggttgtttccatgtcctggctattataaacagtgctgcgatgaacactggggtacatgtgtctctttcaattctggtttcctcggtgtgtatgcccagcagtgggattgctgggtcataaggcagttctatttgcaattttttaaggaatctccacactgttctccatagtggctgtactagtttgcattcccaccaacagtgtaggagggttcccttctctccacaccctctccagcatttattgcttgcagatttttggatcgcagacattctgactggtgtaaagtggtacctcattgtggttttgatttgcatttctctaataatgagtgatgttgagcatcttttcatgtgtttgttagccatccgtatgtcttctttggagaaatgtctatttagttttttggcccattttttgattgggtcgtttatttttctggaattgagctgcataagttgcttgtatatttttgagattagttgtttgtcagttgcttcatttgctattattttctcccattcggaaggctgtcttttcactttgcttatattttcctttgttgtgcagaagcttttaattttaattagatcccatttgtttatttttgcttttatttccagaattctgggaggtggatcatagaggatcctgctgtggtttatgtcggagagtgttttgcctatgttctcctctaggagttttatagtttctggtcttacatttaaaaaagaaagatttggcttggtgacacgtggctaccaaacccataagggctgaaattgacttgaatatgttccctaagggctggcttcttccaagggtgctgcagggaccaagagctttgtcttcagagttcgcccttggctcaagccccaggctagcccttcggagccgtgccattgtccacagaccactcattttcttggagcttcggggcccttgcctataaatgcttgtagcagcctgtggtctttcggactcagatagagcaaggcaagcccagcaccgtgactgtcacgtggtaaggactcaggaggtgggggctctcgtggtcccaccttctggtctgtcctgcctgatgcagggcgggtacacctagaagccacactgtggccgcacctcctgcagagctcccgcctcggaggagcgcgccgggcggacaccggcgctgcaggggcggccttccgcagctcccacccgggggcagaggcggccggcgggtggcgcgctctgttccagctttcagcggccttctccagccagcaccgccggcctggggttccaatgaaagtcatgcggagagttgggaggcgtccgggagacgcttcttttaaagtggggctggggcggaaaacagatgggaccagagaggactcgggctaagctggcctgccctccccagcccgggacgggcctttctccacggaaaatgtctgctttttaatactggggcataaggtggattttgagtttttcagattatttggtcttcattttgtgagaaagtcattgtgtttgccctcccaacaaagtcagttcaggttgaggaaaggagagcagtgatgctgaaggaaggagggtcagcctgaaaccctatcctcctgcatccgcaccaacagatgcacacagacacacacacggacacccaaacacacagacacacacagagacacagcgagagagacacagccacacacggacacaaacacacagaaacgcacacagacacacacacggacacccaaacacacagacacacacgagacacagtgagagagacacagccacacacggacacaaacacacagaaacgcacacagacacacacacggacacaaacacagagacacacacaggcacacggacacacaaacacacagacacacacagagacacagcgagagagacacagccacacgtggacccaaacacacagacatacaggcaagcacagagacacacaaacatacccagacataaacacacagaaacgcacacagacacacggacacacagacacacacaggcacacagacacacacacacagacgcacagacatacccagacacacacactgagacagagacacacgctgatagatacagacatacagagaaacgcgcacgcacacgcacacacacacgtgtgcacacatgcacacgcacgcacacacgtgtgcacacacgcacacgcacgcacacacgcacatgcacgcacggccgagctggactcgtcccacgtgctctgtgctgtgggcagcgtcttatctctcctccccttttttatcaagaagatcccaatactggcaaccacaccccaggtaaacagggtagtaagaaccacaggcaaaacagtagcagcaggcgacacctcccccggcggcccagcagaagcacctttcaagaaagcaggtctgcaagaagctttccaggcccggtgcagactcgttactgctcacaaagcgcagggctcactgtcttcagacaagttcttgttttgtttgtttgggtttatttttgccttcgttctgcaggaagcctcacagatatgacagggtgatttaattcggtacaaacctcgcctccctaattcttagaatgtagatagataccactaccggtattcttagagttacacagcctcccacaccaaacctagcgaagtagaacccacatttcattggaatccctacttttagttatttgcaggtttttcttgacgacacaggaaaccaaatatgaggcagtgttgtagatattgataaatgggtttctagaacgtgttcagtggctgggagaacaatgcctgatttctgtcccaaaagggagacaacgactagccctgaccccctgtaggggagagggagactccagtgcccctcttctcaggtgaacggattcacgacaacagactctgggagacacctctgtgaaggccctggagaaagtttctcctgtgtcccagcagccagtcaagagccagagatgacagaaaattccacgtgttggaaagaaaatcagtttgaaggaaggggtgacatttgcctggaagtctgaatccactgagctctaagcccatttggagtaagtcaggcaccttctgcatgaagcgggcagtgagcctcccacgctgcagaggagccaagggcaaggccggggcctcttccttaaaggcttctgctcctcttgctgcactgagattcagcacacggaccaagctcagccttggcggaactcccccaactcgcagtctctctgcaccttgagctgataacaagtcatcagaaaagttcaatgttttcagccaatgctgaggtttaaggcaaagccagattccagaaggtccttcaaaaaacactaaccagttcatccttacaaccctccttctcccaccaccaccaacaggatgtaccagctgggataagacttgaacaaataacttttaaatgcctgagggcatgctcagttgctcggtcatgtctgactctttgcaaccctgtggactgtagcccaccaggcgcctctgtccgtgggattgcccaggcaagaacaacaggggtggattgccatttccttctccagggggtcttcccaaggaacaaacccatgtctcctgcttggcaggtgggattctttacccctgagctacctggaaagcccctatccagcttttaaataagtttctttaaaaaggaaattaatttattcattcattcccgtaactttcatagagcactgggcggcacaatccgctgacaagtaactgtactaagatttagaagacctcgctctaccaggccagccaccccaggccgttttcctaaccttcctgtgcctcagtttatttccccctaaaatgggagcctgggcaagatggtttccaaggttacactgaaccttagcatctggggcctccgtgcttctgctcagcctactctgtaagacactgctgggtgcagcagagaggcagccgtgccaagacgtggttccgactcatcctgttcacagtcactgcctggttctacttccaaacttccatcacaggctctttcgactcagcatcaaatttctatcttcctttaaatgtacgcctctcgttgacgtatagagattcttagtccgacagggccccctcctagttgcacaggattggactaaatatctttccactcacctgcacatcacagatccgcggcctgtgtttcgtggcagcaggagttctctcaacaaggatgccttccgcctgaaccgccacattcttggggagattctagaatatggggtgactcctgatccatgcggcgtgccctgctcccaatgtgcatccgtccccctctcctgcctgaaaaacaaacactctggcctgcagcctgcagtcctgggataagagccctggtttgaaatctgtgcgagtcgagcccgtcatcatgcaaacaggctgccctcaggcagaacagctttgctcatcaatcaagcttcagggaagtgggtggtttgagtgtggggcccactttgccgtgaccaagctcctatgaaaacgtctgagtgtgaatgaaaaaaactcaacagtctgctttccgcgtccgctgcaagagggccaagacaaggttttatttaaaaataactccctcctctttcctgaaagctgaaagcaagcacatgagcttaaaaagaattcctctttcaagatttactagtgtctcagatcagaaaatacagctgtcagcgatgtcacgtgcagagcaagggaaatattgggggatgtttctcaagtattcagaacttagaaatgacctatttctggttttttaaaaaagcctcctgagaagacatctcgtgattgtgaggtattcggatggcagttagcaagtggagcaaatgaatgtatctgaggctaagacgggacaccgggccgtgctgtgctccgtccctcggtcgtgtccaactctgtgaccccatggactgtcgcccaccaggctcctctgtccaaggcattttcccagcaagaatactggagtgggttgccatctcctcctccaggagatcttcccacaccaaggactgaactcgtgtcccctgcattggcagacgggtacttcatcactgagccaccagtgacgcccaagacgggctacgacacgagtccctgcaaaaagagacgcgggtcctgggagagtcgggctcctgccgcagggctgggaacagcctgactgtgatctgagacggagcaagccaggtaaactccccaagtcttaagataagaaaagatatttctatgcatattatacctacgcacgtattatatgtatataatatatatttacatataatcaataattatatgtacagtccatcctaaaggaaatcaaccctgggtattcatcggaaggactgatgctgaagctgaagctccaatattttggccacctgatgcgaagaactgactcattggaaaagaccctgaggctgggaaagattgaaggcaggaggagaaggggacgacagaggatgagatggttggatggcatcaccgactagatgaacacgagtttgagcaagctccaggagttggtggacagggaagcctggcgtgttgcagtccatggggtcacagagagtcgtacaggacttagtgactgaacaccagtacataagtataaataaaatggggccaattataccttcaactcataaaattctgagcactaagacattacaagcaaactttctataccgtaaacacaatacaaccgtcaagcattattataataaaaagcgtatttcttcaaatacacgttacgctgttcagaattatttgatttctagtctagcttccgtcctttaaagaatgagtttttaattaattcagtttatacatatttcctgtctgaactcttcacattttcgaagctcctacacaagtgactgaagaatacaagcttaaaataacctgagaaataacagaaatagaatagatagatgatttaaaaagcatttaccctttgccccagcaacccttctggtaatgtctcctgcccacattctaactgactgatgacaaaggttatctgttaaagcgttatccgtaagaccaaacgactggaaatagccaggtacccatcagtaagggtggcaacgaaacgtggagatgatagctgcatagtggcctccagggaagccttccctgggcagacccttccctctggccctgggctggaccctgtgacctgcttgggtaaaggaacattagcgaacatgctgcaaggagagccctcataagcctttttatatcggggcctaattcctctccgcgtttggaacccagtcaccacgggaagaagcctgtgctagtctcccggacaccaggagccagcggcggtgggctctcccaccaacacgcaagtgaagccgtgctgggccatcgaggcccagtcaagccgccagacggccccattcataccagtaaatccatgaaagaaaaactacccagcagaacccagtccaacagcccaccgaagagctgtgaataaagaaaaccgttgctttagtttaagccgccaagttacggagcagcttgttacccagtgacagataatggatccaccacaatattctgccaaacaatgaaatactatgaaggcagcagctaacccatgaagagaggaaaaggatgcactgacaggctaaggctccaagacacactgatcaatgcacaggccaccggagaacaaggctgcccttgatgtagaaacaggaagatctaggtaaataaataaatgtgtgtgtgtatatacacacacgtattttgcatgaaaacagcctgtatacatactcaagaaattaacctagtcacctgttttcagggaataagcgggtgaactgcgaggatggggacaaggtgagagtgaaactcatcaataaaaatgtttctaaattgtttcagtatgagaaccacatgaacctatgacctattcagaaatcagtatttttaaagtaaaatatcagactaatccaaggtagaaatgacaaagatcgaaacagcagactttcaaattcttataattctagcgtgatgtcatccgtctcaagtgttcctttgaaccagaataaccctctctctgtaatgcacaaggtgatttgtaagcacagctttatcttccctgctagacggtaaacgcgttgggaggagggactgtgcctcacgcatttctgtttcttctgaaactggcaagaaccatgcaaggcacagagcacgttcttcataaacggttgttgaaagaaacagacaacattctgacatccccaaaggtctcccgttagtgccgatacgtcctcgaagatcctcagcagcctagcctcccacctgcacacaagctccacacaccagctctggagaaaatggcgggcatgcgctgtactttgggcgggctcccctcatccccttgccctgaaccactgggcagggtaaacctacaagctaaatttgaaggccgtgaaaggagaaaaagaaaaacaaactcccccatttagaaagaaaacaacaacacccatagaggaagtctagaaaaagaaagatcttttattatttctcatcagtaacaaatttcacttctgtggtcgagtgagcagcaacctgcagcagactaaccctgcaaagccaggtccagacaagccagccgtggggatgggaagaccccaggcctccagagaagctggcgctcaggccactgtgaagggtttgtctgttccagtctaccgtttccaggaaagagaaggccacagctttctgcaaagcccgattcagggtttgacagttctcactggagagcatcccttacttggaacctgtagctctcctcctggccctcgcctctgccccttctgatatgggttcgctgtttccggtctgaccctatgaaagcgtcacttcttcaaagaggaggtccgagtcacccccgtccctgtgttcacaccctcctctccagatgtgctcggccacggccttcccaacccctggggcctcctggactgcaccctccgaccgcatcctgccgtggccttggtgcctgcactccgccagcacaagccaagctaaaagcggtgagcaggcaacagaaggcgggccgcctgggctgaagggcacacaccgtcgtcccgagagagccagggcagcaacgtctccctcccgtcagctctcaccatctctgcttctcccacgtgaagtaattctaacccctgggcttccctccctgatttcacgtcccaggttgtggattcacttcactgttctcggcagcgctgcactttccccacagctacgacacctgggactttgtcacggtggggaatcatcttcgaaggttccgccaggtaaagaaagccggaaagtgaggctgacaagccaacatgcctctatgcttctgccaagagagcaacaagtgctggttatgcgccagctgtgcgcaaggaggtgagtcagacgctgtcaagagtaagacatcacctctgccgcttaagagggacacgggtgagatggcattcacaaagggaacgtaggcttggatgtgcagagctcactgacgggccaggcaggtgtgcagctgtcagcccaggtagaacagaggcagtggaaatggcaaagaaggaggaaatgagcgagaccctcagaagaagactgaggctgattcctgagcacagaggaaaaacgcgtggcacaggatgctttccaggtttcaggtcttgaaagaaggaaacttgtaccactcctcacagaggcagaagggagctggctatcctgaggacaccctgaatttgggggaaaaaaagaggaaatttaatactcaacttcagatgggcaactacaagtgggaacataggaagtcatgaaaataaaagcctttgtggaggagcaaagacacagagctgagcgcagaagaattgatgcttttgaactgtggtgttggagaagactcttgagagtcccttggactgcaaggagatccagccagtccatcctaaaggagactggtcctgggtgtttattggaaggactgatgctgaagctgaaactccaatactttggccagctgatgcgaagagttgactcattggaaaagactctgatgctgggagggattgggggcaggaggagaaggggacgaccgagggtgagatggctggatggcatcaccaactcgatggacgtgagtttgagtgaactctgggagttggtgatggacagggaggtccagcgtgctgtgattcatgtggccgcaaagagtcggacacgactgagcaactgaactgaactgaactgaattgaaagacacagaggaagaggagggctcagaggcaggggcagggcgggcttgaccatcttagtagagaccccagcaggtgagcgtgggcctggccccagtaggagctccacgaacgtgttgtaactggagaggggagagtaacgtggtcgtcagaaaagtgagaagaaaaccagcaacagagcccagtcccatcaaaggagaagaactcaaaggcggtcaagggcgaacacagagtgcagggctgcatgacttcctgcagacccagcgccatgctaagggtccaggctgcctggtccccaacagcggctggtggtccagcccatggcccagaggaccacagagcctgcacagacccccagggtggcactgccttacttggcatgaaaaaaatatccctgggatttataatattttcaatttactatttgcactgtgtcgatttgactatgagatctgggaacttcgaatggaagtctgaaaggaagcgggatgttgcggcttgcaaggactccaccagcactgtttactctaatctcaactttggagagaggaaaactggaatgagaattacctttatttcttaaaaaaataaataaataaataaaagactaacattcaaagaccccggcagttgattaaacatccaaaggaaggttcttgattaaagggactcttgacaagaagcactgaaggtctaagtaaatatccccatctggtctggggtgcgccacctggcccttcacccgcctgctctgtgataggtttcaaccagccgattctgctttatttgtaccagtgcagaggccacctgtcctggactaggctctcccatgaaacaaagtgaacagttcttatttccgtgctgcccaaatgatttttttaaacacaaagcactcccttccaccttgagcagatttaagaaatgctgactctgaagagcaggtataaacaaggcaatcttttgtttatgaagactgctaacgacccactcctagaaggacccctcctgtccccggcactggtgaattaatccatccacactctttagctcatttccctggctgttacgagctaaactggaaaaaaaaaatgttttacaagggggacgtggtgtatgtgtgctaaaaacaggcaccacacaaatccagacacagaagcgaaaaagaattccaggtgcagggacagtgtaagcgcaaagggaggagaagggaggcgcgtggaggggggcggtggccggcgtggagggggcgcagcggagggcgtgggctgaggacttgcctccaggaaggctgggcgcggggtggtactctgcgacagaggccggcctctctccgggagccgggctccggggaaggtctgagccaggagcagaaaggtcgcagggtgccctgcagcgccgggagagggaggggcccacggagagctgacaccacggggacccccggccccaggcccccggtctcgctggcggccgcaggctggaggccccgggtctcctgggatcagtgtccgtttggaccccgcgtcccgcagtcctcaaaagctctagcgtgtccttttcgccagtagactgtcgccctggtaaaaggcgccgggtccctgcaggcaaggctgggagacaggttaagagtataaattcgggggagtgcagcagggtccttcctcaaggggagccagcctcgccttcattcaaggggccctggggctctaaattggcccagctttgagaactgactgacagtgcatgatgctccgtttttatgattcaggtctgacttctggttctgacctcgacctgctctgcttacacagatcaagtaagccttcaggagcctgcccacagatgtcacgtctaggaacccggtgaggacagagatggaagcggaggaaacgaggcgcaagggcggggcgtgggcgaagggaaggcggcggacgacggcgggaaggaggccaaagccggctggacgaggggccagaggccggtgcgccagggcgagggggcgtctggcagaggaagagacgccgtaggaaacggtggggagccccccggggcctgtgagcagcagagagcggtgtgggatggagacggggaggaaggtcagagcccaggggttctggaaccacgcgcacacaggcaggaacgttcagggggtggagatgtgaccggaggcgcagacagcagaaggcccgagccggtgtctggatttacccggagggagtggagagagcagctacggagctggtctgcgggcagctcagggcgagggcagggagaacaccgcttgtgcaacagacgcaaggtctagagtttcaggagagatgtttcctgaggttccgactgctccagcagagtacgccagcgcggctctggatgtcctcagaaactggtgaggaagacagctgtttcatgagaatgatggaaacagacgaccccctggagcagtgggaggggtggtggggatggggagcagggagcgaggcagtggagcgacaggcagattatcggcttaaaaccgtgcggaagagacggtagcccaaaaggagcagcagagctaaagaccattttccccaggatctggacatcctaagtacacttgcggacactgaaggggaggtagggaagattctgcaaggttctggaaggttctggaagtctggggagccctggaagggcctggcctattgattggagcacagacgtaagtctgtaggaggaacttcacgaaggcctcagggttatgaccccctggtaataaccttggtggtgagtaaggggctcagtgtggactcaggccctagagagaacagtcttttattcttttcaaaatagtgaatgcaaaattagcattgcatctgtattatcttatcgttggcttcaaatttcattcctgtgttatgctttcccagtgtgtttggttaaaatttgcttagctggtaacattctcatcagtaaggagtctgcagccagcagtctgcacccgcaatgttcccttaaatgcatactgctcttttgtgaatgagacacaaagaaactgaatttctaactaatgcaagatactggattcacagataatattttatctgggtttcagttcagtcatatgtctccaaacgagcttatcttgcccgtaagccttctgcttccctctgttcatttttccccctgccattcagagcgggtggcgggttcttgtttcttgccattcatttctgcagggctccgtggaatagatcggtggtttcttgcttagcccgactctgaaggccgggccccgcctgtcactccctgtagcccacacgctctgtcctcactcgcggtctcgctgttctccgacccagttccgaactgccagctcttctctttacttctctccactcggccccaaacatcaagtcccaggctcagacgcttctctgtccagaaactgcctctcgagagcgccctgtcctgtgtgctctgcccagtccttcagctctggtcttctgcacccacggcagtctctgcaggtggtatcctctgggtgcgagcgtgctcagccactcagtcgtgcccgactctttgcgaccccatggactgtcgcctgccaggctcctctctccacgggattctccgggtgaagagactggagtgggttgccatttctccctccagggtaccttcccggctgagggatggagcctgggtctcctgcattggccggcagattcttcaccaccgtgccactggcattctttacttccagttttaagctgactgtacattttaagcggtcaccttaattcttcactaatactctttttggccgaacactggagctttggccaccccttatggtccacgtcttagggagtatggcctgcctgtggtctttaccgcgtgcagtgaaatcagtaaatgacgagaacgatggtgctgacaggtagagtcttcttctcctgaacgtaaaatgtcgcggcacatggtgttactctgacttggctacaatctctgcctctccctggctaacgacacagctgccaacacaacagagccacgcggctcaaggatgcgcttccgtcgtgagaaccagggggcagactgtcctcaatcctcctgcccccacacaggtttttatcagaaacgcaagcagtttactctggggtggggcggattttgatgactgtggcagtagaacactgcctttccacttgccctctgttgttacagaagccctaaaaattctgactgtgacgggtttgaagattatgagctactcaaaggaaaggaggaaagggaagaaggcatgatggtttcagcgggcggagggtttcgggggtcccattttagagatcagaaaaccaaggccagagagtgagtctcagggtgacaaggagtcacaagacacaacggggacccaggtaccttaggccttatcaaatatagatcactgtctttataagatagatggaaaagtatggaaaggacctgcaagagaggtgggtgggagagaaagaatatacggaaaagtcagacttgttaacatccatgtcccatagtttatacattgttcctgattaggactaagtgacctaaattcctatacacagtgaaagggaaaagcaggtaaacagactcatgctgactgtatatgttactttccctccccaaactataaaggttggtttcagattcccacataaaaatgcacgtaaaaacggtaaagcaggcaaatctgttactcttgcagccggttagagtgactcgggtgcttttcttggcaaatatttaaatgtcacacgccagcatcacgtgctcagtactatttcagtcgatatgatttgtgtcaaagtcacctgaactgggtaattgtctgatcttagtatcaccagcaggccctcacacaacagccctcactactaataaactcgcaagaaagacttcagtttaggaaactagcattttcttagaaaaggggaaaaaaaaagcagttctcagtaaaagataaaccacagagctactgtgttcagtcaagttgtacatataaaaccacacacacactctctctctctctcaaaataaaatttaggctctgtctaatccacaaaggtgagtaaatacagaattaaggcattagaaccagaatcctgctcatgactctcctggatattgagactacactgaaaaatggtggaactgccttctagaccacctcgtgtgttctccacgcaattctaataaccataattatcgaggtggttctcctggtgggacaacaagggttgacagtcgttcgcacagaacagagtggtcagagttctctcagagacagaatctatttctaccttggagtacaaggaggcttcaggccctcagggactcaaggacccaaaatgagttcagattaaaaaactgaaaggtggggggggggtgctgggggaaagctttctgtcaggtggagagccatcagcagaaaaatcagggatgaaaaccgctgaaataggtcaacggccgtgaggctgcacccaaagggacgtgggaggcagctacatcgcctgcaagtaccgcgtctctcttggggaaggcaagaacacgggtgagctggaaggcagagggacggagggagggggggagaggagcaagggcagcggcagggcgcagagctcggcctccaggcgagggtgggccgcgccagggcccaggctcgggggacaggcagcgaggagggaaggggatggagccgggccccacctcggaggctgaggcacagccacagcccagctcaggagacaggctgcggggtccagcccaccctcctgcctgcaggcttctaacaccatggggacagtcgtcctcaaagcactggaactgtaagcggttgcgggagctgtcacagagcccgtgttgccattcacccacgtgtgtattgtgaacgcagaggttcagaaattgtgtgtgatacacttcaccttttgagttctgccaaaacttgtacagaaaaaaaactaaagccaagagggaaatttctcgctgccatgctaaccaaatgctgtctgcttaaaaaagaaaccctaagcatgtgactttgaagatggagaagaggcgcaaggactctagaggctggaaaaagtggagaaggcatcctcctcagccctccctacttcatttgaacccagtgagatctgcattgtatgtatgacctctagaatgtaaggtaataaagttatgttgtttaaagccaaaatacagatcctaaacataaaataacaccttcagctataagattcattttcaccaatatttcttcaccagaacccagcttgagaaaaccagcatcccctcttcctgaattctctcctgtgtgttgctgtgatggtcttgcatggctccatgttagtcttgaagtttggggcttcgaagggacccccatctcctacccttccctgcaattagcagcactgcgtctcggggtcagcgctgtctcagccacgtgcaaggacacaccaaaaacctacctcctactctgctggtgaaaacagaaattgctataccatttagaaagcgatctggaagtgtctatccaaaatcaagaatgccatcactgatgaagtcatcgcatgtccctttaactacagcactgtctggacagaatcaaccaaggaccagcatgcagtgatgaaaaagacagccgggaagagtttcagcaatgtatcactgtaaagtgagaaaagaacaagatgcagagaggaacatatgacttaatctggtttttatgaagcaatgagagaaatcacatgtttctgttatatccagatgtttaccataattacatgtgttaaagaggagcgaagtacaggagcataacacacaaggctggtacactggcaacatgggggagagggattagggtggagggaagggacggagtgggggaaagaaagaagtgaaaatgaaagaagagagcaaccagaaaaaccacatggatgccacgagctcatttataggaaatcgtgtgtgcttaggcacacatctataaacagaaaatgatagttttatttcaaggtgttgagatgttttaaaatataattcttttactttgctccttatatatatattttaaaacatacaccctcttggattgtttacagaatcagaaaaaaagcattgaggtaaatatgaaaagtcccatgcacagcagtacaggttcccagagaggaagcaactagagagagaaggttgcaatgtcagggttggggtcgggctgggaagggtctctctgccaggaaagacagaacaacttctaagctggggatcaaagtcgttttggtaggactttataagggacttcttttcttcctgttgctcttctctattttccagattttctgcaaaaaccatgttttgcttttgcagtcagaaccaaacatacatatatatgtatatatatataattttaaaaattatgccatgaacctttttaagtgggtgggggtagtaatcaacacaatatacattttagtatattatgcagtggcccctgaaacagagatggaaagtcatttatgggactttcctggtggcgcgatggataagaatccgcctgccagtgcgggggacaagggtttgatccctgtccgagaagagtccacacagccgggagccactcagcctgtgcacacagccgcggaggcccacgcctgagcctgtgctcctgtgagaagcccgcaccgccacgggcagcccggctcgccgcaactagagaaggccctcgcagagcactgcggaccagtgcagccagagacaaatgcagttgttctaaaacgtcatttacgaaggaatagtgtcagtgagagctgatgacggcccccagttaagaagtggtggcaatgggaaggaacacagtgggccttgaaggtttcctaaataaaaaagatgaataagcgaaacagtgaggaaaaactgcttagtctcaactggcgttattcagtcgctgagccatgtccgactcttcagcagcccccaaggactgcaggctaccaggctcctctctgggattctcggggcaagaatgttgcagtgggtcgccgcttccttctccagggcattttcttgactcagggattgaactggtatctcctgcactggcagggggttcttactgcggagccaccagggaagctgctctgtgaagtttatatggatgcccacaaaacacagccagatgccagtcagctgatttaatccaaagttagagaaccataattgctgtagaggccagtccatttaatcaaatcacgcccctgaatgcagccacatctcggaatccacatccagggaaagtgcaaaacccaagggaaagaccgaagtgctagaaaccacagaagatcgactgtgctgataggcggatgtggagcgctgcccccacccctaaaaagaaagccatcgacaagcactggatccggcaaacactggggttttgtagatcaaataaaaatactagtattgcaaggggactcctggcttgcatccattttaggctgtagccaacttaatgtttctgatcaatgttaggagaaataaattttaagttttctatccagttgtggtttgcctgtttctaaaagctggcacgttctaagaaccccttttcattcgaagtgtttgagaaggtgacagcacatggcttccaaagaccttccagcttcaaaatcctctggtgcgagaggagacgtcatgccaactgccagacttgacgctttctctctctcagatgttccaaaggaggtagtttactaaataagccctgtttatgctttctggcattcctgaagcagatgtaatataactgaaagcaaacaattttagtgatgcgaattcatgcattgccatctgaacaccatgtaatcacgaaactaaaatgtttacccaataatcaaagaccgaggcaaaggaaccaaaaggcattttgtgagacaaagcactggccagtacatccaataaaaggatttatggagagttagcctgaaatggctcgtgaggaaaagtcaccgtgacttggtttctaatcacacaaaaagactgccccgctattattctaaatggtcagaaaaaaaccgggcaggaatcggactggttgtcacagagaaccgggttcttccagcagacttccagggtaagctctccagaaggcaagcaacatcctagcctcagaagagccccaccactcacctacgacattcctctacaagctaaaccacctctgatggtaaagcacactccttccactcttcacacgggtggtgcgttcccttccacctccctgccttccaggcagctgccccctggtctcagggtggctcttaatcacctatagccctctcttcctccacgtctggctgaaagcccacctctcctccgtctgacaccaaccagcaggggtccttcacctgatctgaaccctctccaggtctgtgcgctcagttaacatgaaggactgggattctctggtggtccagtggctaagactccacgctcccaaagcagggccccagggcccatccctggtcaggaactagatcccacatgctgtgacgaagagttcccgtgccaggaggaaagatcccgcaagtgagaccaggcaccgccgagtgcagacacacctaaacactaaagcacacaaaaatccaagtactggcaagctgctttatgggacgagccccagggcacaattccccctggatctcctaaaaccctgaaaatcccacagagcacagtgaggaggaattcccttccttcctctccgtcatcccctcctcctttcaatccagggtttatccaacatctactccaagcaaagccccattcaaggtttcttcatgtaccattcacatagccccctctcagaccttgcgagaaatcatggactcactcccagcccagctctgctcctctccaactttctcgtctgcggttgtgtttggttcttctctcctgctcaacccaacatgcaaccaactgcctgctatcacctatctggctcctcctctttaattcctctgccttgatatctctcctaaacaccaaagcctcttcattactgttctccctgcaaccgggtgactatccccatgcgtgagctgcttgataacggcaagaatctgacactttatgagattcccgtctatataacacaacctgagttctcttgtttgacattaaagaacatcctaattattacagcttatcttccaggcgcacaggacttctgatttcagatgccaagcaactggactcctataggtttttgtttgtgccatttccactgtgtgaaatggccttcacccaacttttgatctaaagtcctacttttcaaacctagctaacatgccagccaactcccccagatccaaactgattgttcttcctcctgaactttcttagatttagttgttacgactccaagactgcttctagatcataaaatcctggagggaagagactgtatctgtctttgcattccaacaccgtggccaaccacgggaggactcctttggcaccagcaggggtggaggtgccagccctggcaagtgagtattctggccatcattggcttccgagtgttccgaggaactccaggccgcaagcacacaggacacactgggtgggccgaaaagttcatcagtttcccgcacgactttacctaccgtacatgttcctacagagtactctggcaggagatgtagaagccagccagctagtgaaccacggagcgtatgaggtgtctttttaaagacctacctcacctactgggcttccccggtggctcagcagtaaagaattgggctgcaatgcagaagacatgggttcgatcccagggtcgggaagatcccctggaggagggcatagcaacccactccagcactcttgcctggagaaccccacggacagaggagcctggcgggctacagttcacagggttgcaaagagttggacacgactgaagtgacttagcatacatgcacacaccttgcctcctatgccagaccaccaaatataccattatattgggcttcctggggcctcatggtaaagaatttgcctgctaatgcaagagacgtgggtcccacccctggatcaggaagatctcctggaggaggaaacggcaatccattccagcatttttgtcttggaaatcccatggacagaggagcctggcaggccctagtccatggggtcacaaaaaaatcagacacgacttagcaactaaacaatagaaacacaccactacatgaagacgcagccggttgtgaaaatcaacaggcactcacagacctccctccatcactggatacactagaggtaagagcataggtttcaaaagcacccaagaagacaaggctcagaactctgaaaattggggctattcttttcttacaggatagagagtgggttgatatggaaaataaaggcatttgtctcttaatggtaataatcctcaaactcatcactttaagttcaactacaacaagcacttaaggccaggaaaggagctgagaaaacatgaacgtctgggaaaactaaacattctttcacctgcgaagttgtgctggtggatgaaagctcttgtaagggataatcatttttttttatttgaagactggtatttgggtagcagctgagcaaagtttcctgaagcgctcaaggtgagctatgccataaggtgaccacatgtccctgcttatacggaagacccccagtcgccatctgtgatccctgcagaattattaacagaaccgcccccttctctctcacagctgcccccatctgaatgataaattagatgaccactctgtctgtgagtgcacagtcagaatacagtggcccgtccatacaaggtaagacggtttgctctaaaacaccaggggggtgatgccaagaatagggcagaatccaggcttcctgacaccaaacccaggctctatctcagggaacatatttcctctaagttgtttcctcatcaattaatcacgaaaaaacactttgggaaatggtaaagatgcacaaccgtggtttctgcaaaccagcactcaccattcagctgaggagactaagcacatccatgttcgctaattaagccgggccagacagcttcatcatctggtgccaactatgcggttccaacgacagtttcaaaaggggttagagggagaaaaaaccccgatgggctgtggacttcagggaaagtttctgggagatgatggaacctgaatggatcttaaaaggggaaataaaggaagaaaggagaaaagaaaaaggatatttttcctttaaaaaaaatggcagaggaataaagcactcaggtgatgctctgagcactctgacgctatagacagaagatgcagaaacaagacgaaaccatcaccagctgtccatgcgcccttccccagagctccctgtgcctgaaggcgcagcagccggcagcgtggggcgtctggcaggcagacgagctctggctgctagatgacggtgttcctccccgtgatgtggtgagaaaacagtggccactttgacttttatcctcagcttgtccgctgactggccgtgtgtctgtgagcaagtggtttcatcagttttgagcctcaattcccttcagtaaagcactgcggctggatgaagtgatctctaaggacctttcaatttctggtcctttacagccaatcctaggctgtatttagttttagtttagtttaattgattaattctagatttagctcaatagtggatgtgagtgttcatttctggcaaaatggtaaacactgggctgatcctatggatccctttttactacaaagatatgaaatgctcaagaaaatcacagtgctgaccctggaaggaaagaagcaagggagggaagcatgggctccggaaatgaagagaaaccgaagcctggtctttagaaagaagtcgacgccttggtgcccaagtgagtttcagacccacaccaatgcccttggggatctggggacaatgattagattctaacgcccatgaagagatgtggcttcgtcctgatgaggtggagggagggaggtggaactgggcccttttcataaatcttacagtcaccccatccatgaaaaagggacaaagaccatgcccctcttcaagatgaagggtggacaactgccttagatccagagaccagactgcctctgagaaatcaaaaccccaaacacgaatcacattcagttgtaacaccagaatttacattatctgtgtatctgggtgtaggacaagaaatgaacataaacacaattccaggactatgagaacacctttgatcactgaaagaaacaagtatgtgaccattacattgggacaatttcacaactcaggattcacaagattcccactgaaaaaatatctcggtgaagatgaacttgccaacacacacactctgagaattcactaccacaaggaccagtcataaagataactttttaactaaaatctaagaaccggaaaaatactacaatctgaaatgggctatgaaataagatttcttaaaagtattaaaatgataaaagactaaaaaacataatggaataataggagtgaattaaaaaagagaaagaaaatagcagacttgaaaaagaacaaaatggaactcctaaaaataacttaatggaaaagttagacagtagagtggcacaaatatagaattagtgaactggaaaaagagaattaaggaaatcaaccaaaatgtaacacaggatttccaaggaaaaatggagaactgaacacaccatatctaacacctcagtaactaacacaccacatcggaaacctcagtacaactagggaaagtgaccatttcaaagacataagcccagaaggacaggagagccagtgaagggtaacagcaataagatttccagcaataagacggaaggcaggtagacacgtggtgacagaaccagcagagccaaggcggcagaaccgaaactgggaataaggaaagttaggagcggagtcacaggctcagcaggcctgggaacagacagcaccagctgcctttggaactggggagggaggagaggggaggcctggctgagcgaggaggtgggaacgaacgttgcttaagaaccagttcagcttccctggcggcttagacggtaaggaatccgcctgcagggcaggagacgtgggttcagtccctgggtcgggaagatccccgggagaaggaaagggctgccggtgcagttattcttccctggagaatcccgtggacaggagagccaagagtcggacgtgactaagcaagcaatggtttcactcttctacccccaggcctcaggcccctttcccagctccaccctgctgggcagcggtctttctcccaactggtgaaacgggaggtgtgggctccagagacatggttcctggactgaggaatatcatacgtcacacagaacagaaagcacgcacgctgaatgctggccctcgtctcactcggctcagcactcagccctgaaacgggcagagcttcacctcccagagcggagtttggaagggtgctccctggagagtctgatgtcgctgtaggttcttcggtaggagactttaggggctgacaggcggaattccccaacaaatggcattaacatattatcctatggtaatgctcaaagtcgataagccccacacatcctcagagcttccaaagaaatgattagctcttcacccttcaagatgaccaaccactcaaggattacgaggcatgcaaggaagcctctacaggatagacgaagtgcaaagcaagcacacaaacgaaaggcaacatggaggagatggaggctgtgaagggagaagacaatttccaaagagagtattatttttttcagaagactgagagaatgtcacacatgaaaacagaacagaatgcttaaaaaaacactcaactatttatagatgaaaagaggaaatttaaaacaataacagaaatgaaaacccaacagacaggttggaaattgaagaaatcatcctccaaaagagcaaaagataaagagatagaaaacaggaggaaatcagagggctggtctagaaagtacaacacccacataacaggagttttagaaagaaaggcttgccaccaaaagtggattcgacagcttgaaagaacgtgctgattgctcagtacaatagacgaaaacagactcccacagaggaaagtgattgtgaaatttagaatactggggaaaggaaaagattctacatagtcccagggaaaaggaaaaaaaggtcaggtacaaagcattaagaaccagaatggtttccccttccagcagcaacactgggagggagcatgcatcagagcaatgccttcacacttctggaggtgatttagttttgacctagaattctttgtacaagacagacacgccttccggtgagaagataaagacctctcaggggacttccctggaggctgagacctgcgctcccaacgcagggggcctggattccacccctggtcagggaactagatcccacaggccgcacctgaatccacacaccagaggaagatcaaagaccctgcacgccccagttaagacccggggctgctgctgctgctgagtcgcgtcagtcgtgtccgactctgcgaccccatggaccgcagcccaccaggctcccctgtccctgggactctccaggcaagaacactggagtggcttgccatttccttctccagtgcatgaaagtgaaaagtgaaagtgaagtcgttcagtcgtgccggactcttagtgaccctgtggactgcagcccaccaggctcctccgtccatgggattttccaggcaagagtactggaatggggtgccattgccttctccaggggcagcctaaaaaatacataataaaaatatttttaaaaacatataaagtcctttcagacattcaaagtgtgaatctctctcttggatccattttggaaaggcgacttatagattgggagccacaaaaatgtgtgagtggaaaaagaggaaatttatgtgatttgactcaggcataaagcagaggggtgatgtggtgaggggagctgaccagaccagcctatcgggaaaaacacgcagtgacggccgccgccagcacggcgctgggctgtcatcctgaccccgcgggggacgcgctcacgcaaacaatggaggggatcaagaaaggggatcccactcaaacgtcaaggaaagttctagaataccaaggaagagccatcccagcatgcagctgtgcaacaggcctgaagaaacacccagacggaagggaaacggaagtctccaggaggcatgctaccaagaaagagaactctcggatttccgctgtgatcgcccggtggaaaagtgcaccgtgagcctgggagacgcaggaagaacggtttcccctgcaaggatggagaccaccaaggaagtgaaaacaaaaaagaaagccaagacacactaacacacgataccgtggatatggggaatcttaaaaaggggtaaaagtgaacttagttacaaaacagaagtagagtcaagatgtagaaaacagagttgccaggggacacggggggaggggcggggaggccggcatgcgcactgcgccacgtgacacggacgtgaacttgggcgaagctcgggagaaggcggggaggccggcgtgctgcggcccacaggccccaaagagccagacacgcctgggcggccgaacagcaacgcacttaactggagagcacacagaacccgtctcagtgctctgtaatgggctatatgggcaaacggtgcaaagcagaaggggcttacgtgcaactgactcactttgctgtgctcccggaactaacaaaacaccgcagttcaactacgaaagtgaagccgcccagtcgtgcccgactctttgtgagcccatggactgtagcctacaaggctcctctgtccatggaattttccaggcaagagtactggagtgggttgccatgccctcctccagggaatcttctcgacccagggatcggacccgggtctcctgccttgcaggcagacgttttaccgtcagccagcagggaagccaagtcaactatactccaatacagtttctcttaagaagatggatagtaacttcataaagctcagaaacttgacctgctgatgctctttccataggcccaatagcgaaagcactaacaacagatttaaccgcgtattgcaatagagtcatattgagagaacagggctggcaaagcaatagatacggttatgtaagagagcgaaacctatatttagtataataggaagttgagacatcatgagtaacactgataaaagatcacagcatacacattatttagaaatgccagaagtgtgaaagtgagttgctccgttgtgtccgactctttgtgaccccatggactgtagcccactgggctcctctgtccatggaattttccaggcaagaacaccagagtgtatagccatgcccttcttcagaggatcttcctgatccagggatcaaacccaggtgtcttgcattgcaggcagattctttaccatctgagctacagggaagtccctgaaatgccagaagaaaacgctaatatatagaacgtggacttccttgagaatcagggtggggggaagtagggtggggtagaattaatttgttcccatagaaattaaggaagcagcacataagtaaatatgtatgaggatgtttttatctacaatgtttgtgtagacatgaaactgaaaatcacctcaatgttcatgagtagtaagacagctgaataaactactacatccataccatggaatttgcttagctatttttttaatgggttaaatttgtatctacttatttggaatatatccttaaagtactattaacagagaaagtcaagttgtaaagtaatatacaaggcatgattggactttttgcaaacaacagaacattgctatttaatttattgggctatgtatgtgtttatacatgagtgtggagacacatgtggaaggatgcgtaccagctgttgaccttatttaccttcggagaacagggatggaaccagtaggggcagactgaaaacaaacaggccacagagaaacagagatacgggcaatagagacacaagatacgggcaacagagacacagagatacgggccacagagaaacagagatacgggcaacagagacacagagatacgggccacagagaaacagagatacgggcaacagagacacagagatacgggccacagagagacagagatacgggccacagagacacagagatacgggccacagagacacagagatacgggccacagagacacagagatacgggccacagagacacagagatacgggccacagagacacagagttacaggcaacagagacacagagatacgggcaacagagagacagagatacgggcaacagagaaacagagatacgggcaacagagagacagagatacgggccacagagagacagagatacgggccacagagagacagagatacgggccacagagacacagagatacgggcaacagagagacagagatacgggccacagagacacagagatacgggccacagagagacagagatacgggccacagagacacagagatacgggcaacagagacacagagatacgggcaacagagagacagagatacgggccacagagacacagagatacgggccacagagacacagagatacgggccacagagacacagagatacgggccacagagacacagagatacgggcaacagagaaacagagatacgggccacagagagacagagatacgggccacagagagacagagatacgggccacagagacacagagatacgggcaacagagagacagagatacgggcaacagagagacagagatacgggccacagagagacagagatacgggccacagagacacagagatacgggccacagagacacagagatacgggccacagagagacagagatacgggccacagagacacagagatacgggccacagagacacagagatacgggccacagagagacagagatacgggcaacagagacacagagatacgggcaacagagagacagagatacgggcaacagagagacagagatacgggccacagagacacagagatacgggcaacagagagacagagatacgggccacagagcgacgatgcggagaagaacaaggtctaggatctcggggtttatggggcataaacccttcttgcatggccctgcaataaacctttctctgctcaaaaaacaaaaaagaaggcagtctaacaacaaacaacagagggtctttaaaaagatgataaggagagctgggaggaacaatactcagagattctgacagaattttttagatcaatgaatagcaggaatccttagattcaagagacatactgaatcccaaacaggactatagtgaaactgccaaccatcacagacaggtacaaaaaataaaacaaagacctttaagacgatttgaggggaaaacaaacttctaaacaaaagacagactgacgctgactgcaccccatcagtaacaggagtccaaaaacaacaaaataatatttttcaagtgctgagggaaaatatttatgtagaattctatacctagaaaattattattcaagattaagggtgaattaaaagtatttccagatagagaatgacagagagagtttcatattcccaaatctttgatgaaataactactcagagatggatttcaataagaaggaatttgaactgagttggggaaacagaagccaagaagcgacatcagtaacatttacgagggcctgctctgtgctgcagcccaggcaccgttctaagtgattcacaagtaaattgggattccaattaaggcagtctggttctggacttcatagtcttacccacaatgtcaataaaatggcatccattttgatacattttaaaaagatttgtaaaaaaaaaattgtatgcagacagaacagaagcaagatgatacaggataaaaatagccgacagtgtcctattagaatacaagagagaaactggggtagaggtcagcactctgagaaatctacagtatattgtttcaaacagcacttgcatctgagacttgggaacaaacgtgatttttaaggtctgagggtaacagctgagatacagaacaaagcaagacaaatcaagaggagaagagtagtcatcgtcctcagagcatttctgtgcttggggggcaggctgaggagcaaggtgggggagcgtctgcgcccccggtaaggggccgcgaggtctctgccggacccgccgctgaacgagaaggtcatttctctccagtctcccccaggatgctccagctccttgcagttcttcaggatgtcgtcccgtaacagcacaagctgtgtggctctccgtgtcgctgtcagggtccctgtggagccttccagctgggtgtgaagggggtgcaacagctccggccccttctctacaccttcgcgtctgcaggcggaagcgtctgcgcccgcgggcaggcagcggctcgggtgaccgcccagtgacgccctgggtcccggtccccgtgctgccggggaccctcagtcccctcgccattcgctcggcccctggggggacagctgccttcgtctcccctttgttttttcctctctgcttcccttctcctgctgtttcctccattcctcctcttgcttctgggctgaagaggcatccagacagctcaggttaactgcttgagagctggttcctccaaaaatgcatccaactcagaaaccatggggacatcgctcccacacaggttctgcctttgttttggtcttcatgacacatacctgcctgggcttggaccctgagcacagctgtggctgggggcctggtggtggtggttcagttgctaagttcctaagacaggctcctctgcccatgggatttcccaggcaagaatactggagtgggctgtcatttcgttctccagggaaacttcccgactcaggggtcgaacccacatctcctgcgctggcaggcagattctctaccactgagccagcagggaagccccgggcgggggcctactgccacccaagtcgcaaggagtgggtgcacggaagaggaagagaaagcaacaggaaaacgccagcgagccaacagaagacagataagatcagaaaatgagtaaagcagcagcacgctggacggagaacatgtggattcctcctgaattccaaacacgacatcatcataaatgtaaacggcttagactaattcattaaaaggcagaaaccctcagactgaattttataaaactcgagctgtttataagagagaagcttaaaacatgtcacaggaaggataaacataaaaaatgtattcaactaataagtgtttttacaaataataaatgcttaatatatattttaattgcatgactcaattgatatgataaaatagacattagagccaaaagcatttggggggataaagaagaccactccttaataataaaaacctacatttaccagaatccttactggagtgggttgccatttccttctccaaaacacctaatcacacagtgtcaaatatgtacagcaaaagtgatttaattatatggaggtaacaaattcaaaattatactgagagattttagcacacatctctatgaaatcaacagaccaagctttaaaaaaatgacaaatttaagtaatccatattataaatgttatttaatggatatgacaagaaacctctacaaaataaataaagaacacacatgaaatgtttacaaaagttaaccaggttctaggccacaaagcaagtctcaacaaacttcaaagaactgctaacattcagaccacactcatcaaccaaaatacaataaaagttgaaatcaataacaaaaccacagccccaaaccccagtacatcttaaaatttcaaaaacatgctgctaaactattaaataaaattgaaatgaaagtaacaaactatttggaactgaacaatagttaaaaccctagatatcagtagaaggaatgtttagcattaaatgcaatgatctgaaaacaaaaaatttagattaagaaaataaaaaggttaagcaataatgtaaactcaaagaccacaggaggaaattctttttccacaaatggataaagtagtaggaaagcaataacaaagataataacaaatcaataaaataaaaacaaagaaacacacataggaaccaatgtgaattctttaagaagactagtaaaataggtaggtattcaacaagaatgagagagagaaacaaagaaggcataaacaaacactattaggcatgaaaaggaatcataactacaaatagagtcaagtttttttaaagtatgagaattcaattttctgctttcaagcaataaaactaaaagcagatgaaatggaaaatctcctaggaaaatatgttaccaaaactgacacatacaaaaaaatagaaaaagaacaaaagctcctgaatgtatttttataagttcagtctaaagctatatattttagaagatagtacaaaacaagaaagcaataggtccatctaagctaaaaatatcaatgcaaaaatctaaatattagtaagcataccagtgtagtgtgtatatagatgtatatttatttttaaatatgtttttgatatgatatatatcatgatcacatatcatatttatcactggtaaatatagtgtacatatatgtgtgcatgtgtgtttgtgatgataagtaaagtttatcccagaagctcaacatgagaaaatcctactgtaattcaccacactgacacattaagaaggaaaaacgaattatcacaatagatgcagaaaaacattttataaaatttagtacccattcacaatctaaaaatacaataaaatacctagccaatcaagaatagaaggaagtttgtactaagcagtttctactaagaacctacaataagttttaggaacatatttcctttgaagtcaggaactagataaatagacattttctatcaccattctactcatccttctgtgaggtatctggctaatacaataaaacaaggaggagtaagagaaataaggatttgaaatacagaaacaaaaaaagaatcatttgcacataagaatgtctactcggagaacccaggagagactacaaacagttacaagtcacaggagagctttgcaagaatactggagacaagattaatatactgtacaaacagccatggcatcctcatcagcaacaaccaattagaaagtgtaacttttaaaagatcccattagcaatagcaataatctatgacaaacctaggaatgaatcaaaagaaaagggtgcaagagttaaatgaaaacaagttatgaaacttcactgacgtgctctgtgacaactagaagggcgggatggggtgggaggtggggggaggttaaagaaggggacactatatgcctatggctgattcataccgatgtatggcaggagccaattcaatattacaaaacaattatctgccaattaaaaataaatttcacttcattgaaagtccttagacccaagtaaagagagctatatctcatgctcagagatgaaaagattcaacattgacatcagttcctcctaagttaatacagaaattgaacataattcatagtaaaatctcagaaaggttcttcatgaacatttttacctagttttaaaattcatgtagaagaattagggtcaaaagcagccaagacaatattgaaaacctgtaagatggacccttgtcctaccagatatcaagacacgtattaaagccttataattaagacccaattggtgtggctggctagaccagtgtaacagagagagcccctctgtgaacaggaacggggggtgggacagcagtggcattataaaaactgtgggaagtgactgaactgtttactaaatggtcctgagagaatctgtaattcacagggaaaaaatagatctctaactcatgctatatcaaaacatgaattccaagagaattagttaactctaacatatttaagaaaaataagacactttttataatcccagactaggagtgacacaaaccctaaaacaataaaggaagaaaatgttgaccaatttgactttaaaacttatgtgacagaagatgtcaaagacaaaggttaaaggcaagatatagaaaggggagcttttttttaaaaatatataggatatataatgaatacttgataatctgtaaggaaaaaaaaaaaaaacaacccactacaaaaaaatgagcaaaatctatgaactggcaatacatagaaaaagaaacccaaatgaccagaaaccgtgagaaagaaaagcataaatcaacagaaactagagaggtataattcaacaccacaacaaaacgtccttgaacctattttattagcaaaatctaaaaggctgatggtgcccagctttggagaagatgcgtgtcagcaagaactgtcacacaaggttctggaagtgtaaactgggaacaagtcagccacatctaggggtcagtgtctgtcccctaagacccccaaatccatgtctgcatctacactaatgcaggagactcggttggatccttgggtcgggaacattccctggagagggaaatggcaacccactcgtcttcttgcctagatgttaccacggactgcgaggggcccctaaggcaagtgatcactggacagggcatgagaggcggggccgggcgcggtgggcacagggcttcggagtctgtgggctcaaatccctcaccgtgagaccgcagtgctcaccccactcatccagtgattgacccacacgcggaactggaacctggtgcagacgagggtgggcggatgaaggggaagacaccctcttccccctggaacgaaccgcagcccgagcagggcgatgacataacctgattaaaaagggaaggtgccatgctgccccggtcatctgacgacttctcaatgagtctggaactccctcgcggggctgctgccgtgccgggtgcatctgccgaggaagcggaaggggccgggggaagtgagaacggtgacctcgggcctcgcggaggacgtccctcggccccgggcctccagcgggccggccgccccggtccagcggtgacccccgcgctgaccttcagcccctgctcttcaagaaactgcgcggctgagccaccatcttggggccagggaaatcctagagtcctttccgattttcaagagcttttccttaaaccaggacctctcaaaatccagaagagtggtccttaacgctggcacgtgggtgtgaggctcattcctggacccgcggccgcgacgtcccctcctggtgacacacgcgacgcccgggaggcggcaacggcactgctgtctgcagtctcggaaaggctgctccgtgctgcccccggtgcagccgcaccctcgggccctgggaccggtgtggacccggcgatccgatcgtagcttccagaagcagcaactcgcaggccccgcccaccctcggagtgacgcgcgcccggcgccccgctgccccgaaagcagcacacgtgcacacggcaggctgcaaagaagtaagcatctcccgacggtgcaagctgccacagagcagggtgggtagctgccggaatcctctctggaggcctggcccatccgagacggcatctttgcagtcctgaccggcggtgctggtgtccgtgtccccaggcatagccggtcgtgccctggctttctctttctctcccgtagtatttcccccccccccgcccctcccccggggagcacacttgcggcactcctccaggcttgttttcatgcgattccttgcctcctcacacctttccttgttgttttatggaaagttgctggtcagagttgcccaatacccatgcatagctgggtggtggcatcagatacccaggaaaacagagcgactattccagtcccagcctagagtccagagttggatggaaacacgaaaattagttgttgctaacaatccattgtaatgaaaatatgatcccagtaattgattttaaatagaattttttaaagactccttggctgcatttcatcacgaatacagagtttcaaaagcgttcattccagggttggattttttccccctttcttctggcttaaaccccaaatggcccagatccgagtctgaataaacagtgtgggtggtgagtgttccgtggggcccagtagaggatgcaggcactctcctattccgttcagcattaaatcatgtgagaccagcctgatgactccggagaacttttactcagtaactggagggccacataacgcgtcctgtttctccgcttttcggggagaaaaaaaaaaattaattctcctaactgccaaggtttaattatgtataaagttcattgacctcacaggcggctgtcagatgatcttgcgaaggcccagagaaaggcatcccaggaatgcggtgatgtgggcagaaactgtggattcaagccaccgaatgctttcaacgggccggaatcagcagccgctcagaaagactccagtgcagacagaacttcagggtaatcactcatttcatctcacctgagcattggtaggccttcaaagggattgttacagatcagaaaagctccggcagaacccccgagggaccgtgcggaggcgggtcggtgacgacgggctggcgctgttctgtgtgccgccagctctcgtgtggatgcccggcgttctctccccgttttggaggcagtgcctctgacccctgataccgacagggagagcgaatgaggaagcaggcccattcataaagacatggtgggccttaaaggaggcaggagagtccatgttgtttcccacggttttgatagaagacagcatggcgtgtctctacagtgactttatctgtctgccaataaagtgccctcaagtgtgtccttacacaagggctgggttctcctctgagggcttggggggtggggggacgagcaagctgagcttccagaacatgtgttggtcttctggtctttcacggggacacccccgtcgattggcaccccggttactgagaaaactggacctgggctccttggtaccgggaaggcggagcccaggaggcaggtgagcggggtgttaacttcagaggtcctctgattcagagggagcaaatgcgaaatattttggcttggcgcttccaaagattaaaatgacctgatggggtccagtatcactttctttcaggacctttctcactgaacatactcactttatcagtcaaaatatcatgatttcaggggtggaatgtcccagggttgggttctaacctaaatcagctgcacttaccctagtggctttattgttatgaatatagagaatgggtgaccagaatttaaccaacattttcatcctctgatggcagcggaatggaaagattctcacttgtttcatttttagataaagctgaaattctggggttctttaaccaaaatcagccacctaggttttgaacacacagcgtcagggggctttcagcccacactaattcaacaggtatttgggaaacagaaatagcgggtgctctcggtgatgcagacatgaaaaagggaaccctgccctcaagtaagtcacaggcgaagaggcggacgctaatcccagcgggaggccctgcctggtggtgcgctggagaggcatgcccctgccagtccctgctcccagaagagtccacgtgccaagaggcagctgagccgtgtgcctggaggccgtgctccccgacaagggaagccacgcgcggcaagcagagagcagcccccactcaccgaagcaagagagagcctgcgtccagcaacggacacccagcacaaccaaacacaaataaataaaaataaaataaaatccccactggaggattcgggaaggcttcccacatggaaccctcccaggtgaggtggcatccgcctggaaccttcagccaaagctcccttcacgcgtgttggctctggcattctaagtcatgcttggccacggccgggggtctacaactgtcccttgtttttaacccatctcgtatttgaggggtcttaaagacccaggccatttaataaaactttcttcagggaatagggataaaggaaaatgccctctgtcttcccactctgaagacggaagccttccttccagtttttaacatttttctagaaatacgattatccccatagttccagaagaaatacacgtccaggtaaagaaatcgacacgaagtactatcctaaatcatttccaccctttggatacgatttataaaattccatgaaggaaatgactcttccttctcgtgaagtcctgtggggaaatcagagggagctgcggtcctaaaaagctatcctcctcctcccgatcccttccttcacccaggggctcgccgccctcagccacacagaaatttagctctttcttgtcgtgtatgtgttgcaggaagtggcaatttgagttcatgacttgtctctgttatgtggaaagttcctggacatcgagaactgtttccttttcttttaaaaaataaaaatgctcaaaactgagtttatttattccaaaaatatacaagattaacttaaatgactgatttaaaaatatcaaccattctaatttgccatttactagaatgaaagaaaaattatagttatttcaagagatccaaaaaaattataaaatctaacaccctttgttataaaatctcttagctaaccaagagtaggagagcaccgaggctgatgaagagcattcattgctcacttccatttcctatgagagtgggaaagagacgcgaaatgcctgtccccctcactgccgttcaagttgttaaaaaattcatttcaaccacagtttatttacagcctcgtgttaatttctgatatacagcaatgtatcagtctcacagggatgtgcgttctttcccatatcctttccattatggcttatccccgatagcgaatgccgcacagcagggccgcacagcagggccgcggccgtccgcccgtttactccagtctgcatgcgctcgtcccctccctccccctccccctgctttcctcatctccacatttctcacggtgtctttttaggtgtttactgagcaagtgaatgagtgagtaaataaatatcatagagatgtctttgatgagttgggacactttgagtaacggtatagaaagcaaatgttttaaggcattcggtctcttttatagccactcaactgtgcttttgtaatgggaaagcatccacagacagtctagaagcaaatgagcatggctgtgtcccaataaaactttattcagcaaacaagtggccaggtgtgccccacaggccacagttttctgattccccatctacggcacttatctttggcagagtaaagaaagtagagggtattagtcactcagttgtgtctaactcggtgattccatggactgtagcccgccaggctcctctgtccaccggagtctccaggcaagaacactggagtgggctgccatttcctcctccaggggatcgttccaacccagggatcaaacccaggccccccgcattgcaggcaggttctgtgcatctacgatgcaccaccagagaagccctgtctttgtccggcatcttagggcactgttcacatctccatagggcacctgtatttctcaataattgtagtgaatgcaaacattcaagagtggtttgggaactccacattaatgaattcattagaaaaaaaaaaagaaacaggaagtaagaacttaaagtcacttattttgtatatcgtatgcctttaaaaagaacaattcttattccccaaatgagagtagtagtttcgccatttgcagcatgattattgagtaaacttgatatgagatctccgagttattgggtgaagggtgtgatgctggagcatggtgaacttgacactttcctggaagagggaataaatgcacccccactcccccccaccccccgccacaacccacctttcctgttctccaccagatggtctggtctctgattttacagctaaaattcttcccgaggttattaatgcagaggatactcctttctcttggtgaccctctggaaaacatccagctacaaagagcacaacagaatctgaaaagctcagggaacacacagaaaagtaagaggcagccgcgagaaggtgatgaaagcaagatgccccagcctgccgccctggcctgactcaagagcgccctccctgctcatccttactctctgcctcactatcagccaccttctgtgtgtatttagtgaaaaaaaaaaaaagatttggatttaaattatggtggaaactcatagggtgccaagtgctaaggtcaactgcttggcttggaaaaagtcaacctgtgcttctcaaggtatgcggagatgcacaaaccacgtccgcgtgagcacccggttgaagacctgtgagacaggctgttctgaggtgaggatcttcaaaccggacccatcatcgccagggcgtcgcgtacaggtctagagatttcttggaagaaagaaaaaaatgaaacttgggcctttccttataccaagcgtctcaacattcagaccaaacaattagaaggattctgtgccttaagaaggggcttccctggtggctcagacggtaaggcgtctgctcacaatgcgggagacccaggtttgatccctgggttgggaagatcccctggagaagggaatggcaccccactccagtgttcttgcccggagaagtccacagaaggaggagcctggtgggctacaggccaccgggtcacaaagagtcggacacgagtgagcgacttcactgtgccttcagaaaaggagaaaccgtgagtttcgaatggaagctaccactgggaggctgaaaatactgaattctgatccctgtattcaacctgtgtgacttgaagcaaattatctccggttattgtaggctgtcctaactttaacacaggcctaggatatccacatgatagaggagaaatctgggaaacagagaccatactgtatctggcccagttcattgcagcaaatcttgagagtctactacgtgcttgcattagagagtggaaaataaataggccacaggcgctgagctcaaggagcaggcgatcaccgcttacagctatttggcaacactgtagagcccgcatcccccttatcagccattcccaccgcaacaccccacgcccaccggctgccaaacaggaagcccaccgccaccatcattcggaacagagctcgagtgagcagcatcccatatgtgaaggggtatcatttatacaaacataactcctatttgataaaactcccaattgcttaaaacctatgtggccaaggcacgtaggaatctcattgcaatgttggttgggactgagatgcatgcaaagacaagttaacaggacttcctcagtggttcagtggttaagacttggtctctcagcacaggggtgcagttgacccctggctggggagccttgcggccagaaaaactaaaacataaaacagaaatactgtaaaaatgtcagtaaagaccttaaaaatggtccacataaaagcatcttaaaaacaagaaaaagaaaccatatgctagaggagaggacccccccaaaaaaagatgagctaaaaagagggaaatgtgagctagacaagcacaggcaagggtgaagtgagggcagctgtggacgacaattgaggaccacctcttccatttcggttgtgatgaccttccgggtttggattgggtggttgatgttcttcaagcgaagaatctcagagcatgaagtgttcacgtgctggcagctgctggcccgaggggtgggggaaaggtgacaggccggcagggagcccgcgactcccgagcctctttggcttccacccagggagatggcggacaagcagcgccagggggaagggctccggttcctttttttttttctttcaaagatttactgaatttgtcccaatattgtttctattttatgtttttattttttggctgcgaggcatgtggaatctcagctcctcgaccagggatcaaaccggcaccccctggtttggaaagcaaagtctcaacccctggactgccaggggagtctctctatttcctttaaaccagcttctttatgagacacaaacaagtaacgtgcgagagaaaaataatacttagctcaggaacttatttgcagttcaatctagcatcaagagatgctcttaatctcttccgaggcttcctgagaacttatctgctcgtctctcctggtctccagcttctttaacactgaaaactttacctgaaatacgaaaccttatgtggcgtcgatctggagattccagaggttttgtttagcaaagtaaatgggctcctctgattagtgtgtctagaacaatccaggtaacatgtctctttaagtcagtcattccaaagctagcttccaaggagtgctactccagcctcgagaagcaggcccacatgagttatttcatcagaaccctggcagctctctgggtaaagcagacaggaaatctcgaggagaaaaagaacctttcagagcccgcttcgggccccctcgcattgcttttttaaacatcacaagattgatcctaggccacagacgcagcatttggccatcagatgcaggcagatgttttcccttaaatccattgtctctccctcaatctgtttattgctatttccctctgggcctgcacctcaagctcctgctaactgcatgtccacacacaaagaggcatctttctagcactgcttctctcttccgtaaggatgcgtccgctcaggaggtgacctatttactcgttgccggtgcgtgcgcttccttgaccatctttaagaactaccgcagcagatgtccccgaggattgaggcttccctggtggctcagatgctgaagaatctgcctgcgatgccggagacctgtgttagacccctgggtcaggaggatcccctggagaagggaatggcaacccattctccattgcctggagaatcctatggacagaggagccagcaggctacggtccagggggtcgcacggagtcggacacgactgggcgactcacacacacacacacaagattaagtccccaaagtcaaaccgggacttaatcagtaagggttttcttgttagcagtgaccttgggcggtcacgtgagctggtgtcagcctcttaaatcaactgatatcaacggacaggctccctggatgagctcaggcctatttattcgagtcttctttcttctgggctgatcagtgctcttcctacaaggcagaccaagaatctccatctgtgagtcagtcatggagatcccacggcagccaaaccaagtgataggtttcaaagatgtatccaacctctctcaccgcagactcatccagaatatgacccagacaagaatcagggcaacatctgctgttgtttctcatacccagaagcgccatgagataagggagtttcttgaaggtgatggaatagttctgtgtactgatcacaggggtagctctaggatcctagacatgggataaagtacacacacacacacacaagtatgtctaaaaactggtgaaatctgagtaaggtctggagattacactaatgtcaatttcccggtgttgctaccatacatactgtgaacatcagactagatgctacaattacattatactgtatgcagcgctaccacccggggaggcaaggtgaagggtacctgggacctctctgtgctactttgcaactttttgcatctatacttactgcaagatataaagtttataaagtgccatgaggtacacgtgtctttttcaattatggtttcctcagggtatttgcccagtacggggactgctgggtcgtttggtggttttattccgagttttttaaggaacctccatgctgctctccatggaggctgtatccatttaccttcccaccaacagtgtggttcccttcgcaccacaccctctccagcattcatggcttgtagactttggtaggaggtggggaggaggctcaggagggaggggacatatgtgcacttgtggctgactcaagtggggggcggcagaagccagtacgatactgtgaagcaattatcctccagttagaaaattttctgaaaagcgccatgagaaacagctcctgtttttgcctggcagcagcttgcccaacttcgcctaattgtatttgaagttctaggctgcttcttttcctcatcatctaaactagtctgcccctccccacttatcaggcattatgtttttggtgtctaccaaatcctaacttgtttttactaaggcatcatctgtatctctgccttcatacaggagctccatgagaagccagtggcttctgttcaccactgaatcccaacaccgaggatagcacagtcattatttgtcagctgcatgtctgaagagtggatgaaacacccccaaagcaatggcccattctttgagaactctgctgcaattctcaaatccacaggttgttataaaatgacacagaaatcattcgggctgatttatggatgtcaaaatcattctgtttggctaagagaataaacacatcaaaaatttgagtgatgttttcaatgtgagcagctgagttcaagagccatggggatcccaaagaaaagatactacctcctgttgaattttctgtctgaggccgaacaagaccaatagttggtaaacagatggggagataggaacaaacgtgtatcgaaacacacacacacacacacattttctcatcttcaaagatgcaaagagatcttggtacttcctttacctgtagtaaatagggagctctgggcaaagagcagaaaagcaccagtgagacaggttggtggggggcaggaggaagggaaaaagaacccctgtgagatgcttagaaacacgtgagacaaagaggagggagaggttgcgggggaaggccgcccaaccgacccccagtgaccagtccagagctgtcctcccgaaacacgtcacatccctgctcaaagcgggaggtgctttgggcaccagccatcatgcccaagatgccagggttaaactcttaagagttgtgtttttagatgcgatgaaaggttttattataaataaatgagaaaccttacatgcgtctgctttagtgagaaaaaaaaaacttcccccaaaagaccccttaaaatcgtgggaataagtaggccactgaccccttcgcttgaaaagtctccttgaagccaagagcctgaagtctgtctttcgataccaaagccagcctgtgccgactccccttcatttcacgcttctcttaaaagaaaacaggctggactgtttcagtaaataacaaaaggtcaagagaaatgctactcacaacatgagcaaaataacggcgcaacctgccaaaatgtttcctaaggcctgaccggcagaacaatcagtggtgaaacagtccacagatctactgtgagagcagagattcatcccagtaaaacctgccacgaggccctagttcatatttcatccataaggaaaaacaaaaacaaaaaacacagagatgatcccatcaggctcgagcaactttaaagaccacatcccgtgtgaaggagtcggctgcctgtgtgtgctgtctctcctctgcttagatgatattttgacatgagagccagtgtcaatgtggtggtaaaaacactcagcaccagtggcctctgtgtccatgaggtccgtgtctgtgattccaccaactgcagatggaaaacagtcagaaaacaacattctagaaagttccaaaaaacaatacatgaatgtgccgcaggctggcaactgtttacacagcatttacattgtatttacaactgtttacacagcaacacactgcactaggcaaggtaagggatttagagggattttaagtattccagagtccaggcttgggctcagtcatgactttctgcgaccctgtggactatagcccgccaggctcccctgtccgtgggattctccagggaagaatactgaggtgggttgtcctttcctcttctaggggaccttcccggcccagagatagaacccacatctcctatatctcctgtctcctgcactgcaggcggtttctttacctcctgagccattcaggaagagggcgtaggtcatatacaaatactaggccattttatacaaggcacttgggcatcctcagagttgggttccggagcgaggcgggggtgatctcagaactgagctgagaactaaagctcaggattgtaaaatctcctgaatgaaacttccaactggactgactccatttacggtaggcactgaatgctcattctctccttggaatctcactaatatgaagagaattttaaaatatccattataagaactttagagagggagaaataaacacaaggcataaaccaggactgttcaccctcaagacatgacctctctgaccctgcatcggtaaccttccgggacccagtctgccagcctattcctgccccaggcctggtcaccaacctcacacctggagtctgctcaccaggctcgttgcagtgactggatcttacacatgtctcgcctctgaagggtcttgcaagtggtcaacacttggtgcattcatgggctgaatcgatggcacccatgtgctaccacattcctggcttaaaaccatagagcagtgttttgcaaaatacgtcccatgaaatactagcctggcaagatgttacctgagtgcaaaataactctgattccatgatgaaatacgttttggaaaagcttcagacaatgagtccactccctcattttgcaatcagaaagtatttgagggtctgaaagacgctgagaagccccccagggaagaagggcttcccaggtgacgttagtggtaaagaacccaccagccaatgtgacataggagatataggagatgtgggttcaatctctgtgtcgggaagatcccctggaggaggaaatggcaacccagtggagtgttcttgcctggagaaccccatggacagaggagccgggagggctgcagtccacagggttgcaaagagtcggacacgactgaagtgacttaccgacctggcacacacgcagaggaaagaaacctgcttaagtcagaatctcccaggtggttttcagaaagctgttttcaactcatacccgttaccatctcgaggatctaagcgtcttgtggaggacatcctgacgaacttgactttagagcagtttctttttctttttttttttagagcaatttctgattcacgtctaatcacatccagtctgtccttaagtcctccaagatacattattgtgttcaattctgcccaaggaacacagtctgtgagtttcctcttctttaacctctggctttgtaacatactcaactcacagaaggtcagacctggaagtgctcttagaaagaaacacaaagtaaaggtcaagccctgaatttaacagggctgttaaccaaggaccccgtggtgaagagactggcctaggattcttgttcagtcgctcagtcgtgtccgactctttgaggccctgtggactgcagcacgccaggcctccctgtccatcaccaactcctggagcttgctcaaactcatgcccactgagtcggtgatgccatccaaccatctcagcctctgttgtccccttctcctcccaacttcaacctttcccagcatcagggttttttccagtgagtcaggtctttgtatcaggtggccaaagtactggagtttcaacttcagcattagtccttccaatgaatattcattgactgatttcctttaggatggactggtttgagctcttcgagttggctcttcgaatcaggcagccaaagtattggatgacaggatacaatacagtttggctccctaaagggaagggtggtttcaggcacctctgctctgctgcccagggataatgaagtcagggcttacgcaggggagggtcctcctggaagagagaagatgaaggaagccgggaaaccccagagaaccccctaacggcaggcatgcacacccccgccctcccatctgactccaacatctcccatctcgcagtttcctccactcctgggtcaggcaactgaaaagacacggcagcgcagggccacacagtgagcaagaaactatgtcagggtctgagccaagaacagcctgatttcaaaacacaccctcctgctagtggatgacactccctccacaaagaggccctcaagaaagcgtgtggaattacacatgaaaccaggaatttgcatatctgaaattagtggcagagacgacggccagtgtgcaaggagggaagaacagagagagcctttgttccatcaaaatactctctcactcgtgaacatgaaggagaggtcgggtctctgaattccctgtgaacatgaaggagaggtcgggtctctgaattccctgttaatgaaatgaaacttgttttaattaatcaaaatggaaccatgtgaatcaaatgtagcgcctgcgtgttgttacatccgactctttgtgaccttatgggctgcagcccgccaggctcctctgtccatggggttctccaggcaagagtactggagagggttgccatggggatctacccgacccagagatcaaactggcatctctcgggtttcctgcacttcttgcaccttggaagccaagtgagtcaagcaatgagaactcaattctgctgttactgaacatcacacatatctgcaaagctttgcatgcccactaacgtgaggtgttactggcttctctcgctacatgttgaccactttggtcatgaaatcagtgaggggcacaagcgcaggcgccatgatgacggtggtggcagcatatttccattttatatcaaagacaagcacttttcaaaactcccacggttctactgaaggaagaactatttcagacacaaacaactgataaattatgagtatacttttcacattcatctctcagcaatccaaatttaaaaattcaaaaactcctttatttgcattttttgagttattttgaacacaaagtaatttttccatttactagtggaagtactgtcttcaggagagtttctgaagcaacatgtggtccaagtattaagactgacaacaataagccaacagcaaataataatggtcacgagtctatgaataatcaaactaaataaaatattggcctggaaggatttacagtgctctttataataatcactgtgcaactcagcttatgtataacatggagtttcaatattggtagaaggggaaattttaaattttagtacataaaagtcaaccatgactgtgtaatattaagaaaaaaatgactgaagagggtgttttatgcttcaatgtcaagatgagttttttagtcagtgtcaaatagtgctctcattaagtttgccatttggaaattttttaaaaagacaaaaatgagttgcaagggtaaatttatacctctactaatattttatccttcaaatataaaaaatgctaatttttcttagagctcaaaaaagttatccatgagctcttcattcactagattattattagatcattagtattgttgttattctgcgctaagtcatgtctgactctttgtgaccccatggactgcagcacgccaggcctccctgtccttcagtgtctcctggagtttgctctaaattatgtccattgagtcggtgatgccatccaaccatctcatcctctgtcatccccttctcctcctgccctcaatctttcccagcatcagtcttttctaatgaggtggctctttgtatcagggggccaaagtattggagtttcagcttcaacatcagtccttccaatgaatattcaggattgatctcctttaggatggactggttgaatctccttgaagtccaagggactctcaagagtcttctccaacatgacagttcaaaagcatcaattcttcggtgctcagctttctttacagtccaactctcacatccatacagtgactactggaaaaaccatagctttgactagacggacctttgttggcaaagtaatgtctctgctttttaatatgctgtctaggttggtcataacttttcttccaaggagcaagcgtcttttaatttcatggctgcaatcaccatctgcagtgattttggagctgaagaaaataaaatctgtcactgtttgcactttccccccttctatttgccgtgaagttttgggaccggatgccatgactttagtttttttaatgttgagtcttaagccagttttttcactctcctctttcaccttcatccagaggctctttagttcctctttgctttctgccataagggtggtatcatctgcatatctgaggttattgatattcctccctgaaatcttgattccaacttgggattcatccagcccatcattttgaattatctactctgaatataagttaaataagcagggtgacaacataaagccttgatgaactcctttctcaattttgaatcagtccattgttccatgtctggttctaactgctgcttcttgaccagcacacaggtttctcaggagacaagtaaggtggtctggtattcccatctctttaacaattttccacagtttgttgtgatccacacaaaggctttagtgtagtcagtgaagcttgagtagatgattttctggaattctgttgctttctctatgagccagtggatgttggcaatttgatctctggttcctctgccttttctaaacccagcttgtattaatacatctggaagttctcagttcaggtactgctgaagcctagcttgaaggattttgagcattaccttgctagcatgtgaaataagtgcaattgtgcaatagtttgaacattctttggcattgcccttctttggaattagaatgaaaactgaccttttccagtcctgtggccactgctaagttttccagatttgctggcatgttgagtggagcactttaacagcatcatcttttaggatttgaaacagctcagctggaattctatcacctccactagctttgttcatagtaatgcttcctaaggccacttgacgtcacactccaggatgtctggctctaggtgagtgaccacagccccgtggtcactgtgtaggtctggcatggagaagatatgcctaagaaatctactagatctagaagaaaagaggtatagaaggcagaaattaagcagagagcagggacttccctggtggggcagtagattaaggctctgcactcctcatgcaaggggcccaggtttgatcctcgctcagggaactaggtcccttgtgcttacaactgagacccagtattgccaaataaaaaaactttttttcaaaaaaaattaaaaaatttttttcctccttaaaaaatgaaggaagcagaataggcaaaataaatagcttcctagcaactgccatttcagatctgtcttatttatgcgactgcacaggcaagtttgctgtgttagtcgctcagtcgtgtccgactctgcgacaccatggactgtagcccaccaggctcctccatccacgggattctccaggcaagagcactggagtgcgttgccattcccttctccagggggtcttccccacccagggatggaacctgcgtctcctgtacggcaggtggattctttaccactgagccaccagagaagccccaattctataaacaaaaatgtattttaatggcaaatggaaccatccctgagaggaacacagttccttgtccacctcattgtgacagtaacaacagccaccactggcagtggtagggcaggccaggcaacggtctaagctcttgactcctattaactctcaacacgtaacgagcaaggtgttattattgtaattggcgcttctcagatgaggaaaaggaaacatcgagaactgggtggagaagggcagagctgaggcctgaattcaggcaggctgtctcgggtccacgcagctaagtcctgacaccaactgtggagctcaagctgggtttcctgttctgacccgcctgcaggagaagcacattcagagcagctgccatcacttcccatacagaagcatatgcacacgagagggttaaagcacgctgtgatcctaccgccacatcgcggaactgggtcagcctaatcactggcgagctggaggttcctaactgccatttccaaacatcagtgaccggggcaaacacgtccctaagaacaccagccgtttacagtagaaatctggggtggacatgatttgaggtgcacatcagagacttctttgattataacaagttgatgatttcttagacatcctagatgtgaagaattaaagaatttaattgccagagttaaagacttgtctatttttttaggaaaatgagatttttatctgggattccccagtatattagaaagatgattcttagtataattgtgggcaagaaggaaataatatacatatttgtggctatgagtagctaaccagaaaaaaaaaaaaaagaaagaaactgtctggacttgcacagttccaaaaactactgaatgtttttttttccccccatcctatgaggcatttctttcttttcaaggaggattcatttcccacctgtgtcttttacatttttgaaatacatataaagttaatgtttatcttctatccattgaaagcttatctaagttattctgactttgggcttttacttccaggagtcacaatctgtttggccagcttctgtgtgagagacagcttccttttatgtgcagcaaactctctactatttagaatgtttgcttgggagataaagtgatacttggtggttttcctactttatcatgattcccatctgcaacacaactggacagaaactaatgtccctgcattgaactccatcctcctggatgagcacatctcataactggggcagggccaccagcgcaaggctttctaaaaatagtccaatattacataaaacatctcaatgtctgtattgtaagttaacacatacactccaaatatgggttccagaaaagatgcaatatgaggcggttcaacactctggccacctgatgcgaagagccgactcactggaaaaacaccttgatgctggggaagattgagggcaagaggagaaggggacgacagaggatgagatggttggatggcatcaccgactcgatggtcgtgagcttgagcaagctccgggagacagtgaaggacagggaggcctggcgtgctgcggtccatggggtcacaaagagtcgggcaggactgagcgactgaacaaccacaaagctttgagatgcactttcttcctccttcacacgaaaggtctgacctcacctccagggtagatcctatctttaggtagatcaccacaaggcatcatcctgacagcgcacctgaaatttattccctggatttcagcaaaaaccgtgggatgggagcaaaagaacgacagcaaggggtgaggccttccgagggtctgcgtggaactcgggcagagatgagacacaggggcagaccgtggcgaagccaggctcggcctgctggagcggggcccggactcgggggaggcccgctgctaggcgggacgcctctcgggagcgtttggagtgatcagagcacacggtgggaagagcccgtcgcagcctctgccttcatcattctcatcgttcacgtcagtgtcccgtttgactgagtgcacagctaaggtcttaaagggccaagtgccacagggctagagaagggcaacgccagtcccgttaccttctccagttcaaaaaattacagccagaacttttctgtaggggccggtactggtcggcaatgaaatggggtggtgaagaggcctgctcagcccggagcgccactcctaataaacagatttaagcatgccgtgggtttagagctcctccctggatggggacggggtgccctcaggagcacagaagctgtctcttcctccatttctccaagggaaacgtccagggacacaactctgtgcttccaacgggaaatagcatgctcagttcatttactcaactgtctgtcgttcagttcttcagaaaccaaactggtctagtgtgagtcctgcaagtcaagagtatggactccgagaaatgccacttgctagccgagagaggcgacgcagtttcaagagactgagtgacttcctttactctggcccgggattgctgagtaaacttgggctacgcatgccttaaccttggtctaccctggatttcccctgtgtgaaaaacgtgggaagatgctgtctaactgcttctcagggaagatgtgaagctcacctattcagtgttctagacagcacggtcccagggcagtgcagcgcgccgtctgccctttcccttcacttgtgactgtcgtggctggtcacacactcacacgtacacacaccatttcttaccaaaaaaaaactcacagcaaggaattaattccaatcttatttagggagacttcacacaatgtcatatttaaaacatgaacattctagaaactaaattcaattgcacatggcaaaggaacacactaaaagctcgaaatgacgatttccccatacataagtgcttccctcagctcagttggtaaagaaaccgcctgcgatgcaggagaccccagtttgattcctgggtcatgaaggtcccctggagaagggacaggctacccactccagaattcttgggcttcccttgtggctcagctcgtaaagaatctgcctgcaaagagggagccctgggtttgacccctgggttgggaagatccctggagaagggaaaggctccccactccagtgttctggcctggagaattccatggactgtagagtccatggggtcgaaaagagtcggacacaactgagcgactttcactcactctgccatacacaagtgcttcaaggagagaaagaactcaaacagatggtcaattaatcaaatttatttattgggataaacagtcagtaatctcattctgtttagattgtgtttaaaaactctatcaaaatgctgtcattggctaaccatcaagtacttaagtttgccagttctagaacctcaagttcaaaatgaccctgggagaacacagatgggcagacactgtcttgtgaccacttaatggaaaaagaagttaagacagagttagagggtgactcactccagggctagagacacgggctagatttgcatgtgtggactcaaaccccttcacctgtttgctcacatgctcaacacgcatacttacaggccgctcaggggcctggactagcggacacagttagggactagagggtctatttctagattggggtcaccaaacagggagcccaacctgctcaccccacacggagcctgtccccagtcttgagtgtctttcatggcaggtgctaaagaaccaacctaaccagccaggagtaagcggagatactaacagtcacgttcaaacatccattaaagccgaacacaggtccgtgaaacaaggctgacccaggacaccctccgtccagtccacacacaccggggaggacggggtcagactcattgcatctaagattgtgccgtttggggctccccgtggtccagcggctgagactccatttctcccagtgcaggggcccacccaggttcgactcctcgtcacggaactagattttccgtgctgcaaccaagacccggcacagccaaacaaatactaaaaaaataaaatagcgcaatttaccctaagattatgtccttcctgtttttggtgttaaaacagattttactttatcactgagaataaatagtagctgattttttaatatcccaacttggcaaaataagaagtcagaagctctatattggtccttaaataaaaaaggtaaaataaaaagacttttgaaatccacaagtttggctggctctgcctgacaatgagttacctgctattagaaactcctaaagagtagagacccataaagagtgggtattattttatgtgatcaaatatttcctaataagacacaatgcttcatttcaacctgtaatgaaaagaattttaagctgtactaataaatggggtttacaactaagctggaaaagtatgctgccatctaaaatcaaatgaaatacaaattctaaagcatcgtaaacttactcttatattcccattcttccaaaagtataaagcattttaattattgctttctgatgctaactgcttttctggttaggttggtgctaatgaaccaccctaatcagccaagagtaagtggagaaattaagttatgttcaaacgtccgttgaaaccaaacatatgtccacgaaacatatgagagagcatatgaagagagcacgaaagcaatacaatccagcaaacacacacacagcagcagagaacaaaaccttctttactgtctttccacttgtagatccaccgtatagaagctttagagaaccatcagttctgcatctgtggacagatggcaaaggatttaaccattcagccagccacagagaacccaggagccaccagtcttggcactagctgacagaggttgggaggtgggagggagaaggggagtcaggagggatagtgctcccactttttaatggataattaaatgataatctctacgattagtggaataagaaatgaagtttcaagaatgcgtttgaaatgtaagcaacacccttgggggtgaggggctgggaagggtgacatcaccatggaggggagaaactcggggaagaaatggggctgagtaaagtgtgaggtcaacaaaagcaaatgctcacaaactgagagcttgcattaggggctgaatcgtgcccccttttcttcattttttaaaaacacttttattttgtattggtgtatagctgattaacaatgttgtcatagtttcaggtgaacagcaaaaggtctcagtcatacataaacatgtatcccttccccctcaaactcccctcccatccaggctgccacatgccactgagcagagttccccacgctctgcactgggcccttcttggttatccattttaaatacagcagtgtgtacatgtccatcctaaaccccttaactatccctccccctgtcccctgccccccggcaaccataagttcattctggaggtctgcgagtctgcttctgttccgtaaacaagttcacttgcatcatgcctttttagattctgcacataagggacgtcatccaatatttccccttctctgtctgacttagagtctccaatagtgtctgtttttgatacattccagtcctaactctggtgcctgccagtgtgacctgttttggaaacggggcctttgcagatgtaagactgtcctctgacccaatgactggtgtccgtacaagaagcgggaaacaccacggggcccagactcagggagggtgctcggggcccagactcagagagggccacggggcacagactcagggagggtgcacgggacatagactcagggagggtgcacggggcccagactcagggagggtgcacgggacacagactcagggagggtgcacggggcccagactcaggacacagactcagggagagttacggggcacagactcaggacacagactcagggagggtgcacggggcccagacttgggacacagactcagggagggtgcacagggcccagactcagggagggtgcacgggacacagactcaggacacagactcagggagggtcacgggaaacagactcagggagggccacggggcacagactcaggacacagactcagggagggtcacggggccgcagaggcgactggaggagacacagagccagcgggggctgaggacggccccccagccgagggcgccttcgggggagcaccgctctgcggcacctcgactctgggcttccagtctccacaaccgtgggaggataacctcctgctgcttgaagccaccttctctgcggtactttgctctagcagccttatgaccttagtccaaacagtaaacgtacatggcaaattcatgtcaatgtatggcaaaacccactacaatgctgtaaagcaattatcctccaattaaaatatataaattaaaaaaacagaagagctctctaaataatattaataaaataatatataaataataagttaacatatatttagatgaagaactcttaagtatactaatattaatataatatgtctctatattatagataatatctataatagatatagataatagataacaataaacatttaaagataagaactctttaaataacatcaacatttatatattatagataatatataacaataaacattatttaaagatacgaagaactctttaaataaaatcaacatttatataatacatataatatataattatatattataatattataatatacttctatattataatatacttatatattatattacatataacaaatatatattatctgtattaattatattgtatataatatatacatatattatagataacatataacaataaacattatttaaagagatgaactctttaaataatataatatatactatattacatacaatgtatataatatatactaatataatataatgataataataaacatatattatttaaatcaccaaaagaacttttaaaaagtgtgggagggttaaaagatattgcctctgggaagcaagtgtaagggaggagcggcgcagtgtggggcctttattttgtattaaatgccttctgtgctctttgactttttaaccacacgcgtgggttactccgacctatggaaagcataaatgaaacggccctgagggcatcaccaagaacctggtcagccctcccggtggtcggcgctgagcactgaggacccccgcatccaccgccccccagccgcctccaccctgcagcggacccccccgggacactgccctctctgtcctcagggacacacggcggctgagtgtgcaagtgcgcgctcacacgcccgctggccccatctccagtatttttgaactttctgtgggtttgtctcatcaatgacagtaatcttccctattgacttggatgattaagaatcgactccagtgaaaacagagagcttcggagagcctgtcgcggcttccttcccgaacaacgcctgacccagatttccgtgactccgctacccagcatcagaaaacctcacaacagggctcactcacaaccattcgtcatcgacttttatttaacccacacagagaaatgctgagtgctctctggtggcctggatcaagtccctcgggtccgtgatgcgagcggtgactttctcggatggacagatggacagaagaggtcccatgcgctccgctcgctctaagaagaatggttgcattgagcccagcagccagtggtgctgtggcaaagcgtgtggtcacctcccacaggaagaggcctactgatgaccgcgggaccgcaagggccccggcagccggccggaggcgcgggacagcgggcagctctcccagcgcgcccggccgggagccgcagaggacccacccggcgcgtgcgcacactccgctcacgcccaagacacacacggcgcgtgcgcacactccgctcacgcccaagacacacacggcgcgtgcgcacactccgctcacgcccaaggacacacacggcgcgtgcgcacactccgctcacgcccaaggacacacaccggcgcgtgcgcacactccgctcacgcccacgtgcgagcggctcccgaggcaggcggggtacctcgccaggcgctggcgctgaagctgtgccaggtggatgaacacggaatggaacacggaacggcgggagcagaacgaagggccgcggtttcatcaggacgaggatccgaccgcagtcaatgccctacccccggggcaccgcctgcttgtattcgcatctcagcatccggtttcccggtaacccctcccagccttccagggcctcacctgccctgcccgccaggctccagacgtccagacccagcaagggctgtcccttccctgagtaggcttcccaaggcaggtgtgaactgggcccacgagaaatcaagtcacgactggcaaagctaccggacgtgtgagtccccactgaacacaaggggcaggacggctgacttttattaagtggtgagtgcggctccacggagaaggggctccagtcagacgcacccatctgctttctcactgcctcagccgcccttctccgcagctggcctttcccccttcttgcttttaaaccaccacctctcaacgtatcataatgaagaccaaacctcgagactcagatgttccagaaacctgagatattagatgtgctttgatcacgtctggctcctcctcaccttctttgttcttgatcacatcaacaaacgctgtctttttagttattatgtaagcctaacaagtctttccctaaacacctaacaatcgactatcacctttttctcagtcctcacatacacaggcatacgcacacacaggcttgtgcacacagcaacgagggcacggcggagttccctcgcagcataactgaaaatacgccaataccctggagatctcaagttccggatttattaggcacactgttttcgaggcccatgatggagggcttcacaagctcattttacaaagagattttagaagctaccagtctgtagaataggccttcctgatggctcagcagtgaagaatctgcctgccagtgtaggagacacctgagatgtgagttcaatccctgggttgggaaaatcccttggaggagaaaatggtaacctgctgcagtattcttgttgggaaaatttcatggacagaggagcctggcaggttacagtccaggggtcacaaagagtcatgcctgagtaactaaacacacacacacacacattccatagaactttctcacgctacagggtacctccgtaaggagctgtcccattcaagagccaggctcaccttggtcagctgagacaggacggcacaggccccgaaggggcaaacaggcccagatggctccttaatcccgaggaagtaacataagccagtttcttaggggtcagacttataccaacgagggcccacattatgtaacaaactcactgggggaaaggagactactccttaaagagttcccgcccactgactttaaaaataaaaggacccagtgcaccctctctctcccatccccccggcagatgatgcagactgatgaagtgggagccacaagaggaacaatacttccataagcaagaggaaataaaacgaaaaggaaaaataaacatgagctggatcgggggcaaaaaaagggcaaaacaagcagaaatgatcttctgataagaacggtattacataatccagcgcctataacatggaaagccactttgcactgcaaatcacttttccaccaagaattaagaggcagaacgaacacaaaaatcaattaaggtccgaagaagggctccgtttcccctcgaggggcttgttcttatccaaacactaatgcaggtactgtcagcctgcctcctgaagggtattttttattatcccctgagccgctctgtccgaggagtgattttcccatttgagtttgcaagggaaggttaaataggaggagtaggatgttctttcacttataaaatgatacaatcgattccagtgcttcagactcaggaggcctctgagggtgtctcagcttcccaggagcccccctcgctgtatcaaggaccggctgctgggatgtgggggagaccaagcaccgccccttcctccagggcgaagagcatcactgctccaaccacccccaacaggaaccaggcagatggtggagagcaccagcagggtgctgggccccggggaggcacgagaataccattcacagaagcaatgagagcgggaaggatacctctgacccaaagggataaaacacaagagccaacgagctccctggacgagctgcagggcagccatcctgcctcacgcaggataacttagcatatacttgtcaaagcagtaagaaaaggggatggtcctgaaactttcacataaatgcaaacattcttggggagtggatcatatttttattattccatctatgctgcttggaatgcagtgataattttctaagaaacaaagtgttctcctttgtctcacaaaactgaatttctataccctgctgctgctgctaagtcgcttcagtcgtgtccaactctgtgcgaccccatagacagcagcccacaggctccgctgtccctgggatgctccaggcaagaacactggagtgggttgccatctccttctccaatgcgtgaaagtgaaaagtgaaagtgaagtcgctcagtcgtgtccgactcttagggaccccaaggactgcagcccaccaggcttctccgtccatgggattttccaggcaagagtactggagggggttgccattgccttctccatcctacaaacctagatttgcctaaagaagggagtgggtatacttctttttttcccccctttggccgtgccaggtagcatgtgagatcttcgtcccccaacccagaattgaacctgtaccccctgcatcggaagcgtggagttttaaccactggaccgccaggggtacacttcctttcctttggagtcaaaggacaagcactctacccaagtacaaaataaagggacacgatgggccgtgcgttctcgttgagggtgttcaccagtccctcgcgctgatctggctgagggaactgaggaggtgagcagagccggggccgcagagccgcggagggcgccagctcacgcccggggccagtccctgctgccacacggagcgcctttcccgaccggatcaggcctccgcgggcctgcgtcgtgggaaggaggcggaccagcagctactctggtctgcctgcccacctggccctgctgtggctggcggcgcagcgtcccggctcccagtggagagcctcggcgctgagcagccagccgtcccagcacggcccggccgctcaccggacacagaggaggcgccgctcgcccccacaacgcaagtgcctccctgccactcgagacgggaaaagacatcagaacttgacaggaacgagcacagggctgttgtccccaaataaagaactcacatcagcagagaatgtaaaaatgttatttagaactactgttctcagatgtttaacacaaaggagggattgttgtgccagggaacaaagtgatccagtattcacaaagcagggattctctcactgcacattctgtttccaaaacactcaggaccacagcaagttttccagttggggcaaagacgctacttctggaagcgggagaggagataacagaaatctttcacagaggagctgaaagccttcgaaggaaaagcaaagcaaatgtcggccctgaggggcggccagtgtggatggtgagctgacctgtccccctaggacgtggggggacgtgagggcgagcgtcttaaggctgcagaacatgctagcaacatagcatgggaactcaggaacctcaagcgttttttaaatttaactccttgagcctgggttccagaaggtgccaatgtaattgtacttcccctgggactgcagccaggagggaacaggccgtgcttctttattacacgtttttaaaacctgttttgttacctgcagggaggcagctggtgagggcctttatcgagctgggggctggggagcagggcggtggaagagtggcctttctctttggcatgatcaccctccgagctgcaaggtggaattccaggccagaatgaccaaccagaaagagggcgcagggtgtccattgctttctcttcttctcgtgtcattgtttttcctttccactaaaaacagtcgcgtccttctttatttctctgctccctttaccagaccctatgtttctggaaggaaatgcaatacacgggcaaagaccctggaaacctggggaaccagttcaccatcttaatcctgcctctgcaaccacgatggggtcaatgtcagcttctcttcaactcaacttccaaacaatcagaatgaaggtgcccatgttttaggataggcaaatctcaaatgtaaaattctaagtgaagtgcctacacacagtaggcctttgagttcaggggctgtgactcactcaccatggtaatctatccgccacaaatagagggttctatttgcccttgaaccatctctctggcaacgtactggcatgtttcctatgagtcatgattaaaatttggcacagcccaccgtaaaactcgacacttgtgctccaagcagtattttgttaatgacagggatagtggcaaaatcaactctgagatgaccttactgcattgccgcacctcctagcactgggacatcaagggcacgaccttaggactaagtccacaaaggaaaaaaccggaagaggcagaggaggaacgaagagagcgacagagatgcgagtcaggagattaagccccagctctcggtgcctctgaacagctttcacaatctcaagtttggttttttgtttcaaagaattagcatctatgacaattaagtaaaatttcagtaaatattaacagaagttgacatgatggaaattttaaggatggtcatccactaaagccttactactcgggattatgctttcttcatggtccgtgggaaaggacaccaacccagccaagtgcttacgcctcttacaggtaaagcctccaccctcccaagccgctcggtcacagctgtttctgggcacggagcgcgagcagtgccctgtgtgggggcctctccgcctgtgaatgagaacaggacgggtgccagcagtccgcaggggcaaaaggcagaggggcgctgcccacacgacccgggacactgtccacggggcgggggagggggcagggaggcgaggggcctgcagggcgaggccgcggggtgcttccgagggaaaacgcgcaccctcgcgggtgacccacggagaggagcgcggttgcagggctggcggggcgccgggccgagagcacggccgcgcagcacgtcgcacgccgcggagaggcccccgacccgcgccaggcggcccagccagaaccccaggcctcgccgctcagtcaaggcaaacagcgaagcactcggaagcgacactcgcgcttcggcagagccccggctcgggctgggcgcggcgctgggaaagagagggggctgctgtccccgcgtccactcatggaacctggaggagacaaaaccacggtaagggcagccgtcagcagcccaggcagctccctgtgtcgctgcgcttggccgccagcaacccgcgaggcaggtgctaacagcccgtgtgaagacgccacccgagaccgcagaacgagtcagagatggaaccagggctgagagtggggtcaggtcgactccagaatctgctttccaagctcttacactctactgatttgctctctgaaacaactttatacatacatgcatgcatgtggaggagaattttataatctaggcatggggcaggccagccttggtatgactcaaactccagagactataaaagaaaaaaaaaactgataaatctgattacaggaaaataaacattttctgcctgggaaaaataaaccctaaacagagacaaaagataaaccagagaactattgggaacataaatcacagacaaaggctaaattcattaacatataaggaatgcctacaaaccaataagaaaacacccaacaagaccgaatggacaggcagctgatataaaagaaattcaaaacaattcaaaacacgttaaagacaccaaactgtactcatcataagagaaatgcagagcgaacaatgtattagggttggcgggcactgaaacgttttatttcacaagcgttagtgagagtataagaaaagaggcgcgctcataaattactaacgagagactagatgcatgcagccgtcaggaggacagtctggcactatctatcaaacttataacttgcctttaccctctgacccaaaattccaattccaggattttatccagaggataaactcacacacgtgcaaaatgatgcccacagaaaaccaatcttcacagcaatgcttgtaccagccaaagtctgagaaccacctaaatatccaccccaaggagactgattaaataaatcatggcatcttcccataatggcctattatttagccatgaaagaagacaggaagctcttaatgagctgatgcaaaagaagccccgaggaacacggcaaagccaacagagcacagtaaaaacggcaagagagggtatgtgaccaaagcgccaaagcacaaccatgtagcgcagacgtgtgtatctgtgtgtgcctcatggagagacactcgaggggctgacaacactaggtgtctacagggaagggaggcggtggctggaatgcaagggtaggtgggagcctcccttgccattgtatacttcatatctttcagtttaataatatgtactcatgcctattcagaaaacaagtgtgtgtacatatatatatatataaatatacataatatatgttacgtatctagagaccatttgcacttcaacaagcctgggacctgacctaccatcttacctccaccctccaccagctctttctgctgaattccttctcaatgagttgaatcttgggcttccaagagccccagtcagaagtctgggagtcatcccggctgcaacctctctgccctccccctgagccaccaggaagtatatgctgtgaaaagaaggtgaaagtcacccagcagtttccagctctttgtgaccccatggactgtactccatgggattctccaggccagagtactggagcggggagcccatcccctctccaggggatcagtcccaacccagggactgaactcagggctccctcattgcaggtggattctttacctgctgagccacaagcgaagcccaagaatgctggagtggggagcccatcccctctccaggggatcttcccgacccaggaatcaacccggggtctcctgcactgactgtaggcggcttctgtgccaactgaggtgccagggaagcccgtatgcactggccactgggcggtaaagaactcgcctgcgctgcaggagaccccgggttccgcccctgggtcgggaaggtcccctggagaaggaaatgcaacccactccagcattcttgaccggaaaatcccgtggacagaggagcctggagagctggagtccatggggtcacagtcagacacgactgagcgaccgaacaacaacacacagtgtactccctcctccagggggtcttcccgacccaggggtggaagtcaggcctcccgcgctgcaggcagatcctttcccgtctgagccaccagggaagcccgttcacacacatacatatatgtatagatatgcactgcacacaaatcaaaatcaaatgccaacagtggcaaaagctggcttctggtccagcctcgcagccagtgggctagtgagaaaagctctttcaccagtgttcttagtttcctcatccataaaataggaatgataatccttcctcttgtggttttgaggaataaataaatgactctacataaagcccttagaccagcgcctggcacacagcaaatgtacacaagcgtcttttaaaatacgtgccattcaagctgagctcagaaagatctgcaggactcagaccagaaagagggaagcgggcggaagcaaaatgagccactcaggaggcacagcaaagggcaggggacaggagagctcagggccaagtggagggcatcctgcgggggaggggcgaggagacggggctcaaggagggagcgtgggccaggctggaccgtttttctgtaggggaccggcagcaatcggagtggttcaggcaggggaattccgtgatcggacaggctttcctagaaagagttctctggcagtggtctggaagccaagttggagaggcacgcactggggcagcagaggggccacttagaggctgttgcagcagctcaagaaggaacgaggaggctgtgatccaaaacagaggcagcagggaagcgggagaaggagcatctgggagacacagaggaggtgggacctactgggctggtggccccgggcgggggagggtggacaagaggcaaccaggaaggattcccaaaggtctgtcttgggtttctagaagcccaaagatgcagctcattgagataaggaattcagaagagcgagctggtggggggtggaggtaagagagtaggtgaggtcccaggtttgttgaggttcaaatggtctcctaggtaatccaaggttagctacaggcatctacattcagatgatggatttgggcttagcctgagcaatacagacaggtctgtagtactccagggttctggactgtggcgaaggcagctgctaccaagcggcaatggtctctctggtccaagtgaaagagttttgagaagacacattacctgtgatgcaagtaagacccaggctcctcccaccatccctgtcttctcctatccttccctctctcctttcttacactccctcctctctctttttctctctacccacctcctccttcctttccaaaaataggaaaaagttttcataagaggtttctttaaatgttttgtgtgaagcaacctacttctgacagtccctgctaacgggtgatggctgaagcctttattttttccagcattcctgccccggcttttgcttctgtctctgtaaagagcagaagtcactaggaagttgtgacccacttgatggggagcatcccagaagacctcattttcccatggtctgtctcagcagctgcaccacctaggtgtttcttagaaagggcggtctatggtcttctctgctgcggaggggtttcggagaaaccaatctcacctaaagaccacctccgaaggattttactaagagccatgagaactgacttctgaaagagtgtgcacttttctactaaaaataaaattatgtttaagcaagatttctggaacaaccaggatcctgggaccaggattcaagagccagttctgctatcccccactcactcactcacatgatgcaaagcttctctcagctttggtctcctcccctacaaaattgggaccaactactagaccatctccagatctccttctggctctaaaactgtgcgagtctagaaggagggtagaaactggtctcatgacactgtgggctatttcagcaattcagaagtgccagttaaatactgaaggcaattctgtttttagaaatcagttgatttcctgactggacaatagaatgcctccggtttcctcactctccgtgtctgctgcaatggcacggacacttatcccaaagggaagccccagcgactgaggtacagcaagtgctgctcactttccaaaagccctacttgccaaagaagccacctcttttcctggagaaaccacagcgagggactcaacgggagagaaaataccaggcaaggcatgggtgaccactcagtgtttaactatgtaaattacaggcttgcctttttaaaacataagacagaaagttcagtctaccaagagatggacagcgtattttcccacttgtagagatttatgtgacctgagagaacaagcaagaaacacggacaaggaggcctaacctgataacagactgcctgcctcctctctccctctggggtcacggcgtcgtccagatgaattcagtcgttacagcgagacaagactcagcataaacagccacgagaggctgcacgtagagctcaacacaaaaaagaatatccaggagaaaagtgaccattttttaatctaaaaagacttctttttcccccaacgtgtcggtcaaaatgtgattttcctagaatctgtgtactgtcagtaaaaaggaacacgtcagcatttaattgacttaaaatattgtatcttcaaagatatcagctaatgtacccttataaacgaaagcctggcttagattagtttgaaatgcatcatcctcaaaaataatttcagttgaaacctgatttcagcagcgtgctccagtaatcatctagggagaagattaggtatctcccaacatgtacagcgtatgcactgttactcacacagcaggatagaaacgagcggtctaagttactagaaaccagatataatttaccggtgttttgaggggaggcacagatatgcttccatctttgaaacgtatacatgcggtttacattgttcaccacgcccaacaccactcaaagcaagagagaggacaggacagactgaccggtaaactcagatggtcactttacctaccatttccacaaatgtgggaaaggccgccgactatctgggccgcgggtaccgctgtcaactgctgactcctatggagggcaggacagcatcgaagtgccaaacacgctcacttgcagttgcaggcaccctgcctctaggatttctttctacggacgctcaaaataatttaatacaagctatccaccgcatcattatctgtcctagaacaaatcggaaacagtctaaatatctgtcagtaagggactagtgaataagccataaacaaagaaagagggagcgcgctcttaacctactcatatacactgaattccaaaatggatttaagcgaaaagcccacgtgcagaacagcatctatgcttgccaccctctgcatgaaaagggggaaataatatatacacacacgtgcatgcatgtactcaaatgcacacccatctatgcctatactgatgtactgaatacatgtgtatacacaagaattaatgcacacatacgtacaagacgctgataacacagagactgctgggaaaggcaaccaggcgctcgggcagaggaatggcggggggctgggaggtcccctcccttgcagaccttctaggaccttttggagtttttgttcgtttttttaactgaagtatagttgatttacgatgttgtgttagttcctagtgtattgcaaagcgattcggatatacacacacattctttctcacgttcttttctgtacttctatgcgctgtactgcaggaccttgctgttgtttacccgttctgtacataacagtttgcatctgctagtccctttgaaattttgagtcatgtgaacatgttacctgttcaaaaataatttgacaaacataactaataataaattgttcaccggtaagcagtgaagacacactctattactacgttataatatgaagggccatattttttaaacactaaaacatttaggccaagattggggtcttttcctactttttatttttttaactttttattgtatattggagtatagttcattaacaatgttgtattagtttccggtatacagcaaagtgattcaaatatacctacatatgtccctattctttttcaaattcttctcccttctaggttgttaaataatattgagcagagttccctgagctataccataggtccttgttggttatcctttttaaatatagcagtggttttttaaaaataaggtcatgacgaataaaaatgaggtgatcttcctctctattctcttggagctcttgtaaaataataaatgacatataacagtttggaggaaaaccaattaaagggatataaatcatcattaacccccttccctagatgaatgacaaagagacacatgttctaattaacactgagtaacattgtgtaaagagcagtttgcaatggaaacgagcagatggcaagcaagcatgtgaggtacgggagtgcaagacagcatgcgcggtctgacactgcaaactccacgcaagtgaaaggaactatacctgagtgagagctgtcccccattcaactttctctggtttttaggggcatctgcggggggcggggggctgctctctgtgcccagtccccacggggcagacactgttccggagcccagcccactctccacacaggcaaacccaccacacaccaaccacgcagccaccctcttacaacagaaagatttcctatccccaggcgacggatggctccgtttatttcaaaccaatctagcatttcagttcaacaaaaggtttgggacatcatcttagagtgtgatgtaataagagctgacccagaggtttatgctttaacaaccctctcttttctttcctttgaaacagagatttatgacaggaggcagagaaagagacagagatcacagggttgatgaaactatcttaggaagcacagagcaggtaccaaggggtacatgcttctgaccgctctttgctcaaaggcagaccaagtaaggaaggcggctcagcttcctcttgtttacaagttcatcccattcttaggcttttctctgtggaaacacaagatgcctcagcagtggtggtttcattagcggagccctcagcagagagccagggcctggctccccgagtgagaggcctcagcccagctcacagaggctatttccctctgtgcccactgacccaggctggggtgacggcacagttcagacaggatgccctcccagagtcgtgatgcaagcctggaaaagaaaaaacctgttcaagatccaaaaccaggatctgacaattcagaaccacagagagtggctaagaccctggcctttgcagaaggtatgctgcacttacacatacgtgacatgagcagccactgcatactcagtcttagactgttccacctacgtccagggtttcaacgcatgttccgaagtgaacaacagctggataaaaaacataaaactctgagtaaacaccagatacagttcctgctctccaggcaaaaaaagcaggagacgtttttgtttgtttgaatttgggacttcaaataactgctcaaaggaaaaacaaaaaacatagatagtggggcaaccagctatatgaacaacatttacggccaggaattataagtataaatgatttgtgcaatctgaatttttggatttaaactgacactttaattcctatgtttgagaggaagagatatttattacatacatatgtacacacatatgcagatttatgtataaattttatacaaagccatttccactaagctattatttaaagtattgggattcaaacccaattcctttctccatctgagacaacagactcctctggtttgaggatatttttaaatataaaaactaattatcctatctcactgcctataaactcaatttctatttctgagcctgcttctgttgcatgtctcttggcagtcccttgcattatggcttgtttacaatccagtctcaaatcacagcaaagacagggatcaaagaaaaataagcttttcaaccttttaggagggtttgggaatgcagcaatatttccataatgctatatatttttaaaaaatcaagtccactttctatgaaaggataattctttttaagcggcacattttatagacaaaatgtggagtgtataaactggacgcagaaagagcgaggctaatgccagtgtcagaaggccctgtcttggctggattttcccacaaaaccaatcaatcaatgcacgtggagatgtatccaggcagacttttgcaaaccagggccgttttgttttgtgtcagcccactaagagcttccaaggccattctggactggattgcggagtaggggtatgcaacgtacaacactctctcttctcaacgtgacaaactccttgaaaagagaggcctccacagacttgtcaagggaggcaaattaacaagcacaatttacgctgcccagctggggtggtgaaggtcaaaggcaaaccaaaataaacggacaacgataaagaatggaaacagcctatgcctaccgaaaaaaaatcctgtgaagtccattttactctctcctcttctccgtgggcttgcctggcggctcaggtggtaagaatgcccctccgtgtaggggttccatcctgggtcgggaggatcccctggatggcagcccactccagtgttcttgctggagaatcccatggacagaggggcctggcgggctacagtccatggggtcgcagagtcagacacgactgagtgactaacaggctctgttttcagttctgtgagcctctcttcacaaagttcctcattcgagtatctgccctcggaatactcgcccagccactgatccacaggctcagcccctggcgtgcactttagttttcttatctcagagacgcgggtgcggagcaaggtgagtaggctccttgcagctcgaacagatcacggtggtgagcacaggcgagggttccccgcccactctgacaccccccagacctcctctggtctcatcacctctgaggcttgtctccactggtttctgggccctgcagcaatggcagtggacaaacacaagaccttctccagaccctcctggtgaagatgctgtctgtttcctgcttttacaaacatctcatagcaaatgagtagtaaggagaggatacaaaggatgaaccaacaggatcaagagggtatgcctccgaaaggaagagagacacagctgggagaagggaaaggccacttctggaagtgctggactgctttttcaagaagggatataggaagggatataggaagggatataggaagggatataggaagaccgtggcatgctctgctcctggttcccacttgtgaggctctgactcttcttttccatcccccattaagaccaggagagacacagagagaatttttctgtcttctggttaagccagatgtggatcatttcttcatacactgaattctgagacttcccgggaagcattaatgaggcccatctgccatgccacttgacctcaattctccctatttaattagtgggctgtatgcttacgtatggggcgtccctggtggctcagtggtaaagaatctgtctgccaaagcaggaaatgtgggtttgatccctgggttgggaagatcccctggagaaggaaatagcaacccactccagtagtttttcctggagaatcccatggacagaggggcctggtgggctacagtccacaggggtcacaaagttggacatgactgagcaactaagcaacgacagcaagcggcatcttaaataacacttctccaccctggagagccacaaaggctggtgtccggattcttcccaccttcattttagaagcaatgaagttttcttcaacctgccacatatgagcgaaggcactgggtgtggagccagcaacagttctgccatgcactccaccttcccccagggaagaaacttctaggcgcccgggtgaatccaggtgtttgtcgacctaactggttgctgttgttgttcagctgctaagttgtgtccaacttagcccgactcttcgcagcatgacaggctcccctgcccttcactgtctgccagagttggctcaaactcaaatccgttgagtcagtgatgccatccaaccatctcatccaagtccacatacacccaagctgcaaagagcatcaaggacccaaaacattccctcaccaacatactcaacagcagaaacaggtccggccgcacaccgcctgcggggccctcggggagctccgttcctcggtacgctgctgtggtgactactgtgacgtgcacactgctcatttgctccaacctcctttcatatcaaaaaaatcaatagataatttttgatagccaatgtgtgggtgatctgaagaccattaagaactgaaagtgaagtcgctcagccgtgtccgactctttgagaccccgtggactgcagcccaccaggcttctctgtccaagaatactggagtgggttcccattgccttctccaggggatcttcctgacccagggatcgaacccaggtctcctgtgctgcaggcggatgctctaccctccgcgccaccagggaagccctgttaagaactgaggtcatgttcaacaatgttagatttcgtgaaaacacctgcaaactctgtgataaccccgcagcgtcctttgagcccccaaccctccaccacgcacggcacgttccgccagacatgaccggtactgccctgcaagccgacacccgtggggccacgaggtggaagagagcttagaacaagcccttcccctctggtagtaaacaccacagagccctgactcttctagaacatgttctgagagcgcctcggtttcatgattaaacgagttatactgtcgttgagaaacaaaagatgagttttaagtggcttcatgtgcaaacagcccctctcggagaagcacacccacgacagttcgtgcagttttctttgttattgttagcagtttccagttgaggacttatccaattatctatctattgtctggcaggccttgcacggggattccagttacaggaaacgcttctgctttcacagaccccaggcaaaccctggagcagaaggcagcacagccaagagggtgcgtgtgcgcccgaggaggtcaggagtggggggcgcctgtggggccaaacaactcacgtgtgaagttcagctgcaaagctgcttccaactagtttgcatggatttgatcttcactgtaggaagcggttgaaaatggattgcgggcgtgaatgggaaggtaccgattgaggtgactgccaacacctgtacctattataaagtgtttggagttcagagggccccacagagatgccactgtacagcagacagcagaattctgctgagatgtttcagggaggccctgggacgggcgatttggatgctccaggacagacagatggactctgggccggaaggactgaggtcagctcacacctctgcagctcccctggggggtgagggggctgagttcttgctgagagactctgaccctcagtctccactccgtcgtgtgcaggagattgaagcacaggtcatgggccttccccggtggctcagtgtcgaagaatccacctgccgattcaggagacatgggttcgacgcctggtccgggaagatcccacacggcccagagaactcagcccgtgtgtcacagccactgagcctgcgctctagagcacaactcccacagcccgcatgcccccctggagcccattctctgcaacgggagaagcccgcaccctgcacctggagagcagccccactcaccgcaactagagcaaagcccgtgccacagtgaagaccctgcacagccagaaatcagtcagtcagtaaaactgttattagacacacaccgagatcccttctctactcaaagctggcttctcgctgcacatcacacacaaaacaaaacccaggaagcctgccagagtctaccaggcccacctgccgtgtccccgggagcagagacgcctcagggggctgacccagggctcccacgacaactgaggccagcagcttcgctctgagggtggacccgaaatgtccagggtggtccacgcagcccagaaacaccccacgtgccctgcagtttccagcgcccgctggacattcccaatgccctgcgacacgtcaacacgaagtgctttccctgcgatgttcatgaacgtccaaccgcaaggaatgagatgggaggacgggctttgttttgtttggaacctgactagggagtttcaccatatcagaagcatcacatcacgaagggcagcacagagcgtcaccgagtcacgccgtcacacccgcgggctgcctccatcgccaccacgggcccagggagcctacggggacgtgcggaagccacggcgacgtccggggcaggcaggcctcgccgacgtgtggatactgcctatggccgcctctcctctgtatgtccgggacagcgcagttaaggcgtcagagggatggctggtgatggatgtgggtgggaggttgcattttgcacagatttcgctgcaggagggtgaagcagtgtggctgcagatgggctatggaagcagggtttgggtcttgggccccttctccccgccacactccggggcccccctcaagttccgaaggcgcctgctcccgcccgaggaccccgtggcccccctggacgggtgcctctcacacccataggctgcctccttgcaccctcccgccacccctgctcccctttaaactttctcctccatcatctatcgactttctctgccaccagaaccacgtctatgagaccaaggacttgtctctcgttcctcggcaccaggagcgatgccgccgcgtgaaggcagcttgtgagcaccttctggcaaacaggagtgggggagttcggctccacggagcggcgcgccctccaggacagcgagcccctccccgtgaccagcgctgcaaggcgagcgcttcgtttccctgaccctgcttctcgcgctgcaccctcttcagagtcaaagcgagtacgagagcaagcagccggggaggaggcgcagcaaggctttcaagtggccgtctcttcaggacaggccgtgcgggacgggctccgaggcgaggactcctgtccaggacaccctgcccgcagacacgccgcggaggccaaggcgggactccctaagacgccacagcccctcaacaagaaccaggctctgcgactccacgcaacaaatgcccctcgaaaagcaaaacagacggttcagggtggccagatcccggctggcgatggacaaaccatgcccgccttcactccgttctgttcctgaccccctgttctctgagatgaattttattcagaaattatcggtaagtcacgttcttcgaatcacaatcccgacacgtatttttgttgaagttggtgagctgactgtgaacgtcacacggaagccaaaatacacttaaggaaaaggcagtgaggccagcagctcagccgactggaggtcaaagccccagaaaggaagagagggctgcaccggcccaaggcggccaggggacgggcggaacagagcagagagcccgtcagcagacccccacacacagacgcggcacttctgagaaatctaacactgcagggtagtaggacaaagatgctctccccagcaaacaggggtgagctggctggataaccacacgaggaaaaagaaaaatctgcccccctgccccagctcaaacattcatataactcaattcttggtgtagtacataaatgtaaacgtgaatggcaaaatgataacacttttagaagataatattaaagaaaaatcattgtgaccctgagatagcaaaacacaagcagtaaccgtaaaggaagagatgaccggcaggcaacgctgaagcatggcgactaacgggccagcattgcgcaacggagaccagaggccccgtgtgctgcgactgagacctggcgcagccaggtaagtaaatattaaaaaaaaaataaagaacttcttttcatcaggagatgctgttaagagagtaaaaaggtaagtcccagagggggagtaagatatttgcaacccatatgactagtacttggatgcaatctcaaaaacgacagaatgatctctgttcctctccaaggcaaaccattcaatatcacagttatctaagtctttgcccaaaccagtaacgctgaagaagctgaacggttctatgaagacctacaagaccttttagaactaacacccaaaagagatgtccttttcattataggggactggaaggcaaaagtaggaagtcaagaaacacctggagtaacaggcaaatttggctttcgaatgcggaatgaagcagggcaaacactaacagagttttgccaagaaaatgcactggtcatagcaaacacccacttccaacaacacaagagaagactctacacatggacatcaccagacagtcaacaccgaaatcagattgattatattctctgcagccaaagatggagaagctctatacagtaagcaaaaaacaagaccaggagctggctgtggctcagatcatgaactccttattgccacattcagacttaaattgaagaaagtagaaaaaaacactagaccattcagctatgacctaaatcaaatctcttatgattatacagtggaagtgagaaatagattaaagggactacatctgatagatagagtgcctgatgaactatggaatgaggtttgtgacattgtacaggagacagggatcaagaccatccccatggaaaagaaatgcaaaaaagcaaaatggctgtctggggaggccttacaaatagctgtgaaaagaagacaggcgaaaaacaaaggagaaaaggaaagatataagcatccgaatgcagaattccaaagaatagcaagaagagataagaaagacttcctcagccatcagtgcaaagaaatagaggaaaacaacagaatgggaaagactagagatctcttcaagaaaattagagataccaagggaacatttcatgcaaagatgggctcgataaaggacagaaatggtatggacctaacagaagcagaagatattaagaagaggtggcaagaatacacggaagaactgtacaaaaaagatcttcacgaccaagataatcacaatggtgtgatcactcacctagagccagacatcctggaatgtgaagtcaaggggccttaggaagcatcactacgaacaaagctagtggaggtgatggaattcctattgagctgtttcaaatcctgaaagatgatgctgtgaaagtgctgcactcagtatgccagcaaatttggaaaactcagcagtggccacaggactggaaaagggcagttttcattccaatcccaaagaaaggcaatgccaaagaatgctcaaactactgtacagttgcactcatctcacacactagcaaagtaatgctcaaaattctccaagccaggcttcagcaatttttgaaccgtgaactccctgatgttcaagctggttttagaaaaggcagaggaacaagagatcaaattgccaacatccggtggatcatggaaaaagcaagagagttccagaaaaacatctctttctgctttattgactatgccaaagcctttgactgtgtgggtcacaataaactgtggaaaattctgaaagagatgggcataccagaccacctgacctgcctcttgagaaatctatatgcaggtcaggaagcaacagttagaactggacatggaacaacagactggttccaaatcaggaaaaggagtatgtcaaggctgtatattgtcaccctgcttatttaacttctatgcagagtacatcatgagaaatgctgggctggaagaagcacaagctggaatcaagattgccgggagaaatatcaataacctcagatatgcagatgacaccacccttatggcagaaagtgaagagctaaaaagtctcttgatgaaagtgaaagaggagagtgaaaaagttggcttaaagctcaacattcagaaatcgaagatcatggcatccggtcccatcacttcatggcaaatagatagggcaacagtggaaacagtgtcagactttatttcttgggctccaaaatcactgcagatggtgactccagccatcaaattaaaagacgcttactccttggaaggaaagttatgaccaacctagatagcatattcaaaagcagagacattactttgccgactaaggtccgtctagtcaaggctatggttttcccagtggtcatgtatggatgtgagagttggactgtgaagaaggctgagggtcgaggaattgatgcttttgaactgtggtgttggagaagactcttgagagtcccttggactgcaaggagatccaaccagtccattctgaaggagatcaaccctgggatttctttggaaggactgatgctgaagctgaaactgcagtactttggccacgtcatgcgaagagttgacttattggaaaagactctgatgctgggagggattgggggcaggagaaggggacaaccgaggatgagatggctggatggcatcacggactcgatggacgcgagtctgagtgaactctgggagttggtgatggacagggaggcctggcgtgctgcaattcacggggtcgcaaagagtcggacatgactgagcgactgaactgaacggactagtgaaaggtagtatggaagaggtaaaggatgcttggaaatccacaagaatgagacaaggaaacacagctgcaaaatgggcaagagacctgggcaggcgtggccagacgaggacagccaagaaacctgggtaaacaagtggtagtgagtaattaataaccagaggaacgtgaaaagtaaaagcaagcaaacaacaatgctgtgatacgattacgaacatagctggttttctaaaaataaagagactgacaagtctaaggttggagggtaaatgaaacatcaggaactctcatacataccaagcaggaatgtaaactgatataaacattttggacaactgtctggtgttacacctacaacaatcccaccacttgatcggtacccaacagaaacgtggtctacgcagacaatggcatatgattcagcctgacagaggaaggaagctctgggactccttggcagtccagtggatgaagacttggcctcccagtgcagggagggcaggttctcccctggtcagggagttgagatcccctctgccctgaggccaaaaacaccaaaacataaagcagaagcaatactgtcacaaatttaatcaaaactttaaaaaaatgatccattcaaaaaaaatctttaaaaaaagaagaaagttctgacgcatgctccaacgtggatgagcctcgaagccacgctaagtggaagaagccgtcacaaagaagagtccactcacaagcagcgcctcgagcagtcaatcctaagaggcaggggctgcaggagttgggggagagaggatgggaagttaaggggcagggaggttctgctttggcaaataaaaaaaagaaatggtgtcaactgtcattgcaagacacatccccaaaccagagaagttaattttaacatgttcccaagagagaggagccagcaagtccacatgggctcgaggctattcagctgtccatagtttctttttttaattccatctaatactcaatataaatacctaaaggagtttcttatggtaaaattagtccacagcagtaactaatgttatcagatttactaaatattctatctgtactttgactgtagccttcactggctaaggtgaacccggtgctggtcaggtaaattaaagatggtagttgagtgaaagggcattgatgttacctgacttatcactcatttctgttagggttggtatcccaagttcttgatatgtgtaattaagaaagttaacttcaggtcaccctttgatgatgtctaactgcaattctgattatctttaaacagcaattccagtccccgagatgcagctagcagttatttctctcatgtgccgaaggggaggaatttaccctggcggtttatctgaattgcttccaatcttcaaaaccccagatttatatgcattggcctacagtggccttgaaaataatgtgcccaaacacccagtttaacccatgctttaaaaagaaagcagacttcctttattttccttttttttcctcctgaatggaggtccaatttgtaaaacatgtcacaggaatggaaatcttattttcaagattagctttcacacacagctcaataatacttcagacatcagatttcgcagaatcagattacagatcttaccttactccaaacaccaaagagttggcgtcgggacccttccatgatgccctaatgacttctgcgacaggcagagtctgtgtaatcaccaagagcagaatcatgaatgtcaaaacacaggccctggctcacaggaaaatgtttaataaatggcagttaaaaaaaataataacactaacaagagctgcaagtgcatggcccacgtaagctaaatgccttattccatcttagctgagcagattttagaacagtcagtgattccattctattttgtaaattatcgagctgtaccagttcagagattcttcggaaactcaatttccaggcatttggcttttgttcctgggatttccactgctttagaggatccagctttaatgggctctttctgagaaaccctccattggttctgagaagtacttttattgaatgctccatttaacttcattttgcaattaatgaaactttcaagacatatttcccctcccctgttttctattcaagggattttttcccttgccttctgggtaattaggaccagagcactactcccactaggatcaggccttaaatatggcacccaaatgccaaagcagatgtcatttgcggagttctggaaagcccatctctcagatttaaaaacattccatgtcacaggtaaaggtctttggttggtaggtaccaaacagatcactttctgatttcagggacattcaaccaacagtaaagctttttgagttttccgtctttcttgacaagagtacttaaccttctccagtccaggagctggactcttccctgcctctgcaacttgaccagtttggtaataaaacaaatcaccaatttggttgtttattttcttagcctgaaaacgttcgcgtgtttaactgagggccagcgtaccgcatctgctcttcttcttccaaagttttaaacaaacaatcactgaacataatcagctaggagcaatcctctgctcgcgtatcctccagtctggaaacacagcagaaaagagtgtgatttatagggacccgtcgcctctccaaattactgcccactgtctggtgaaaaaaccgtttcaatcattttctcagtcacccaatgcacgaccccagaattttcagttcaatgacagtcctaggaagtcacggggccactctggcccggtccagaggacgccgagacgcactcaaacgtgggaataaaccctcccacgggacgctttatacttcctagttttaggtagatcaagagcacttttaaataaacttggcgtttgtttcctattccagtggaaaatctgacttcagactttgcagtgacagaaaaggagccttactttcctgggcaaccagaacccagttcttgtcacaggaactgcatgggtggacaaaacggcaacgatgcccgtttcacagtcctgatgaaagtgatggctcagccttgcctgggggagcatcttggaagctttgataggacccgattcctgggtcctatcctccactcccctgcctccccaacgttctgattcaattggtctgagagccggcctgggcgctggaatcccttaatcggggtacggttgctctatactgttgtgtcactccgctgcacagcgaggtgaatcggccgtatgcacccccacgccctccctgcggcgccccctccccgccgcccagccccccatcgaggccgaggagcacctgtgccgtgaggtgggctgccacccgctcgctgttgtacacacggcagtctggacactggggtcttaaacgttccctgggtgatctaatgtgcagccaaggttgagagcccccgtgtcttagtctatccgggctgctattacacaatcctataggcggcgtggtttataaacaacagacatttatttctcaccattccagaggctggcaagtcctagattaaggagccagcaagctcagcgtctgggcagagcccacatcctggtgcgcaggacagtctttgtgggaaggggcggtgggggggctctctggagtctctctgatgagggcagtgatctctcagtcttgagggcgcctccctcatgacctcttcaccagccccaaacaccgtcaccttggggcttaggtttcaacatatgaatctgcggggagaatgctacagttatccagtccactgcaccagtgctcaagagcccactgccaattcaggaggcgtaagagacccctgggtcgggaggttcccgaggagggcgtggcagctcactgcagtgttcttgcctggaaaatccaaaggcagagaagccgggtgggccaggccatggggtcgccgagagcgggacacagccgaagtcactgagcgccacacacacatgggccagtggcagggcccttgggcacggagctccgcgacgctcagctgaggagctggtgctgcccagaagggaaaccccgcccctggtcagtcatggcgtccccccaactaagccaaggaccctcacaccaggacaaggagggtcacggacagtcctgcagggctctcgagcaaaaggacccagatgtacccatcagtgtctcctatttggggccccggaagtagacattcctaggatctgggttgtgccaaaagcgttcaggctcttcaggaggtcattcacaaggtggtctttgctagggtggccctggatcctgtaggcctggaccagactcagcctttgcaatagtgacagggaacacaatcagctctgtggaattttaaatccaaacaaggcagcttcagatctgtgattcaaaagcaaaaatattcagagccgagaactctgtgcctccctggtatttgagcatcttccttcaaagcggcatgggggcatcttgactagacttttggacgcagtgcacgcgggtcgaggacgggggaacgtggggtttgctcagagctgtcctctcctgggctcacggaggcgcctgcagctctggctccagactcaggacgccggaggggctgccccctcaggctccgctgcagcgagtgcggacgtggtgggagaggagagaggctctgcagacagcccagggcgcgggggttctccaccctgcctttcaggaccctccacagctggcctacctgcagccgcaccaccccaggcacagagaggggcgtctgtgcagctgagggagggcaggaggctagagaaaggacgcttttaaatggaaaaccaaagcccatgaggggagacttctcacccgccagagagccctgggtactcagctgtcccggccgggaaggaaggctgctgtccgctgctggggaccactgtcctggggactggccgggggaggcagagaggtgtcagtgggggctccgtccttgacaccttctctcgaggaagcgagcctgggtggggagaggcccctgcgactctccagaccctcaccagggatgcacggcccgggggagctgccctgggagagagccaggtgcagccggcaccctccttgtgtcttggtaaacggaacacgggcagagacaagctggaatgggtgcagagggctggacgggctggacgcccccggggctcgtgtgggccacagactgaacatgctcagccgcgggctccggctcttgccctggatcggaatcccgagcgtgggtttcacagacaggctcagggaggcagcgaagcgggggcgataccagcttcgggggaggggtgcgctgcctctcagcatgggcttgaagattctggaaggtcaccgagtcaacagctttagcaagcattctctgtgatcccaggcttctgttggcaactttgatttgacagcacacaagggaattgatgggggtgagggatggggaagggtggtggtcaggtgcccacgccatcggggggcctccccccgactctctgcaacagcaggctgcctggctgtgtcactgcagggagcccccgctgctctggctctgcagacccaggccgcctgccactccgctgcccgcggtggctgcttccctaggcccctccactccttctgccccagaagctccagggcaccactgtctaataagagcgacacactgcctttctggcctcctcgagagtcactcagggtcctctttaggagccagcctttggaggaacaggattcttctagctgggtggggagggaggtgggagggggctcaggatggggggcacacctgtgtacccacggccgattcatactaacgtatggcaaaaaccatcacgatatcgtaattatcctccaattaaaacaaatttttttaaaaatgaatttttcgggctaattactttatactcttgcccagtcaccagcaaacggaagttcagagaaattaaggatttcttgaggtctatgatagagatgcattttagaaagatatggcatcactgaaaagaagggatggactcggatcaggtgttcaaagagaagaagaccaatttatatgacattttggagaaggggtgggaaaaagtcagtggttaccaggggctaaggatggggggtggtttgactacaagggggagcatgagaataaacatttttcaggttaaaaaaaattttttttgactgctccatagtgggaatctcagctttcccaccagggactgaccccatccttgcgttagaagcgcagagttgtgaccactgggccaccctgaagtcccaggacaacttctttagggcgaggaaactgtcctgtgtctgattatggtgacagccacacctccatccctctgtcaaaactcaccaaactttacacaaaagtgaactttcctgtatatcaatatataatgacagggggaccaactgagaggttagcgaatggtccagaagtaatgagaagttgaattcagcacaagcaggataaaaaaggggggatccggatgagagagatttccgagggggaattcagaaagacggggcctacgtctgaagaaggggcctcagaggtgcagacgtgtagaccaggagaggacctcccaagaaagatctgcctccagggcagctctaccttaccgaggagaaaactgagctgaaaatggcttaggggctggggctttgtctgggcggatggtgatatcattaaccaggcagaacagaggcgggaacagtgggttcaaggaggaagctgatgagtccacttgtggatattttgaatttggaacattgatgtcaccaagatttctttttttagttttcaggaatttgaaaacaaaactgttgggttttggcattgaaagcaatctctccgcaaacaccatttcacagtagttacaataaaaaaaaaaaaaaaaaaaaaaaaggaactcatgactctgaagccctacatgaaaacagtgcatcagagcagtctgagcttgtgagccagtgaacaacagtcattcaggacacaagcagagaactgtcctgatctgatccagattttaggcacattctccattaacgcatttgtcattaacattgccatcaattcttttccttcttaaatttttaattggaggacaactgctttacgatgtcgtgttggtttctgcaacacatcaacatgaagcagccgcaggtatgcctacatccccagcctcctggaaccccctcgcccctcccagcccactccacccctctaggctgtcacagggcaacttcccactacctcccactaccactatctaataacacatggtaatgtatatgcttccacaccatattttgatgaatccacacaatagttttttcttcctcatccataacatacagtttgaactttgaaaataagttgctttccacgctatggatgccaagatgtaactcactgctgttttgtttttgcttttgctttatgctgtgtgctgtgctgtgcttattagctcagtcgtgtccgagtctttgcgaccccatggactgtagcccaccaggctcctctgtccatgggattctccaggcaagaatcctggagtgggctgccatgccctccctccaggggatcttcccaaccaagggatcgagcccagacttccagcattgtgggaggattctttaccatctgagcccccagggaagcccagggatactggagtggggagcctctcccttctgcaggggaacttcccgacccaggcatcaaacctgcattgttagtggattctttaccagctgagctaccagggaagcccttttgctttacaacatgtagcaaataaccaaaggaagatgagcacggacttgcttctagcaaactggcagctgcctgccaagagtccaatgctacagataagactggatctaggggacccctgtcaccatttcagaacaatctgcaaaaggactcgatttcacggtcaggcaagaccgtgagagtagagttttcagcatcctcatagccactgggatgcagcgtcaattctaagagtcagatgctcaaagctggaaactactaagaaggcatagtgttcgtggaagccaagcttaatcacggaacaatctacaatcacatttacaatgactgcttcccgtttcttcgagagctgaggagcacgggtgcaaggatggtttgtcttagggagaagctggaatgtaagcaccttctgggcagggaacttagctttgttcagatgtatctacacactaagcactagagcaggttctcaatttatgactgtcgacagaatgagtgaagggaggagagaagtaaacgggtcttcagtgagagatggaaaagctactataccgcactcactcagcaaacatgattacaggcaggagaccgtttttagacgaagttgtagatagagaaatgcagaagataccaacaagttcataagctcagcaaggaggggaaaaaagatggtaaacatttgtgtatcaaagccgtatcagagagcacgtcatggagctttgaatggagtcacaacacggattaggaggggatagagatgaggaagccagccaggtcaccttcttccaggaggtctgagctttcaggatggagactttcacaaaacaggtgaaagcagagccttctgggatgtaaaaacagcaagaaaacataacacccagagggaagaaggcgggatgggtttaaagagtacgaaaccttgcccaggagtagcaggggctgctaaaagctgaaaattcacctttagaagtgaattttcttaaagagtgggatcttttatcttggaggagaggaggagcccttttttgaaaaaaaaaaattaagcgaagagttctgatcagctctgttacaaagcataagataaactggagtgaggcaaaactgaggcaggttcaaagaaccacctggcaggacttagggtgcaaaatgcagggagaaccagggggctcgggagtgagtgagcagaagcaggaagacgcagcctccactgcacccctgggcttccgcggaggctcagacggcaaagagtcgacccgcaatgcaagagacccaggtttgatccccgggtcgggaagatccgctggcgaaggaaacgtcaactcactccagtcttcttgcctggagggttccagggacagaggagcctgacgggctacagtccgcggggtcacacagagtcagacacgcctgagtgactcacactgggaggccgagagaacagcggtcacacgaagagaggttcgctgagcccaagggaggcgctggagggaccatgaggaattaggtcctgatttaaatgttctgaccgcaagtgaaacgggagctgccgccaggaaatcaggcggaaaggttcctggggaaacggcgcagagcagagctggggctctcagtgcccgtcggagaagcagctgcctgcggcgacgttcaagctgccggtcgggggtcactcgccagagtcaagaaaagggagagacagactgcctggtggacagacagaggtgtgtcaaggcgagcggcattaaaggaccttccaaaccgcttactcaacacattcccccgaacacaaagcacgttcctaaaactcgtttctgacttgagatgaaacacctctccccctcattcacaataaaggcgagagctgcagtccttcacaaccgaagctcaggctaagccccactgctggcatttcgtttgagagagagcgcgagggaccgagggaaatacaactcagggcttggacagctctcctttcacaggcttcattcccgcttcagtccgcaggagaagggaacgcagggcttcgagggcacttctgttattcggtagaaggcaatggaaacaaacagtctaactcattcactctgcagcagcccaggcactaaccgagagagaggcgagcgctgtgtgggaagcgcgtttctttcctcctcccacggccgacccgcgtctctcttccccagctcatcaggaacccgtttcaaacgccccgaggacgctgataaggctctcgacatcggccaactcctccaccacggaagatcgaggcggcgcaagaccgagcctctccaccttcgcgtggaacaaaagccgacttcagcgctcagcacccacagctgttttccacgaatacaaagagcccagccagcccagccggctctttgaaggtacgccatgcttttcctgtggcctacttgagctgcaggctgaaaagtgcaaaaaaagcaaaaaaaaaaaaagaaaggataagttttcacaagagctacttggtgagacgaagctggttctctcccagtgtcaactgcgtgggggcacgtttgctggtgtccattcttctttatttgttgaaagaatcactgagttgttccccaaatgtattattattttgactgggcagatggaagttagtggttacaaaaagaaaattctacatttttcaaaaagtcatcatttttcttatcagagactcacaacacggtgttgatggaaagttacctggcagggcgggcactgtcccatggggcgtgaggctcttgggcaggtcagcctgagcttggaagctggtgcccatcgagggtcggcagactcacggccgtgccctgggcaccgttcacagagagtgagacacacagggcctcgaccctctcggcgggcggggggggggggtcccctgggggctcagaaggtacagggcctcgaccctctcggcagggggaggcggtcccctgggggctcagaaggtaaagaacctgcctgcagtgcagaagacctgggttcgatccctgggtcaggaagatcccaggaggaggaaatggcccactgcaggaatcttatctggggaacccatgcacagagaggcctggcgggctacagtccaggaggtcgcagagccggacaccactgagcaatttaaatcaatacctatccccacccccccagtaaggctgcacagaagggcagtttcaacagcacaaagacagcaaacagccctagaactcagtccatatgggaccatttctgtcccaccaacaaggtcccgggctactcacgactgttcttttttcccctcaatgaaacaaacaaaactgctgtgagcatgcttcattcagatacgtcccttcctcgtgtaggaaaggtaggagagagccttgctgagacagacacagagtctagctcctgtctcttcgtcctattcttagtctcctaaacaaagcagtgaatttgtgtgagagaagaatcccgtgggaaagaagctcaattacagtccaagaagcctaggagccactttaaagcagagctgagctcacgagagccgggcaccaggagttcgcgagctgacttcgtccagagggagggagacgcaggcttggacgagaccgcgagagactgcgtggaagaaaggtggttctcagtctggagggtgatgttttagcagaaagacacagaaacctacaaagcagtgcatctggttttcagaaaaatgctggaagacttggcacaaaactgaaggaaaaaacgatgtccaatccttaaaaagatggacgtgcccagggtcattactacgcatgtcggtttgctgggaccaccccagtttaccttgacgtccaagagtaataattcctgataccttctgtaattctcacaagtaccccagcttggacaacaaattttatggtcttcctagatatgaaagaatggcaatctaagaggttaatgtgagcactgaaacagaataacacagttctagaaaattctagatagctcagtgtatccaataagtaacgcagcctccctctactgcacttacatacagcattctgggttggggggtgcggtctgatgataaagaggggggctcacacacagaagaaggcatgacgcgtggccctcaggcactcaggacgggcagcagacacaatggtctttgaaggaagacacagccgtttccccagggcctcaaatggatggttcttcagccacaggacatgccactgaaggctggcttaaaagttctcggtgattctgtgagtgaaacaggtgtgtgcaggtagggactgttagaaaggtgcctgctgccggagtctccaccgagggagacataccctcacagcgcacgtgcacacacacacactcactcacacacacactcacacacacacactcattcactcacacacacactttcacacactcacacacactctcacacacactcacacacacaccaccacacacacattcactcacacacacactttcacacactcacacacacacactcacacgcacacacacacatcacacacacagtcacacacacacacactcactacacaccctcacacacacttactcacacacacattcactcacacactttcacacacacacacattcacacacacactttcacacagtcacacactcgcacacacacactcacgcacacacacactcacacacacttacacacactcactcacacacacagtcacacacacacacacacactctcacgcacacactcacacgcacacacactcacatcacatacacagtcacacacacacactcactcacacacacagtcacacacacactcacacacacttacacacacactcacactcacatcactcacacaagcaaagaggagccggcgcttgggcaagagccactcgggcctcgggcacctctgtcctgccgtgggtgacgagtgataccgagggcggctctcaccccacctggcggcctcgggagcttctccgtggctgggggcacgcgctgaggagagcgggctggcagaggaggacatggtcagacagcatcaccgactcagtggacgtgaacctgagcaaactccgggagccgggacagcggagcgggcgtgctgcggtccacggggcggaccgagcgctgaacagaaacagcagcaccccgatagggacgccccagagcgaagagcccgtgaacacgcgccgcgggcggcaggcgaccccggccgcccccagcgcggcccagccgggctccccgcggccgcccccagcgcggcccagccgggctccccgcggccgcccccagcgcggcccagccgggctccccgcggccgcccccagcgcggccctgcaggaggagccacggggttggcaggaagggaggtcgtctccggaaacctaagcgcttttctggagagcgctgcccggcatgagagcgctgcccggcatgagagcgctgcccggcatgagagcgctgcccggcatgagagcgctgcccggcatgaaagtgcgcttgagagggcctctgaaccactgagcgccgcacaccaagccactcaggccctgccttcagcagagctctacgtctctttttggggggctgagaggggagggtggggtgttgcccagaataacaattttcagcgaaggaaaccccaccacacgggctgacgccggcttctcccctctcctcccggctgggcacagtcttcaccaacagctcttcaggcgaaagcctcggcagggtcagagaagagagtgacggggagagaaacgcgcgtgtcgagctgcgcagctgtgcctgcgggtgaacggggcgctccgcgcagaggggacgggggcccaaaggggccgcggcgagccagagtgcagctctggcccgagctgttggggtgcgcacgtgcacgctggcacaggcctgggagaggcgaagacaagggcgcacggaagacgccgggcccctttttctccagcccccatacaacacaaaggaaaacggggttcaaccgcagcaaggccgccagaacagccctgcttcaaaactcacaggaaggttccaaatcgggaaacgctctcatagctcacgtcagcttacggcaacccttcctgaccaggctcctgaccttcgacaggaccagttacgaaacagttcaactttagcgctttttcaagacggagctgccggccgaccagaggccgtcacgtccatgcgttttaacagccaaaccccgcatctccatgccgcacgttaccgcctgtgatgctcggagctggcacagccaccgcctgtcattcttaaaatgcgaagagaataattcagcgccttttctgtgatcacagagaatgcaattaatctgcaggctgccttggtatgtagaccaaaccttctgcacactgtttggtggggctgcagtctagggcacctcagccaatcttttcattccaacagaaaccgtgccaggctccttggcgctgggcagaggagacaaggtgggagggtggctgggctcccgcgggggcctgggttccagagcgatgcccgaccaaattcaaagctacctcgggatcagagggcttttgtctccgcacctattaaaagcaattaaaatatcgtctttgaaaaggaaaggtggttaaattcttacagtgtttgtctatggcccagaaactttttaaactcacaggaagtagagggtacagaaaacagtggttgactgtttagagaacaggagtgatttattaaagcttgtgatccatgtgggaaaacggctacctgagactctcaagatatgagaggagaaataattataaatcacagaaggtatggggaggaggagaacagagagcgccaagaaagacaattaagtgtgttttcagccgttacactgcaacacacgcgtgctggctgcagccgcaaggcaaccccgaccccacctctgtctcctctgaggccaaacaaatggtccaggctaaccatcatactgacactcgccgtgggtctcagggcccccgagtagacgagacaaaaggaagaacagcagtaaaaaccaaaccctacgctctcatggatccctcattaatacaaccccagctcattctctggccttcaaagcccacagaatcacaaaattttagacggaccctctaacctaactcccggtttgcagatgaagtaactgaagctcagagaagaatgtgactcgcccggagagcaggtgcggaggagcaggatacagccaagacccccggctctcggggccctggacaccgcgccgacctcaccgccaccctcctcctggcctggccctgatagcgcctctcttcttccccggaagtctgcctctccatcctcggtccctgttccccgtgtgacactgtggcacgatgaaagagaggcatttggccttgtctccagtcgcggcgggcttcccagtggctcagtgctaaggaatctgcctgccagcgcaggagagccggagacgtgtgctcagccccagggtggggaagaccccctggaggaggagatggaccccaccccggtattctagcctggagaatcccacggacagaggggcctgggggctgcagtccacggggtctcacagagtcagacgcgactgagcgataccggccaccacaccgacctgttccaggcacagagctccgaaaatcctcgtcactccctgagaggggtaagaggagcacctgtgacgcgtgtggcctctccccagcgcctgagccttgggatctccagtgaggagtgtcctttgtgtgctaaggagatgcctgggggctggggaatcccttcagggtggaggctggtcaacccggaaggccaaggcatgcttgggggttgggactccagacctccgggggagcggggaggaaccgaggtggcgttgatcacccacggccggacacggctgacatcaggccatcctgcctacacaatgaagtggcagtaaagcccctccactatggggttctgagagtttccaggtcagcgaggatcctggggtgctggcaggtggcacaaccagagtgggcacggaggtccacgcccctcctccacatcctggtccccacacggctcttccgagctgtaccctttagaaccatcgacagtggcagcagcacatccctgagtcctgtgaaccacgctaacagatcagcagcatgagcaagcagctccaagagcccttcagtggcccaggcttccagctggagtccacagtgccggcagtcctgagagacggggcccttaatgtgcggggagctgattcgaactccagggagtcagcgtccgaactgagctgaagtgtaggacacccagctgacgtccaggaattgggggaactgcttgttggtgtcaggaaaatcccacacgtttgtcctaggaagtgttgggagtaaaacaactcagatgtgaattcctgcatctcagccctcaccacttcagcccagcgtcctgctctgccctccaccccacggacatctgtccttccatcccatgaatgaccccgctcaatctcagacctccctgacaggtgaaagcctccaattctgcttcttgctaccaggagtcggacacgacagtcgctgacttccagcagaaggaagggtccccccgtcatgactccatggcctgaccctcccctgcccttgacctgatggatacaaacattccacatgagtccattctttccactgaacaccagctacgctctctgattaaagcgtcatgtcgggctgtaggacatggctgagtccatttacagacacagacttagttactttaaataggacctcattccactatcttgacatggtagatatttccaggggtaattttcaggttatttcttacaggcagtgaactgtaagtcaaaagtctgaaattatacatgtaagtgaaattatccttaaaaaatatttaactataaagtaagtgtggccaggcctttcctaccttggtggaccaacaatgggatcaaccagaacctggctttaacccactgggtgaagttacacagcatgacacaaacctgtccacactgcacgccatctgggagaaggaaaggtctttctgccctcctctctgctgctgctgctaagtcgcttcagtcgtgtccgactctgtgcgaccccatagacggcagcccaccaggctcccccatccctgggattctccaggcaagaacactggagtgggttgccattgccttctccagccctcctctataatgatatccaaatacaggaatcaaaagagggccacactatgtgataaatggttagcagtctagacccatgcatccagtaaaaataaaacatgggccctggatgtcattttcaatttattagtagccacactgaatatatttattccaaccaacatatccaaaatattatcatttcaacacacaattgacagaaaagtgactaatgactagcttgcactcatcttttcctactgagtctttgaaacctagtgtgtagtttatagtccagttgcatcgatccctgggttgggaagatcccctggagaagggaacggctagcccctccaatattctggcctggagaattccgtgggccgtatagtccatcgggtcgcaaagggtcggacacaactgagtgcctttcactgtcactttttttcacagggcccggagccactgtgcctggaggcgcacgccggacagtgcaggacagatttcagactcaggtccacacgttgctggcacacgtgagcctctgatcagtgctgagcacactgccttgcagtgagttgacctgtgggatgccaggtgctgagaggcggactgggatcagaggggcagtaaaaggcctgaaaagcctgagcagactccagggggcagagacggtcagggaggcctggcatgctgcaggtcatggggtcacaaagaatgggcacaactcagcagctgaaaacagcaacgaaagccgtcagtccgtgccgaactgtccctgctctcacagcacgggagccctggtctgctcaggagcaaaggccagcgaggtctccacggcgctctgagcccttcctccaaggcatcctgaatcgccgcactgcgggcctggcctctgaagcggctgctgcgaagcgcccaggagaggctgaaaacagacgagcacgtaccgcggggtcctgcatccctgcgaaaccatctgcattctgctgagcagatctgcgtaaggttggagccaaggggacttggctggtctccaggctgcgccctccctctgggctgcgacagccaccactgtcggtcccgttaggagggcgggagagcaagagagaccctccaatcagaatcagcagcgcaacggagccctcccacactgacgtgaaaatcgaggtctcccggggtaaacgtggaggagctctgagatgtgacctgaccgccacctccttcgttatgacaagagtttactttccacgactcggacctgtggcctgtgtttaccgccccgcgcggggctgcacccacccaggcagacacacgcgcacctgaacgccgtgggcccccagggaaaccaaactcacgccccgcttccttccagaaagccacaggctgctgccccgggggcaacgctggcagcccgagtgcgaagcgcgctcgaggtaacggggcctcgggggcgcgccccgctccttgtctcttcctccgggaccgaggggtccgactgcagatggcgagtgaacaacgtaagtgacaccgccgggcaggcaagtgtcacggggaaagcacgcagaaaactgttcgactctatttaacatctttgttattttatttcagctgcctatctctttctaggacgatttcccagggaaattccattttcattacaaaagcggtttctcgcgccagggaaaagactggcgcggtgattagggccctggtgcttcagtagcggtcatctcagatggtgcgtctgcgggagaccagtggtttcctaaacaggcttctccgcatcctgccgcgggttcggtttgccccgagtcatctcttctggggcctcgagagaagcagctttcgggagaccgcggaaggaggggagaggtcgtgaagagcgcctacgcccagctcaccgacaggacggccgggacaggcgcgatcacgccggcccggagcgcgcaccccaggaacctctgcttcgagtcgagcacagccgcgcgccgcgtcggcaactgtccgtgctaccagcgagacagctggcatttaccgggcacccagtctgtgctggccccagagtgttcagtgatggtcaaatggcatccaaagtcctcaactccaacgaatctcgccgattctacgttttcggggcgggggggacgctgcatgcgtggcaggtgggatctgagctccccaaccacgggtcaaccctgcagtggaagcgtggagtcttagcccttgggccaccaggaagtctctgattctgcctttgaaagccgactctggttgtcccatctcagtgggaagatgggacaggcatgcaggcgctggtgtccggctgcaccccaagaaggacccctgctccatcgccccctccccccaacacacacatacacaccaccatcctgctagaaaccttcaccatatctccactgcaggaaaaatcaaatctgaattccctgcagagacagacagggccttgatgagttagcctcactgtgccctcagcttcatctccttccttcaccccataacccccacatgccggtcaggctgacccctgcaccactgtcaagctcgtcagacccttcttggactccgttaatgcatacatgggacaagcgcctactcatcattcaagacccaggccaaacggctcatcctctgagaagccaccttaacgttccaggaaaaaactcactggactgtcacgtgtatttgtgtgtctgtcttccctggagactgccctccatgaggccagagaccacgtccagacccctagcaggcacagagaatgtgaaatgaacaaaggaccacacttcactgcaggatggtctcagactgagggcttcccgggtggtgctggcggtaaagaatccacctgccagactcaagaaacacgggttcagtctctgggcagggaagatccacgggaggaggaaatggcaacccacttcagtattcttgtctggagaatcccacgaacagaggagcctggtgggctgcagtccacggggtcacagagattcagacacgcacgcatttcagattgaagtcaggagtcagatgctcagagttcaggctttgactataaagcagctcctcacacgagctactgtgtgtcacgcggctcttccaaatacgccagcgatgtaatgtgtgcacggagaggaagactgagacgcagcgagacagcagaaacgccctcagaagtcacaacagtcacagccacttgggtcgagttcctactaattctccactcaacaaggcaggagaagaaaaagtacagcaggtaaataaagtcactgaaggtctgtcggtctctttaaattctttttacactattactgctttccttcctctgtttcactctctggaatgaatcatttcacttaagccgatttttcagatgactgaagcctaaacttaaaaataaataaataacaattcagaatggagatacttctgaaacttattacccactttccctgaactcttcaactcttcctatggaaacgaagcctgagttgatgagtcagcagcatcctcaggagtaaggaagaccgccccgctcacagcccactgataacctcaggcgcgccgagatcttcattactgcctgctccacacagaggagcctcacacggccgtggtctttattccctgggctaatcttaatagcatttttatcttgttccttgcaatcaagactcttagaaataatttttcaataatttgctggcctcctctgccaactcagtgctaattaactatattcacggtttctactggctggggaaaaagtgataactaaccttgagagaagatgtattttttttttaattgggtggaaaattattcaaccttaaaaacaagtgaaattcccggccatgctgcaaccttgaaaacattacattaagcaagataaactagacacagaagggcagtgtcgtatgattccacctgcccgagagacctagggtggtcaagttcacagggacagaacctaagacggtggctccctgtgcctagcaggaggagggcgttcagggtgacgaaagttctgggcatgaacgacggtacagctcgaaattgtttttattgtaacgaaggttgtgattcatatagtgctgactgtgtattgggcgctactctaggggctttgcaagtattcacttgttaattgtcacgactgcccctagaggtaaatacgatttatatctccctagcccaccaggctcctccctccatggaattctccaggcaagaaaactggagtgggttgccattcctttctccagggaatctttcccacacaggaatcgaactcaggtctcctgcgctgtggacagattcttcaccatctgagccaccagggaggccccagatgacggtgtgaacgtgctcactagagcattgaactgtgcacagaaatgactacaatggtgcattttagtcacgtatggtttatcactagatacacacacgtacagatatgtaacgtgtatatgtattttgaagcaaacctcttaagaaagatggcatgcttttacgagtgaagggtgtgacctttaagccggcacgtgggctttgtgacttccctctgcaaggcaggggttgaaattacttcctcgttcctagtcggcctgaggatcatgagaatcgcccagaggactctgaaggtgtgggcggtgtctgcagtccccaaggcctttcgctcatgagcggcacactgtgacaaaggggtgctccccgggccccggggacaccctggacaatcccgggagagctggcgcggagaccgggaagcccgtcttggacacaggctccaggccctcctctcatcctgaggcccagccagacagccctggggtcacatgcttggtcacgaagagaacgaagatcccaaatatctggagtcactgggattttgagggtttgtaaaagaacagaggcaccttttaaatatcctactgttgggttatagcttataaatgaaacattttaggttagattggaacaatattttgaaagcagcctggtccataagagagagagggtgtatctggtcgtgtgttcagtttggcaaacacacctcccagggcttgtggggtttgatgttgaattcggtctcgcttaatgaaaggttactattgtccctctgcctgaatgataattcaccttccttttttgcttccttatgaaatatcatgaaggtctactctaaaagttataatgtgctgtgcctgggaaaaatgtttgaaatttttaaattcatatatgctttattaagcaaacctcttaaaacagttctttttttcccccttgaatatgagttatttcactctgcacatgaacctaaaattaaatattccatctctatgtgtttaataacatcaagagatataacaattaatgagattgccgtgggggtggggtggggaagagttgcataaggagcctagtaagagtttcctatcttgtcagaatttggtgttttagtttcttttaagaaaatagtttcctggcccatgcagacactccctgagccctgagatcaacacagcatcctgttcgaatgttatgctggaaacactgtgctgttctaggccaaatgtatccagatcacaccgaggaggacggaaagaactctctcttgatgcaccacggttgctgaaggtgggtttgtttatgagtagaataaaatttacagctaaatataaaaacagatacatcgtcatcttgtaaagggtagtaacatgtcattccaactctggactcttggaaaaaacatgaaggtcatgcctaaaataagaacagtgcagggccgaggatcaaaccaggggtaaaaccgcagacttgtccctgttttgatgaaggcattaggcaggttacaattggacagtgagatcatttctcttaaaccaggaaagcactgtgggtttgttattccaacacacacacacacatacacatacacacacacacacacacacacacacacacacacacacaccccactggccctggggagggtttctgaatcaggtgtctggtctgggtatgaaacagtgattactacgtatttttcaaaggctatttatacagactattggagccaaagaggagagaggcagaagaacactttgctccgctgtgcgcctctcccttttcaactataaaagaactttaaaagtccacagagtgaaagatttcacctcctagttactaagataaagatggctaactggcttcctaaaaagatgcaaagaaaccaaaaagtcacatgcatcaaattgttatttttcatagatttctgtttttagattttaaaaagtttctcgagtttcagaggctatcaatgaccacttggatggcctaaaaaaggatctggttttgcctcttactaggcagtgacttgattttgcagaacctctgtttcctcatccataattctacttcctaccctcacaggggaggttactggggttaaataatcttctatccataaatgtgttaaactcagtctggcacatgtggacatccaattaatattagtttccttccttcctcctgactcccagtgactgaggccagtgaccaacgtgggggaatggacgcgggtgtggcagggtcggcaggggtaacggggagagcgctccaggcactgagccaaaaccagcaggtccggggttccgtggtggtgcagcggttagggacccgctttccaatgaagggggtgtgggtctgagtcctggctgggaaactgagatcccacatgccatgtgacatggccaaaaaataaaaataaatttagaagacagcaggtcttttcaatcctgtattgatcatggacacccattttgaactcacatgcaggctgtattatataatatatatacagagagagagagatatgttcactaagatagaacaccatgttctcagctgttcagttttaaacaggcattcaggataaagaagatgtggtacatatataaatggaatatcactcagccattaaaatagtgaaaacatgtcatttgccacgacatggatggacctagagactgccataactgagtggagtaagtcagacagagaaggagagagagcgcagacccccctatgtgcacagtgtaagaagagacatacagatggactgactgacaacacagaaacaggctcacaggcacagggaatgaactcatgggtgccaggagggaaggacggatggaagaggtaagtagggagcccggcctcgacatgggcacactgctgtgtgtaaactgggtcaccaacaaggacctgcgcaaagcacagggacctctgctcagtgctgtgtggcagcctggatgggaggggagtttgggggacagtgaacacatgttcatatggctgagtccctttgccgtccgcctgaaaccatcacaacattgttaactggctatacttcaacataaaaaaattttaaaactggaaaaccactcctcctcctctgggtaaaaaacactactactggaaaaactcagaaatgaacacaagacattaaattcccccatcagtactcctctacctgacccccctgtttttgcttttctgtagcccagggacagaggagcctgtgggcaccgtctatgggatcacacagagtcggacacgactgacatgacttagcagcagcagcagcagcctcaatatcatactgtcaaccatttgcctgtttgctgtcctgccttccccacaatgctggattcacagaggaatgagagacagtccctggctgtcgtgatttctgttacagatccagcactcttacaattattcgttgaataaacaaagttgaactgaagtataatccacatgccccttaggaactcagaaaattctactgatcaaagcaccatcattgtttcagttcaaaaaacccttcattcaccaaatttatgttggttctctaaagacaggagggtgatcttaaatgctagttaggtgccagccggcagcaatcattttcattcatacagtcccacttgcctcctgctgaaaggggctatcttccagaaccctcacatggagttttagcaaattctcacattcactgcgttaccaacccctgagaaggtgtttcaaggtcaagtgcaccagctcaagagcatcctgtggcaagcatgagatgtccctctgccgttaacacaaaacacatctcaaaataacctgaaatgttgagaccacattttaattttcccgaaagtgcttgagataaagagcagtagaggatactattttccaaaactggatgcactcgtttaggttcctattaaggaatccagtgtccttatgagaacagactccgagaagcagctcagagagaagtacctcctgggctctgagtcgcactgaactcccgcttctctgggcttaccgggcctcctgtagctttgtgagtcaacattttctcttcatgtgtgaataaacaaataataaaaagggtgtgggagggaaaggcaaagagaagtgggaacataaccccgcgctgcctagagttctgtgaagatgaaatgggccaacagatgcaaagctcctttgcaaactttaaaatacaccatcgaggcgagaggccacggtcgtgatgttttcccctggaaacacaactctgcgaaacctgcctttcctaactgaattctttcctcaaatacacctttagtaaccgattgttaatgaagaattaccgcattctaacaaaaggattcacgatttttgtgaaatctaacaaaaaagtttcaatacggcagtgttaatttaagagaatgggaaatttaaaaactactcgtatagaaccagaacattgaccatattcttttcaaagcgactagaggaaaaagaccaccagaactgaagaagacacgagtgatgctttggagcattcaggcaatcacacatctttctacaagtctctccactccagcgcagtcgtggctcccagcgagcggttccttgcggccctcactgcacgtcagtccgtcggttcccagggtctgcagggctcctgggcccgcctccaccggtcagtaacaccaccggcctcatcagctgagtggagccagagtagtttttctagaatgaagccctcatggaggtacgctccagcctcacctgcttttttggcggtggggcagcgggaagtcctggttccgtgagcagcgacgggaccctcaccccctgcctgtgctgcctcacgccagccgggaccccctgtcccgccccccacgcgccctcctgcctctgccctctgtgcccgggctctgcctgctggaggcactctgcccctcagcccagcctccgaagcgcctgtcctgggaggacctgccgcctctgataaatgccccgacgggggtgtacgccttcatccccagcgccccgcctgtgctcctgcagctgctgtccaatgaactccaccccctagactccagctcccaccgctccaagctggcctacagcgtgcagtcaactcaaaaaaaacagtgggataaagggataacccatttcttgccctgtctgcttcaactgtaggctcacacatgcactcttttactggagagcacagaggtgcaagggggcccattctaacacgaatgaggacgtctgtttcaacttcatgatgagccaaacaggtagagacgcttgaaggaagagtcaagtgtctcaacttgtacaaaatttccccaaagtctccacatttgcaaaccacgaatttactcattggccatgcccttccaatagtccctacaaaaggtattttcaaattccatttgacatgtactttcatcagttaatttttaattgagccaaatattaaatgctcacattaaccagacaaagcgtcttgagctgctgatttgcggtgacagcttgtgttatcctcacacacaggccaagcatgaaatagaaaactaataaccccgtaagtgtattctccaagtgtcgcttatgggaaagaaaactacattcaaaggaaacttgtgcagtgggtgtcatttcccccccgagctgcaagctgttacgatgaagggaagctcacttcccacggagccggaggagcgcagaccccaccgtcaccgcacggactcattaagaggcaatctggcagcagctgaggggacagacactctggagaaccggccaattatctgggtgtcctttgtcatctgaagttcctgaactcacccacagataagcctgtgaagagggcctggcagtggggacataaagcacagagatgagaggggagaaggggagatggggggagcatttgcctgtggttttattcatggggacaggtctgtaagctgacacatccctcttttgcaaaggcccctggagaagtacggtcaagcttcattacaagtaaacaaatcacacgctctttctccaacagatgacaaatgatgagcaacgatgcttttgagtctgcttcatgccaaggaatgaggattctcaacatgcaaattccaccagttcttagaaaccacagacaggctgtgatgtctgcttcagccatacagagagctgagccccaggctgccaggccagtgggctgctccctgccaccctcggcggtcttcctggggaagtggaatcccgggtgctctctcccctgggagccttgagctgcactgactcccaccttccgctggctgcttgttttcaggggagaagaactaggggaccacttgcccttgtgacttttatgctatgtttctttcatacttgtgctacagcgttgataagaaaggagaaaccactttgtccccaccatgagaaccacgcaggagtcctctttcttaaatggtaagaaaatgaaaataatcctagacgtcaagcctgtctgaactggctctgagacacaggacagcagaactgagagcagctgtgcacacgcttccctggggcgcagacggtaaagaacccgcctgccgtgcaggagacccgggttcgatccctgggtcgggaagaccccctggagaagggcatggcaacccactccagtcttcttgcctggagagtccccaaggacagagcagcctggcgggctaccgtccacggggtcacagagagtcggacacgactgagcgacgtacacgtgcgcaggtgtgcaggtcatgcgcatgtacttttgcataaacagatgcgaggaggcggctgaagggctagtctctaatactagcatcaaggacttttatgcaagttgaatgtttaatataaagcaaaatctagaagatttcttttcagggatgaatgacatactttttcaattcaatgacgggtgagattaaaacacttaggtgtttttcttcattcactgctactaaacctcagcagatcagtgggcgggacctttgggacgcatctctttgctgttgttcagtggctaagtcgtgcccgactctgtgacaccatagactgccgcgcgctaggctcccgtccttcaccatcgcctggagtttgctcgaattcacgtccatcgagtcggtgacggcgtccaaccgtctcgtcctctgccacctccttcccctcctgccttcagtctttcccagaatccgggtctctcccagtgagttggctcctctcgtcaggtgaccaaagcactggagcttcagtgtcagaaccaaggggcacatacatccctctaatgggacaccatggagtggggcgcacgtgcttaggtaacaggcggacagcaggcgtgagggtgggtttgatgtccgaagcccctcgatcccactcccctgctggtccagtggatgagaacccgacagccagggcgggggcactgcttccatccctggtccaggaagaccccagaggccgcggagcagctgagcctgtgtgccaactactgccgagcctgtgctccggagcctgggcaccacacaacgggaggcggctgccatgagaagccccaacaccaccgcaaaaagcagcccgttcgatgccatgagagaaaagcctgcacgaggcaatacagacccaacggacccaaaaataaactaaataaaaattacattaaaaagctgcctctgtcacagtccacttactcaacaacagtcactgtgtgcacctattatctgctatgctgggtgcagcttaaacgtgacaggaggactatttcttttctcgtttcttccggcaggggagctgtggtgtgagccatgtggggtcttagttccccaaccagggactgaatctacgcgccctgcagtggaagctcagagtctcaacccctagaccaccaggcaagtcccagaaccgtttcatgaagtgagaaagtgccagtgcaggagaacaccttgactgtgtaagatccctacagagcggggacgctacagggatgttggagtaacactaacctcactcaaagcgagtcatcttttcagcaggcaaaccggcagtggcgagacaagctctggagagtaaaacttcgaggtaaacacctccattcaatcggtaggcgcctacagaggactttggcgggaaggtggtgtggaagcagcagtaataaaagaaggcagagccggcgggggaagccaggaccacgctgcgaagcgaagaagggaaacgggcgatcgacggggactgggaaaaggcgccgcggactccagcctcagcgtctccctcaagctccagacccttacgaccggctgccatggggcattcccacctgggcatcctactggcagggagcagggggactcccaggtggctcggtgataaagaatccgcctgcggtgcaggagacacaggctcaacccctgtgtcgggaagaccccctggaagagggaatggccacccactccagtgttcttgctggggaatcccatggacagagggacctgcgggctgtagtccacggggtcacagagagccggacatgactgaccgacgacgattctactaggagctcaagttgaaactgtccagaattaattccatcacatttatcccaccaaacagtcacgctgctcatccttcctcgctctcttcaggaccacatccttctgggaaacagcctgggtttggcttcgcctccgcttcctcccctgcccccctcctcacatttggtccgttcagtcctctgggtccccgctcccccgccgccgtgaatcgggcctcccacctggctcccagtgtccagcctcagccactgtcatcctcctcaagcccacacatcccgccttgactcagaacgctttcaataatccttttaacatctaccaagttaaacacaaactcaggaccagtcttacctcaccagggctctctacgccccaggccagtcagactcttctccaccccccgtgacgccgcaagcatccccacctgtcccgtctcctccagctcagctgctcggcctgccctccccgctatctcctacccaccgtctcctgcacgcaactcagccaggtcccctgccgtccactgaagtgtgtcaaggatcacagcaatttacacagcacttatcttagtctctctactggtcagagttccttagatgcaaaggttatcttccacgtttttcactcaagtgaaacacccagcatagagttttgcacatagtaagccctcaataaatttttttcaatggaaataggcagtgtccctgccctacacaatagcagggtctttaaaacccttccgttcccatcactgcccgttgctaggaactcctcacggttacaatttgcaaacaattgctcattttccttgattaagacttcttcacatcatttttcttctaatgttgtcacttaaatagtaagagactctgcattattatatttacaattttgttagaaaatagcttcaaaccaccggtaaaagttttcagtgttaaaaagagagaggtcaagaaagacactcctggcaggaattcataaagaaaatgggaggagacagtcctgaaatgcagacttagaggtgtcagcaaacaccctttatagacctttttcctcaagagataaaataccagtatctaaatatgatgacataattttattcctatgctaattgtaaggaggcactgacctaaggggactaagcacttatcccatatacgcttcgaaaaatcctgagggacagcccgcaggtccctctgtccatgggattctccagcaagaacagtggaatgggtggccattccctcttccagggggtcttcccgacacagggatcgaacctctgtctcctgcactgcaggcggattctttatcaccgagccacctgggagtccccctgctccccgccagtaggatgcccaggtgggaatacataggtatgacattcattgtgcttaaagcagaagaagtctgaggattggtgaagacttgggaaaagtcaaggaaaggcaacctgcaatgctgatgcctggtccggcctccaagcgctagaagtcagaaactctccacattcttttgcagcttaagagaaggcagtttaaaaatccagaaatacagtaattgggactgtcacaataaagatgtattgttctcaatggtaaaaatctccctggaaaacttaagcttcacttgacacagtggttccttggattggttttaggagaaatttcagcttcacttgataccacagatccttgagtcggtttaggacccaggaatagaggggtgagggggttggtcataagctgactcgttatgctgaagctccagagcacagatgagctgattattaactgaaaatggaatgtggctcaatctctgaaattctgaaaggcaaaacaaggagcagaatggaagtatcagggaactttctcatagaacctggtccattgcctgagaaaatcagccaagtagcccttagtgtgtctgtaactgctaccaatggccacgccagcatggcagggagattccctttctaacatgcttaagacggtgtttggggaagtagtcttcagtataagctattttagctgcgttgagttagtgaaacttcatctcaggctagagtatcagccccactgtagtctcccgctgcagagatcagagccagtggactcctccagcagatcctatctttttccggcacagggttggagtttatggtctctggagggaaagccaccatatctgatcacagaatttgtccttgcctggctgcttgtggcgagaatgcagatgggttcagatattccagcctggacagacccctctcctgcccctctcccttgcgatccagacacagtgctctttccttcaggtgagcccacccttcaagcgctagaggctcacaaggagccgaccttgcggcccctgtgctgggatgatgggcaggtaggggtcagtgatggaggctggaggggcaggtcctgaggagaaagcccacatggctctggagagagagaaacaaacacccgccatcaagctcacggatttatcttttgtctggcaaataaagagcagagaaatcaagttggcactacagaatcgagcagatcagaacaagcagcaatctacaaaagtacttttagaaacgaaaatggctttgtcgtgatttcgaaagttttacaaccttcattaagaaagaggaccacgaataaaagacgttagatggtaaacacctgctcttcaggagcacgaatgtcacggtggactaggaatttctgtatgtagagttttggaagagaagcctcttaacaaacagaaacaggactagaacctaaagccaagccggaacaaaagcttttattttcatctctaccctgttttggttcagatcgactctgacttttctgcataccagaacgacttaagaaagatagttcttcaaattaatctattctaaccatcttcatcagagcttgactgtctcttactgaaaaagaattaatgaaatcctttaaaaactgcagaccagtatttattaagtcttcataatatgtatagacagcgcctaatgggtaaatacttaacaaggaaactccccttgcctttcagttctcttaagcacatgtctgtgtaacacagtattttttaaaattatctatattcctctcctagttaaatcaggcctaatgcacacatgaatagccatatggttagaaataactttttcagacaaatactgaagtgtatgcaaaataacacatacttagcttttttttctcccctctaaatctgagaatttagaatcgcctcattggcctgggtggcaacagaattcacaacatctcctgcaacggcatccagggcagagaaaacgccctcctccctgaaccccgacctaacccaggaccgggcacagaggggactcagcctgacctgacccaggaccgggcacagagggcactcagcctgacctgacccaggaccgggcacagagggcactcagcctgacctgacccaggaccgggcacagacgggacgcgcggtcaggtctgctgaacagccatccccatcctcggctaactttcattctcaatcctgtttcaacctcacgcactcacttggtttgaatcaaaccaagagggatgaaagaagagccccgtgctggactcacttctccaagtggtcccctgtatgaagtggggaagggggaccagcgtgcgaggttaccgccatacctgagtcaggcgctattagatgactttaaaaaggtttaacagaacctttgaacctcaaacacaatatatctctgggggtaagaaaacctttttactcgcacactacaaaggcagtgttgtttttccagcacaaatgctgcacgactgctgaaatactgctcctgcgaagacacgacggatgacctcagaaatgggtgtgggggtgtgctgagtgggagagactgctattagtacacacagcacccacacacctgcttcatgagtgggtttatcagcctccaaaatgctgactaggactgggaggaaagataaactataagagtttggcttaaaaaaaaaatgtggctttctgttacctggtgtactatgtggcctaatgacatttagcgactgaaatgtaccagttcaaccaaggattgctaaaaagatcaatccgttctcactagaaagcacagctgaaagtaacaggatgcacagaagaaagccatgttttcgactgacattaaacagcaacaacggccctaaaacagaaaagagaactgagtgaactgtcaaattttacaaaagtccccaaatgtggttgctcaacagcacatgactgcagactctgggtgccatagtgtatcttttctctacaaagtaaatcactgagaaaggggtcatatgattcttcgcaggcagaaagatgcactttcccaaggaaagttcatcattaaatatattatttaagactggatcatcttcgggctatttttaatcctatcattttgctgccaaaattggccttaagcagctaatggtcaaccactagaaaacgatgttttctcatgtattttgtacactggcctgagaacggtcttgctttccagttaagcaactgtttgagtggatgtggactgtgtacagaaaagagaaactgcttgctgaccaactaataaaaaggaagctaagcctactggatgcggagaagtaagttcctgtcttcctaaaccacagagaccaaagcatgagcgcacagaaagggtcgccccaccgtctcagcagaaggagccaatcgcccactaaagcaccttttccttgcagctttcagacgtctcccgctctcctaagacatgaagcaaaatgctgtcacgcttctcagttcagagcgcaccgttcaccatcaacttgcctacatctcaaccctgtgcttgcaaaagccaccttggccgtgaagtggtcccagggcccctaaactcatctacagaaatttgaactgagtgacaaggggataaagcaatgctgactacagccattaagagttaagtttcctgtctaaccggaggggaaagctatctcactttaacggggccgccagtgccaactcgtctcgtgctcagctgcttcagtcatgtccagctctcttcaaccctacggacccgccaggactggagtgggtcgccatgccctcctccaggggctctctctgactcagggacggaaccctcgtctcctgcactgcaggcagattctttaccgctgagccaccgaggaaggcccgcagattgtagagttaccacgggaaacatccttgagaggtcagagcttgtgatcattctgctcctgtctctacagcattccagcctctctcctccaaagctcagaccgctctagcagatacctgggatgtgcctggcattctaggtaacaccacggagcccaggaggccactggaagggcacgctgcaggacccctcccggactctcatctttcctaaaagacgtcatgggaatcagtggtcggtgatggtagccggcacctctaacccccctgtgcaccccaacacctgcagatgtgcgacccacaggctctgactcagaggctctgggtgggacctgaggcgctgctcctccaagatgcccccaggggacgtccgcgagctcccacacgtggagaggcaggtctcagacgcttcctagaaccactgccgtctcgccgctctgctaccctgcctccctctggaagctttattcagactcagggataaagccccaggccactccacagcccgtttcttcctcagtgtttgtgtgacgtgtggacttctgagaccgtctctcagacactgaccatccaaggccctgctttctgccgcttacggagcacggaatgcaaaccgttctccctcagcctcagaagcagcagcagcaaagaaccagtgcgacttcgagtctaaaggcccatcagaacaggtgcagcagatgggctgacccgctgagtcctgtgagcaggcaagttactgcccagcgctgagagaatgtgccagctctcctctgagacttgtccatcctcaccgggtccttcacgccgcaccatgacacgtattatgagagaagcaactctgactggtgcaaattgggaggaaaatctgtctggatgccaaatgctcaaaatgaaaatttaggttcataatgcatctttggaaaggacatgtaaatcagtctcccaaatacacttctcaaacaatactaccttttttattattccaaggtgtccatttatgatggcatttcctcacacttttttctgccaaaggcctttgtcttcctatttggtcatccatctctatgttgtcctgaatgctacacgtttcaccatcagcagtttgtgcttctatatgatttatttttactataagaggttttgtcaagaacaagtttatcatgctctatggcacgtcattgtggtttggcatcatagaatgtagcctctacatttaccaacctcagatacctgttgaccacaaagataggctctactaagaaaattctattttgaaaggaggaaagagcgggccttcacttaaaaagaaaattcagttgtatgagatgttaaggtaccacaactttacaacaaagatcaagataacatcttaatttctatcacaaacatatgtctccatttcccatctttttattgcattacttgacacatgacagttaccaccttggctttctttcaactggaaagaaaattttttttatattttttcacaaaagttatgtaatagtcaaactgttcagttacttttactttggtctcaaaatgatccttttggtgtctggaagtccctacctgtttggttatagtggttacaaacaaaaccacctacttaatcaaacatttaacaaaaatattccttacacctacagaactcttccagagttactaaagatctgataatatgggatctcaaagaaacaaacaattcacaaaaagcattgattaataaattttagggattaaatgcggattttcacttttaaacgctatacagtggcgtcagggctctgtcagctttggtcacgcagggtccggtgtccagtcagtcatctactttccttggacttttctcttttcagcccctcatacgtgcacactttgtaaaatatgtaatgtgcttcttgaaatcgaacccacgtggagtgccttctaaggattttgctcctgttaggtcctataagatagaaacagcagtaatcctcctggagactgtaagaggaaccactgaatggcaccctttttcaaagacagctcctcagattaaaacaaaaagtctgcagaaaacttgaaccagagttattcctctttcactttttcacaaattaatcatttcagatatgaagtatagatgtcaatgacacttcttcagtcgtacgagctgtactcctcccccaaagaatcacgctcacaaaaagagctttatggtgacatgtcggaggctctgtctagcacaacagtaccaggaaaaaaaaaaaaaacagctcacagatgttcttcaaaaatacaagcatcaatcacttcaactaaagtcacagcatgagaatccacagctaagaatcaattcttctatctttatatagatactctggatgcaagtttgcccagcagaggatcccaccaaacgacgcgcattgtaggttagggtggaaaataaaatagactaacaattccaataaacttctaaatcatacacaagttatagaaatagaacacaaggtaggcggccaatgcgaaatctgtcagtggtgaaacaaacacccatagcccagggttcttcaagatacaaggtcatgcccactacgaacgtggcacaaattggaggtcagtgtcaccggactctggaggtcaacttgaccttttcacaaccatccaagttttctagggaaaggggctacactggttttcctctttggggagattttaccaagtgagtcagagaaggcaggcccctgggcctctagaggagtctgctcttctaaatcctgtggttttcaaactttaggacaaagcagaaccccccaggggagcttatttctgatgcagacagtcaggactcagcctggcatccagtttatgagttgtccctgaaatgctcgttttcaataagctactccaccaggtaccatgatcatggggatccctggactcccagtttcagaaaccttgaagggatgctctttatccccaaattctactgagcagcaaaggctggatctttggacctcagtggctggcgcaagggaagcaatgtctccggggaaggagtgatcgcggtagggctggcagggagagctctctgcaagggaagagaaagggagaccacacacctggctttactccgctggcctgcccttgaccctgggcccagccacaccccgccactcggactgcactgggacccgacccgaggcgtccggctcaggctcacacccagacgagcacctacccagcctccgttgtcctggatccaggtgtgcaggtgccggttcaggtactcggtcatccacagggcgatgctgtccaccagcggcgacatctcccggttgacgctctccacacacatgacccctccgaactcaaagaaggccacgatgcgcccccagttcaccccgtccctgaagagctcctccaccaccgtggcgaagcgtcccctcgcggtgaagggcgtcaggtgcagctggctggacatctcggcgaagtcgcggcggtagcgccgagagaagtcatcgccggcctggcgcagggtcaggtggaccacaggtggcaccgggctgggcgcaggcccggcggcggcggcggcggcggcggccgggggcggcggcggggaggtcctggagggcgcgggcgtgcggcccggctgggaggacaggatgcccggcgcgggggcggccccggcatcccactcgtagccccgctgcgacagcttgtagtggatgaacttgagcacgatctctcggttatcgtagcctgttccccccgcgtgcgccatccttccgccgcggaagggcagccgggcccccacagcacctctcgccccccgctgcccgccccacggccccgcaaatggggtgaagagttacaatccagctatttcattggatgtgctttgcattcctggatgagggggtgtcttcagtcacgcggaacacttgattccggtgtttccctcttggcaggagatgctggaaatttttatttaaatccctttcggatctttatttcatgaggcacattgctaattactgttcgtatcagtctacctcctccgtgatgctgaaaggttagaaaactaatcagtcaaaatcaggtgcgttcccctctgtacgctgcttgaaagcggggcacacactgcaagttacacgctgagaagactgtatcacactgcctggaaattaaacttactccaatgcactgaaagtgaaaatcgcaaaggctcccactgacagttacattaagccaatttcctgtgcgaagaacttacttgtattt

SEQ ID NO: 52 - DNA, 9276 bp, Hippotragus equinus
  source 1..9276: mol_type = genomic DNA
ctttaccaactgagctatcagggaaacagaagagagagtattttggctcaggtataacggcctgaaggtttcccagagcctggatgagactatcttcaaaagcatggatttcctgaacagtctttcagcgactaacaccggccagagtgaggattctctggggaggggctaacttgtctctaccacttatagtctgcaggctacactgggccatccgaggtcgtgggtcttactaggctagctatacttccagggagtggccgcgggattgagtgcatccttcgttccagatgtgggaccctttgcagcgcattgactcaagaagactattttagctttaaatttggcttagtgcttacgcttggttactattcattacttgagacataacagcccacaaacgcagaacctcagggcattgaacccagggcggggagggcggggcacgcccagcgcgcatgcgcagcacctcaccaccggaagcagcgccggggcagggcatggcggcggcggcggcggcgacggcggccgagggtgtccccgcgatccaccgcgaggagccagttcgaggtatgcggagtggacggggatgaagtgtccggtggggaggcctgagtctccgggtacgggcccgagatgccggggctcacctggcgggagcgggcagatcggaggggcgcgcctgtgtgcgcgcgtgtttgtcctgtcagggcaactgagaaagagtggccccgaggtcaagtgtgggctgaggccggtgcaagggagcagaggcatgaggcagaggcgggtgaggcaggaacgaagcgagggactgggaattccggctctgagagtgcagcggacttgagggaatgaggtcaggtggaggggtgtgcggagaagctgccgtgtctggattaggaccggggcagggcggggcacttactcattctccttcaattcagatgatgtcgctgtggagactgctgaggaagcaaaggagcctgctgaggctgacataaatgagctctgccgggacatgttctccaaaatggcaacttacctgactggggagctgacgggtgaggcgcggtccggatggatgcgggtagggccgggccccacccgctggagtggtttggcgtttggcaccggcagacccgtgaggtgctttagcagcgtcagtgtgcggctccctccctaaccccataaacctaaaaacatgcctgttggaagtttggggaggttaagaaagtgtaggaaagcagtccctccctcccctggagaaattcaggaactcctttcagaaacccaggataaacagccaggtcctactatgtagcacagagaactatatttaatgtcctatgataaaccataatggaaaagaatgtaaggaaaaaagaatatgtgtgtgtgtgtatatttatatatatgtatatatggctgagtcactttgctgtacagcagtaattacagcattgtaaatcaactgtacttcaaaaaaaaaaataaaagtttggtgcagaaacacgtaagaatacttaatacaaccctgcaggtctccatagggtagactgagcctgagaaaacgaaaacgaattcatcacgaagtgcttccttgggggaagtgtattttgaaaggggttgtaaagaatataagaattcagcggcggacaagtgggaaatgactagtgagtgagatggtataagcaagctgtttgtttggctaaagagatgtacttattaggttaaagggaaatggggagtgatcagcaaaatgtggggtctattaggttggtctgaggatttgatgacccactttttgagacatgattaattttttggtccggtgtgtatttcccagtgaagcatgacccatgtgtggaggaagatccaaaaaatgaagtccaggtcaagtgtagtttttcataagagtttgttatattgtttcacttccccaggaagttgctgtgagctaaatttgtgaaccagaatgtatgagaaaatgcttgatgtagaataggaggggttgtgagtctccaacagcctatttatttgtttgcttatttttgagcaagagaaaccaagcaacaaaatctagattttattttagtttatttttggcttttctttaaaaattccaaagacttggcagtgctcccattcttgcaaggctctaattgaccagagttgggcattgtctccttaaaatggaccagcatggtgcagtttgtccccactattccctgttttctcccttttaccgagacccgatgtcagttgccatttattactcttcttatattgttttttagtagtggtacagaaatggttttctgtaccaatgtctatcaaaattgataaagtaatgatagactaagactaagaagatcatactgttccaagaaatgagagtgtatttctttgtagaagtgaataatcttgtgtttaatatgcaaacacctggcttgcttcactcatttacataatattgctggctcctgggtatttgagtgtgtcactgttatttgaaagagacaagtctgatagcagtgagagtgtggatatggaggagagatggaataacaacatttcagatgaaaagatatggtctgtgacagagtgatgataaaaggagtggagagaggagcatggacccaagatcattacggaagtggaagacttgttgaagtggatattgacggatgggagcagctaaagacacatctgaggttttaagccaatggtgctgtcagccaaaataggcaagttggaaagaggaaccatgtttagtgtgaaaataatattttcagcttgggctttgctgattttaggtattactgggatactcgggtgactgttaccaagacattcaggtgacttgaatatgtgagtccagagctcagagtgatcagagcaggagaaacagatttgggagtcacctgcctagtagtgtgagtttaggacgtgtaggaagaggttgccaaggaagaccttagaggcagataagaagacctggactgaaatctcagggaatgcctgtattgggcaattagtttttattaacaggacttaaagtacctagatttacaaatgattattataaaattaatttaaagtggattataatttccctatgattgtcattcttatctatacagatacttttttgagtttgaaactcaaaaactctgggagtgccataggaatttgccacctatgtaaacatcagccatgagtcacagctgaggaggagctgagacctgatagttaagggggttggatgagaagagatctggcatagacactcaaaaagagcagttagattagaaaatgctatagcagccaaggaaaggagcagttcatggagagagggagagcagtaatgtcagatactatggagaggcccaggaggataataacttagaaaaggccaaggatttggtaattaggagagcactgacaaccttggagcatgtgatttctctgggtgttgggaacagagaccagacaggaacggtttataccagagagtggtggtgaggaggaagcagtgagtgtaagttactctttcaaaagggttaacagggaagctcctttgctttactgagcaaacaacgtaggtgtagaatagagggagtgcttttgggctggaggaaattggaatatagatagagaggaagatgccaggatggagagagaatttggaaaggcaagggaaaggagatggttgaagagaagctctgaagaggtagaaggattgggatcaggcacacaggagtagaaggagctgtgttggcaagaataggaacacttctgcctcttgagaatatattaaggtacagagaagtgtagaagtgaggcagaaagattgaggcagtttatgtaagtgggcttgactttcgggaaagttggagtaaaggccatttgctttgagtagggatggggaagggaaccaacaatgtgagaagcaggcaaatagtttggaagagtcagtgcctaaaatggaatacagaatcacaagtagtaaatgagttactaagaagcgttgaggtcctagttgactttatatatatttcgatatatatatgtatcttttccccatctcttctacatttatttgcaaagctgttttttttttcttattttattttcaattgatggtaattgctttactatattgtgttagcttctgccatacaacagtgtgaatcagctctattcatatgttctgtccctcttgaaccttcccctctcccctcacccccaggttgtcacagagcactgggttgaagttccctgggttatagcaacgtcccactagctatctgttttacgtatggtaatgtatatatctcagtgctgctctctcaatttgtcccacatctccttcccccatgggtccacaagtctgttttctgtgtctctattcctggcctacaaataggttcatcagtatgatttttctagattccatatgtatgtgttaataaacactatatgtttttctctttctgacttaacttcactctgtataacaggctctagattcatctatctcaataggactgactcaagctcattcctttttatggctgagtaatattccattatatatatatgtaccacaacttctttatcccttcatctgtcagtggacatctaagttgcttccatttcttggctattgtaaagagtgttgtaatgtacattagggtcagttcagttcagttcagttgctcagtcgtgtctgactctttgcagccccatgaattacagcacgccaggcctccctgtccatcaccaactcccagagttcaccgaaactcatgtccatcgagtcggtgatgccatccagccatctcatcctctgtcgtccccttctcctcctgcccccaatccctcccagcatcagggtcttttcaaacgagtcagctctttgcattaggtggccaaagtgtctttttgaattatgcttttctcagggtatatgcccagtagtgggattgctgggtcatatggtagttttattctttgttttttaaggaatctcaatactgttctccatagtggcagtatcaagttacattcccaccaacagtgcaagggggttcccttttctccacatcctctgcagcatttattgtttgtagagttttttagaaattctttccttatttcgctttggccgtgctgtcttccctgctgcacgggctcctctctagttgtggtgagcggcctgctctcttgttgcagcgcacgggcccttctctagttgtggcgagcggcgctgctctcttgttgcagcgcacgggctcctctctagttgtggcgagcggcgctgctctcttgttgcagcgcacgggctcctctttgctgtggagcctgggctctagggcactcgggcgtcagtagttgcagcatacgggctcagagttggggctcacgggcgcagttgttctgcagcatgtaggatcttcctggttcagccattgaacccctttctcttgtattgacaggtggattctttaccactgaaccaccaagggagccccatttgtagatttttttttttttgatgatggccattttgagcagtgttgaggtgataacctcactgtagttttgatttgcatttctctagtaatgagcaatgttgagcttttttttcacatgtttattagccatctatatgtatctgtatttatggtgcaatctgcccagttatatgatgtcatattagggagaccaagactgcttcacctccctttttctggtacatgagtttatcttttccctttctaactatgatcctaaagcttctggattttatttggtttaaatagtttgccagttgttgcctgaattcctacttagacatttagaatacatatgtgtgtgcacaagttgtttcactcgtatcctactctttgcgacgctatggactgtagccctccaggcttctctgtccatgggattctccaggcaagaatactggagtgaattgccacgccctgcttcaggtgatcttcccgacccagggagcaaacccacggctgctgcagctcctgcactgcaggcagattctttactgctgggccaccagggaagccctggagtacataggctgagtataaatgtcatagatcagaagtggcctgcttctttgacattccctagatcctgccttgaactgccatttggtcattaattccacattctagtcatctacacagatcttaaaggtatcacatcttctgtgtttgttttaaagccaccagtgaagactataagctcctggaaaatatgaataaactaaccagcctgaagtatcttgaaatgaaagatattgctataaacattagtagaaacttaaaggatttaaaccagaagtgtaagtaataattttacaattaaacgtgtttgtttgtacttaatgttcttttgtgcttggggcagtggagaagggaagggagcatggtctctgtcctcaggtagctaattttctaaaagtgaattacaaagttaaagtgaactttttccactctgaggattagtgtgctttggtggtatggttatttctgcttctgaatcttgatttgattcatttatttccggaaaaatgaggcagagggaaagtggccagattctagtgaattaacttaacaatggaatccataaaggactactttataaacagaaaaccataacatatataatcataaaatgctgctttagttggcagaatatattttcctgttgacttatatttgtgttccctgtctatagggccctccttcttggtctgagagtacctaagaaactgagtcagtaatggaaagattgcttgaggagcaaggaatttaagagaggaaaactagtagatgagaaggatttaactttgtttaggtcaccagtcatacctgatcagctagctactgtcttctaaggcatgtgccctgccagtgatcagaatcatgtcactccacctactctgtcttaggcagagctgaagagacactagcatggttactttccacctttttctgcattccttgctgatgctgtataaaccctggtttgtctttgtttttaaagatgctggactgcagccttatctggatcagatcaacgtaattgaggagcaagtagcagctcttgagcaggcagcctacaagttggatgcatattcaaaaaaactgggtaaccattttttttgttttgatttgataagagcaccctcctgccagtatgaccttatatgatagttaacatttatggtatgcctacagtgatctattttaatctcacaaaacctctggagagtaactaacttttatgactagtagtaataaaataacatttcctgagtgcttaataatatatcaggcactgttcttaatattttgtgcctattattttttttatcctttaatatctgaggtaagtacatgatttttagccccattctattgaagaggaagctgtggttgaaggagttataactggcagagttgcacagtgaaagtgattaaggacacagttagtatatagaagagctgcattccaaagtatgattgatttcaaagctcaagcttttaattgtggttcagcaggctgaagcatctttaataatgtagatacacatctcagaaacagagtaggcagtccaatcaaggctttcttaaggggttacttttcctttaaggaagaaactggtactagtgttgatgccttgctacctgactctggctcttatatccatgattaaaaataacaaagttgaggtctacaacaacacagttgattttaccctagatataatttacatgttatttttaatcactgacaactgttgactacttcaagcgattgatttatagcagactgagatttgacatgggtggtagttaacgtccacagttaaatttactaaatggtgactgtgaactttagaaagcattgtgccagatgctttcagggttttaaagaaagagggaatctataacattaaggggtttacttgatggtcttttaaattccggtacctttcaaaattgttttcctagtgtgtatgagggataggaataagaaaaggagaaacgtacttgagatttcagtctggctctcagagggtgcctgggacagagcctggaggggcaagtgcttcctaggcttttctaaggctcctggtggctcaagtgctaataggtttgcttagccctggtagagtgtctgagcaggtgctgttgacagggctagaatgtagggaactcatgttagattcttggttatgtgtgtggatattttgtggatatttgactccttaagttgtgcacactggttatatttggacagatatccaaatatctgtccgtagctaatatgatagttagcatatggtgtacccgtaatttggatacagtttggatagctacaaggaccgaagttaatagatatttttttaatgtagtagacatttttgaatttgcctggaaatgctaactaaagagtatctttgtaagagctgattttgttttttatgttttaatttttggccacatcgcacgggcatgtgggatcttagttccccaaccagggatccaacctgcgccctctgcattgggaagtgaaatcttaatcactggaccacggggggagtcttttttatttttttctttctttctccctctctctcttttttttataagagccaattttaaaagatataactcttcctctccctctccccactgcagaagccaagtacaagaagctggagaagcgatgaaaaactactgtggggacaaagtcttttttaatgtgggaaaaatgttttataagacctgaatcttgaggttgatgaattgtcaaaactcctcaaaaggcacctatgctggtcgtcccagaaacatcgcaacattggagtaaactggagaactgtggctatccctggaggaacttcttttgaggcagaatcctcagaaactcaacacttataactccttaccttttacttgaatgcttcatcatccattcaggacaaagagtttctcaaagttcagataaacctgggcctgccagtagaatcaaatgagaggacctcttttccctggtagcagttgattactatattattttcttaaatggttggtttttgagttactgtgtaaaaggtggtttttttctatcaaggatgtaatgtattgctaacaagattctaaattaaaaaaggaaaacaaaacagtcttgttcttgtcagtttattaccttgtgaatgtcactaattta

SEQ ID NO: 53 - DNA, 4362 bp, Hippotragus equinus
  source 1..4362: mol_type = genomic DNA
ctgagtcacctgggaagcccattgttggtagaaattccctactaaaaggttaagctttgtgaggacaaggaaacaagtgcctggggaacagtaagtgctcagtttgttgaatgaatgtctcaccgagtcttaggtgctgttatgatcccattttacaagggagtacactgaggcacgcagatcgaatcactggctttcacacccagggtgagtggcgcaggcgggatttaacccgggcagtaagtcctcaatatataccaagcaatcgtaattactaccctcttactctgtgtcaggttttgagctaggagcttgtccccgagctgtctcgcacagttctaggagtaacccgcgaggccggccctgtccggactcggctttgcagaggcggaagcccgcagtggaggtctccccgcgatcaggggctgggcgggtattcggcccgggccgctgccgcgccctccgcgcctcccgggggcctcgactggctttccagccgcggcccgtggctcctccctaccaggacccggcgctcaccccggggccggggtctggatcttgagcccacagctccgctaccatctcggtgtgcagaaactcgaacagtaccgggtccgccatgagcgggtcagtcgcctaacaaccgctcagtgtctcgtgttctcattggcccagttgggcaagccccgcctcctgcttcttaagtgcggcccacccactcctgcttccattggtgtttcaggctagccccgccttcctttcctgggctctcgtggtgcgcgcgtgaacccgggagtctagggggagggcctgctttgtctgtaacggccgcacgtgacaagcacctctgcccttcctgctgtttcttcaccgtttccgggtctgcgagcgtttccattggtcgagtcgctggttacacgtgacagctcttcttttagactctctatttgtccactcttctcgcagcacaacccggaagcgccagcccaaccgctttcctattggccgtgcccttattcacgtggctctttacagaagccccaacatctggtccggaggccttacttcctggttggtagctgggcggcccaggtgataggccgccgacacccgcccaactttctccgctattggttggggctgccgcgctcctcggtaaagacgccgcacttcggataggtagaggatcccgcaggctcggagctctggtgacccggtacggtcttcggtgataacgctcgcctccccctgcgccttgtgcatcctcccccgagtccatttggactgttaccctttctgtggtggagtccctgattcccgagcggctcagaaacccgtgtgcttccgaatccgtcacaggctaagagatcagcgtggagggtgtggcctctgctaggaagctaaatcgggaagagtttaggattccgggacctcgtgtctcagagtcttgatcgagctggtggtcctcagttttcccatcagtacactgaagaggcagaatccagtagttcctaccatcattagtttgcagaaactgaaccgcaggcaggcagtgaccccaaattgttaagatagtggaggaggtgagaatccagaaactgcggcttttaaccacggcacggcgccctcctctcatatcatcctttcccgcgtcttctccctagctcgcgccatggagtctcagagtcgtcggcggaggccgctgcggaggcctgagactttggtgcagggggaagcggccgagtcggactcggatctctctgcgtcctcgtcggaggaggaggagctgtacctgggcccctcgggcccaacgcgcggccgccccacgggactgcgagtggctggagaggctgcggagaccgactcggacccggagccggagccaaaggccgcgccgcgcgacctgcctccgctcgtggtgcagcgggagacggccggggaggcctgggcggaggaggaggccccggcgcccgcccctgtgcgctcgctgctgcagctccggctggctgagagccaggcgcggctggaccacgacgtagcggccgcggtgagcggcgtgtaccgtcgcgcgggccgtgatgtggccgccctggccggtaggctggcggctgcccaggcagcgggattagccgcagcccacagcgtgcgtctggcgaggggggacctctgcgcgctggcggagcgtctggacatcgtggccagctgccgcctgctgcccgacatccgcggtgtgccggggaccgaggctgaacaagacccggggccgagagcctagccgtgacccactgtctccactgactgtgccctgggggtaggccttgcggcctcttgacctggctctctgctctgtttagccacccacccatcttgctgtcaccctcagggataacctcgcccctggataatgatgtgtgtgtgtgtgtgtgtgtgtgtgtgttccccctgctggaccgtagctctggttcctacccccctgggcttggcctttgcttcctggttcagagcttgtgtctgaaacttgactccagctcctgggtacctatctgcccttggatctgtctccctcttaacagctcacggagcctcatctttccttgctctctgccttcctcagtttggtttctgttcacaggggctggacctgctgctttctccccacgggagccccagagtcccgctgaatgtcagttccctgatatcttcctttactcccttggctctgtctccttcttgccccacttctggaattttgtccctctgatcgggaccctttttctgctccccaggcttggcctggattccatctccgccttctggtccttgctctgccacttcttggctccttctccttgggcttagccgtaccctcttggcttgatcttgtttcctgggtccagctccacccttagttttggttctgcttctttctgcttctcccattctgtttaaactacctgcttacttctgggctccagggatcccctatgattttcttcatcaggtccaagataaggttccctcctgacccaaggaggtcccccttccagctgtccaggcccaaggtggcatctcctccaggcccaaattggtgtatccttcccaaccttctgcccaagctccaggtatgagctccaggcctcggcctgactcaccaggctgagagtgcccccagcaggcactgagggcccagtacagacttgccctggaactttatgtgcaatatgacaccactttgcagataagtgtactttgttaactatgttccttggatgctatagatgctaaactgcttggatttctgggttagctccttctgtctcctcctcctcactgctccctcttctcccagccccagcccctcagtcccattcacatgcattcccctcccccactctcttatcccaacccgagctgagatctgagctcccaggatgaagaagtgctaaggaagagcactgtatggcaaactcattaaaactcaagacatgcactgatatgatcagttcctcttatctccccatctaagctgggggtgggggtgggggcgggtcagttggcgattctactgccagtgtgagtcccaagaaagggatccttcccacctggccgactgaaagtggacctgtggctaggagattggggccccaagttttttccccctggttctgcacttccttgtgttttgttcattcaccacacatttactgagctcctgttccgcgcctgtcctgagccaagccctggggatgccccacccaggctgggccctctcagagccgacaatccactggggaagacagacatgaaaacattattgtataagtggataatcttaataattgtaatctatactttgactgtaatttttctggcattgtggttagtgccctaaagaaatgcaggagttttgtgagagtgtaactgaaatctgtcagactttgtttggaggatggtcagatggcttccgtgaggaagtgatgagtgagtttgaggtgtaaaaaaaaaaaccctgaaggtgtaaaaaaggtgaaacatggcggggtggaaaactgttgtgcgcggcatatgcaaaggccctgagtcagaagagggcgtagcctgtttaacaacagaagagggtgatacattctagtctctactggaatggggagaccaggggagttgggggtggtgaggactgtgctagcaggggccagacaaagctggagttttaaaccaagtaaaaatccttggtctttattgaacagccaacgagtagagaaagatgccatctggtaaatgtgttttgtgaaggagcctcagactggtgcttctgcagtgtggttgcctctgaaaaagacccagaaatactggtttcgaaac

SEQ ID NO: 54 - DNA, 1654 bp, Hippotragus equinus
  source 1..1654: mol_type = genomic DNA
ggttggtcataactttctccaaggagtaagcgtcttttaatttcatggctgcagtcaccatctgcagtgattttggagcccaaaaattaaagtctgacactgtttccactgtttccccaaaatttttagagatttaaaaaatcttttttaattggaggccaaaagggagtgatgctaactgatgctctacccataccgctcttcggtggagagtctttttttttttttttccccaagtttttttttttttttttttttttttaagatttctgagcctgagcacctgcgcgcagagaccgcagtgcgcgtgcacgcccgttcaacggctggaagcggagatgagtgcgcatgcgcgagcgagtgggggcggtcccctagaaagggcgggtgtacgtgcgggtacgtgctcgcgcagaggccggaagtagtgccgcgcgtgcgcaggtgcaagcgcgcgcaaagcccggaagtggggttgtctatcccggcggttacgggctatggaggacttcccgccgagttgcgggccggttggtgaggagccggccgaggaaggcgaggctcaggtggcggcctggagcggggacagcggcaatgtgtcgcagagccacagcagcgcctcggggccgtgggaggacgagggcccggagtcgggcgcgccgagccgggacccgccgctgctgcgccgcgccgccgcgggctacgcctcctgcctgctgcccggcgcgggggcgcggcccgaaatcgaggcgctggacgcgagcttggaggacctgctcaccagggtggacgagtttgtgggcatgctggacatgctgcgcggcgactcctcgcacgtagtcggcgagggcgtgcctctcatttacgccaaagccaccgagatgcggcgagtctacagcaagatcgaccggctggaggccttcgtgggcatggtcagtgccagtgtggccaggctggaggagcaggtcgccagggctgaggccgagctggggacgttccccagtacgttcaggaaattgctgcacacgattaacgtgccctcctttttccacaaggcgccctccggcaggtcccagctgaccggctacgaaacccccgtcgtctttcggacggaagaccactttccctgttgcagcgaaagacctcaggtctgagtctgccggacaccgctgcaagaggacaggtctgaaattatctcgactgttaatcagatcagttgaaattcctgttaccggacatctctgatgttggagtatggaattgtaaagtttgggttttgcacacttgattgctcactctcctcatgatttcacgtggaatgtatggttttctatgtcttccagttcaaacttgaaacacgaaagctgcttggtaggggaatcccggaagcaaaatgtatgaacttacctgcacactgtggcagaactgttatttttaggcattttacagctcaactaacagtattaccttttcaacatttgtatatttgcagtactcttaggaaaactactgagcccttaaagccttgttaattggagcctaacaacttgttgaccagagacgtattcatacgtcttttgttacccaaactattgcctggagacagttcgatattctcttatagaacagatcaacggccacagctgttaatttc

SEQ ID NO: 55 - DNA, 24166 bp, Hippotragus equinus
  source 1..24166: mol_type = genomic DNA
actctgtgtgaccccatagacggcagcccaccaggctcccctgtccctgggattctccaggcaagaacattggagtgggttgccatttccttcttctccaatgcatgaaagtgaaaaatgaaagtgaagtcgctcagtcgtgtctgactcttagcgaccccatggactgcagcccaccaggctgctccatccatgggatttcccgggcaaaagtactggagtggattgccaatgccagcgggtttagggaggaggaataagtttatctctaactttcagacagcctctgccggcagcacctgccctaaaccagcatggcggcaccggcttccttcaaggtcaggtcactgactacaccgtagtgcccttacgggaaccgcccctgggttgactcggcttcccgggcaccttttgatgacgccaaagccccgcgcagggagagcggtccgcggaggtgtgcgcaggcgcaacgcggtcgcgggtgggcggagctggtcgggatgagcggcggtgggaccgagaccccggtgggttgcgaggccgccccgggtggcggcggcagcaagaagaaggactctctggggttcgcgggctcgccggcgcacctcattatcaggggtatggcgtagcagggttctcgcctggtggtcccagcgcagccccaccgaccaggcggcgccctctgacccggggcccagccgcaggtcgagccccggcggcctcgggtttgcggcaggctggggatgggggaccctggcccgggtgcaccccttttctccgcgcctggtgcctcccagcaacggcaaaccgacccagcccctcctgcttccttgtagaagccgcctgttttgaaagtttatattaatcgctttatccttctgaaacttgcctttgtgcttgacgttttatttgtgggattttcccatgttaattaaatgttaccccactgtattcatttaaattcactgctttgtagtatccatattaagttgttccccaccccagccccgccttttcctttacttatactcgtcccgtagtaagcaatcatacattgtctctcttttgtataagaggtttttcaagcgcacatactggagcgtgaaattgctgggtgtgcatgtcttctaactttactagatgtggccaaattgctctcaaaactagcgattgaccaaccagataatccatagcctgaactggattttaatctcagcatgaaattgctgggtgtatatgccttcactttattagatattgcttaattgttctcaaaacggctttaccaatttactaaccggataatccatagtctgaactggattttaacctgtgtatgtttatggggaacaggaagagtgaaacaagctagagattgtgccacttagcatgggttgaccttgaatttcattttctctacagatcttggagaaattcattcaaggctcttagatcacagacccgttatccaaggtgaaacccgttattttgtgaaagaatttgaagtgagtatttgcaactcattttgcaaaaataccacctgatctgctagtgtgttaatacacagaggggaactctctagttttaaaatctctgatttctgttcttgtgtctataaaatatacaatgtaaaacttattaagagacattgacatgaatagagggagcacaagtgtaggtgggaggagcctcgggctccaggtctggggtctgctttggctggtttactgtctgttgagctcagttttccttcagtaagatgttgctgctgctgctaagttgcttcagtcatgtccgactctctgcgaccccatagacggcagcccaccaggctcccccttccctgggattctccaggcaagaaccctggagtgggttgccatttccttctccagtggatgaaagtgaaaagtgaaagtgaagtcgctcagtcctgtctgactctttgggaccctgtggactgtagcccaccaggctcctccttccaggcaagagtactggagtggggtgccattgccttctctgtctgtaagatgaggtatagtaaaaaaaaaaaaagagagagagaaaaaattttttaagatggatgggtcaattttccagaccccttttctgtattctttttttctcatttgaggcagcagcatctacccaaagctctcaagttaaagcatgagaatcacccctggctattccctctcctgtaggtcacactcagcgatcaagtttctagacattactgcacaaatgtatcctttctgatcggtatgcctgccctatcaacccagtcaaatctagtcttcaccctgctgcccgagtagtagttgttgagtcgctcagtcgtgtccgactctttgtgaccccatggactgtagcatgtaagtctcctctgttgtccgctctcccaaagtttgctcagattcattgagtcagtaatactatctaaccagctcatcctctgccgccctcttcttttgccttcaatctttcccagcatcagggtctttccagtgagttggctcttcgaatcaggtggccaaagtattggagcttcggcttcagctttagtccttctaatgaattttcagggttgatttcctgtaggattgacaggcgaaggaactctgccagagagtttaaaaccctcagatgtcattttctgtctatagacaaaggccagtatcctgctgcgacctggtccctgtctttctagctggaccgtctaccacccagcctcttacgttctgtcccacagtcgtgatgcaccagcctgccgtcctgttgcatttgcttgtggttttgcacatgtataattggttcactgtgcaccgcatagtaacacccctcgctcctgataggttgatggtggttaatggtgttacacaaacaattttgtgattctctgtgagtcaggattttattttcaagtgagactccaagcaggaagtgttcggtctgccaaaaggggggaaggtttccataaaccctttacaagtccagaaagcctctggtacagagcactcaggcacggacagggttgctgcactggacaccatttctgggctcagcagacgcaagagtctgcagaacacctgcttcacagtgttgttgtgaagatgaaaggtgtgtgtctcttggaatcttttctggtacctgaaggtggctgttggttttcttcgtcatcgttttgttgcaggataagaatagttacccctcacacagaaaattcactagaccctgttcccttatcctgctatgtaaagatcgttggcagttccttgctgctgctgctgctaaatcgcttcagtcttgtccgactctgtgcgaccccagggacggcaacccaccagactcccccgtccctgggattctccaggcaagaacactggagtgggttgccatttctttctccaatacatgaaagtgaaaagtgaaagtgaagtcgctcagtcgtgtctgactcttagcgaccgcatggactacagcctaccaggctcctccgtccatgggattttccaggcaagagtactggagtggggtgccgttgcctctccaggcacttccttagtgagaagaaagtctaggtacagtgtggtgggtactctgctcgaggtcttacagggtgaaaatccggggctaggccaggcgccatcgttacttggtgctcatggtcctccggatgcctgtgactgtggcgggactcacttcctcactgaggtagacgaaggtcccgtttccttgcttgctgtcagctgggagtcactcggctccgagaagccgcccaccttccttgccatatggtctcttcagagattcgggcttccctgtggctcagctggtaaagaatcccctgcagtgcgggagacctgggttcagtcccagggttgggaagatcccctggagaagggaacggctacccattccagtattccggcctggagaattccatggactgtatagtcagtccatggggtcgcaaagaattggacataactgagcgaccttcacttactcactcactcactcaaagacttaacaagtggagactccatcaggtggaatccctttcatgcttcaagtctctcttgccgagaagagcacaggccttgttaaggactcactgatgaagtcaggtctccttggaatcatctcccttaaagtcagctgatgtgagactttaagtaaaccatagagtagcttcacagcaggacctccattagggtttgactgaataactgacaggtgtctgtgggctttccgtgtggtgcagctgtaaggaatctgcctgccgatgcagaagacaggggtttgaccctgggtcacagaggtcccctggagtgagaaatggcaaccctctccagcattcttaccaggagaatcccatggacggaggagcctggcgggccacagtccctgggggtctcagagtccagcaggactgagcagtgttgctgttgcccagttgctcagtcgtgtccagttctttgcaaccccatagactgcagcacatcctcttctcccgcctttaatctttcccagcatcagggtcttttctaatgagtcagctcttcacatcagggggccaaagcattggagcttctgcttcagcatcaggccttccagtctttcctttaggatggactggttgcagtccaagggactctcaagagtcttctccagccccacagttcaaaatcatcaattcagctttctttatggtccaactctcatatccatacatgactatgggagaaccatagctttgactagacagacccttgtcagcaaagtaatgtctctgcttgttaatatgctatctaggttggtcatagcttttcttccgaggagcaagcgtcttttaatttcatggctgcagtcaccatcttcagtgattttggaacccaagaaaataaagtctgtctctgtttccattgtttcctcatctatttgccatgaagtgatgggaccaaatgccaggatgttagttttctgaatgttgagttttaagccaactttttcactcttctctttcactttcatcaagaggctctttagtgcctctttgctttctgccataagggtggtttcatctgcacatttgaggttactgacctgcatacacatttctcaggaggcaggtaaggtgatctggtactcccatctctaagaattttccagtttgttgtgaatcgcacagtcagaggctttggcatagtcagtgaagcagatgtttttctggaactctgttgctttctctatgaaccagtggatgttggcaattggatctctggttcctctgccttttctaaatccagcttgaacctctggaagttctcagttctcgtcctgttgacgcctcttagagcacagcacaggctgtatctggaggtgggggtctcagggaccaccttagacttctccctcccataagctcttattactacctatgttttccttactctctgcttgtttattgcccattgcccttcacgagaatgcagacagttaaccgttcttacgctttgttgtatccaagtgcctgaaagagtgtctggtgtgttgaaggtacctagtatgatccaggggagcaggtggcagagcttggactgaaacttggcttttccagcatgcactggtttttccatacgtcatctttctccctgctgcaccaggccgactaatttgaaatactaaatagttttttttttttttaaagtttgtaaatgtgtctctaaagacctgtgtgtgtgtgcgtgcgctcagttgtgtccaagtctttgcgaccacgtggactgcagcccaccaggcccctctgtccaaatcccaggcaagaatgctggagtgggttgcttcccttatccaggggatattcccgacccagggatcaaacccacgtctctgatgtcacttgcattgggaggtggattctttaccgctagcaccacctgggaaggagattgtttattaaagaagaaaaatttcacactggatatggtagatgtaagcttgatgtagaaggtccaacacagcgtcttgagcactttgcgggagacctcgagttaggaaccagcgctgtatccatgggtgagacagacccaggcccctcttcaggcagctgggctgagtcctgtcctcacggtagaatagtctctgaagggctcagagcatttcgtcaccgttctggcgctctctgcagctgcctgtcgcatcactcgtcttcatgaaaggtccctgatgctggcctctcccacagtcacctctggggcggtctttctgggagttcagtggaaattcctctacattgggctcagctggcttttctgttacactctaacctttccccctcaaattgtgagggagacgctgagagtgttttagagatttagagttgagtagatatgtgcactatttacagctcttttcttggcccaaataataccctcctctacttaatgaaagtgatcttccctgagtcacacagctgggccggtaggaagggtgaggagcactgtcagggcttcctggaagtttcccatcttttttattttaatttattgaaatacagttattaacagtgtttcaggtacacagcaaagggattgagttatgcacacacacattatttttcagattcttttccattaccgattattacatgacgttgaacatggttccttgagtttcgtcttctctagaccgtttaaatgtggttcacttgaagcaaacctttcacgtttaaagggaagcttgtttgtagtttttatatttttaaaagttaatgcacccggcaacaatgatctttttcttgataaaattttgtctccgaaagaaaggagtaagtgccacacggtggcagcgttgcttcagttatcggcatcctgctataatactgtagaccctctttttgtgtttgctagtgtttcaggacccttgactgtcttgctcctgactttgcacagcgcttttcttcccccgattgcagtcagtgctgtgaacagagatcccggcggggcccctcgggtgtgcatccgcctggtggtctcagcgagtaaggaggtgccggacctctgagaggggaggcccgcgcgggtcacagttcatgacctgcggtcctgcgccagctgcttgcttcattttcagcaagtttcattctctgttttattcaagagtttccgactatacccgactgtgtctgaaggaaggtatttggttcctagggacagactcctgaagagagtagctctcctttcctcccacagcagccagagccccacgacctcagcctttcctccagcagggttgctcacgtcctcttgctcacagggtggcttctggaggcctggtatcacctgtgtgtttcctgcagcagaagggaaggcaagtgggaaccggctagtggtatctgttctacaggcacctttaccaccaaatgcttcccaggtggctcagtggtaaggaatccacttgctaacataggagatgcaagaaacacaggttggatccctgggtgggagagattccctggaggaggaaatggcaacccactgcagtggtcttgcctggaaagttccagggcgagaggagcctggtgggttacagtccttgaggtcgcaaagagttcaacacgaccgagcaggcacaccgccaccgcagtgactccaggaatgcttggtgatcaccaccaaatggtatttgggtgttcagagggagagagacaagggaacggatccagaactgtctgcctcagcagatacgcaaaaaccaaataagaaacggtctctacctccagggatttaccagctgcagagagcagattgtgatgatgagattataatgataaaatcagcacagtgattgagatctcatgagggaaccactctcaactgagttgggagggaacttttcagaagaggggctgatgtttgacctgagaaagaaacatagatgttagagaaatacagaaaaagtggaggcaatgtggattaaatttgagggaggaaaaaaagattgttcagatagatgcagtaatgggaagagttgggaaggttcatgttgatgcatttgaatgttgatttattaaagagaaaatcccttgaaaggcaggacaaagtaaaatttcacttgacatctgatctctcattttggttaggttgtaaaagtatctcagattattaaataaaaggaaaaagtctatcccccatatgacatgtaataaatttatatatatatacagtatggttttaggacttgtgggactactatttgaaggaaagaaaaatttaaatattacatcagtctcatttcctctctgatactattacatctttaatgtaaaaatataataactgtactaatagtctgaataactgctaacatttttaagtgttttgtgccaagtactgtcttaagcacattatatgagcacttgttatcagtttcaatttgagaaaagttcaccagatctgtaattttatggggtgttatacatcagaaagcaagcttcattctttcattctctcttaacttctgtatgagtttaaaattagagtaaaatatcttgccccagctgttccataagatggttcaaaacaaaacctctagtaactactataccattatttcctcataattgcatttaccacacttcattttcagtgacctttttgcattgtattattttaagatttacaataaactcactaatacagcacagagtgctcgtgtacccctcgcccactttctcccattattaatcttgtacattaattactgtgccacatcggtaaaaactaagaaactgacaccagaacatgactgctaatgaaacaccagactttgcgcgcatttcaccagttttccattacagcgctcttcctgtcccgggacctaatccagggcagcacactgcttttaatcgtcatgtctctctagtccgctttggtctgtgacaattttttgggctttccttgtttctcttgatcttgacagtcttgagttctggccagtatcctgtagagtgtggccccgtctgggtctgtctgatgttttccttaggattagacggggctgacacactctgggaaggcgtcccagcgagggagcacgtccctctggtcacgtcatctcgggaggtgcatgccgtcgtcatgacgtcactcacgaggtcacctttgttggctccaccctgaagtccatgtttttctcattcccagctttattctctggaagcgagtcactcagtagagcccacccaagcgggagggtgggttaagctcagctttctgaagctggggctgggctccgggtcccaggaccacccccaagtgcatcagttcaccagcactaatcagcaggccggtgcccgaggtttatcgtggctgaaggaggcagagcagactcgcaaagggaacaggtgcctggggaggcgtctagaggaagccacgcagaagctttcaagggtgtctcacccggcggagtcatacgaggcacgcttcactcccccaggagggggttgtgacaacgtgtgatgtgttgtcttccagggaagctcatctgagcctgggggtccagggttcttactggggaccagacaagcagacagcctctgcctggcacatatcaaagttctggactcctggaaggagggacgtgtcttgtcattcacgggaagtgttacctgcttgggggctgttggctggtcaagttcccagtccccacaaaggccagccatgcaggcaggccttcgtaaggtggtctcaggccctgagtgataactctcgtctacacagggaagaacccacatgttactaccttctccacacacttttgagtgaagtggaatcagagcataataatagaagctttatgataataagaacaaccaaatgtaatttaaaatctgatcatttctttgccgcagatgaaatgcatggaatctaggtctcattcttttagtgtttcttatgcccatttttaaacattggtatgaaaatatgactcatatttgcaacttttgaagcatttcataattaaaaaaaaaaatacctccaggttgtgacctcagtcatcgccaaataattagaagaaggctgtatgaatttcagtaataagtagtaacatagcaaccagaacttgggtggaagtctcagaaagtaattgctaagatttaaggcacaatacttttcttttaaaaggaaaaacgtggtcttcgagaaatgcgagttcttgaaaatctgaagaatatgatccatgagacaaatgaacatactcttccgacatgtagagcaacaatgcgagacagcttaaaccaagttctccagagatgtaagccagcgttttttttttttatattgctttatttcataacgcacgctctgcccaaacggatttcccgggggtgtttggtgggaggtggagacgagagagggaagccgcccagtttcagaagtcaggtgatcagtgtgtgtcgcccttgatgttcagagcaccaacctccccagcaaggtgggtgtgcaagatttcccttccaggatgtaagaaaattgaaacctttttttaccttaaaaaatgtatctgcaagaaaatgtctgatggccaggaattaaggtatgcaatgaagcttcattgccaagcaggacaccagagtttttaacttaaaaaaaaaagtcctgtcgtaaatgtttgtgttttatcactttttgcgttaagccaaatgttttaatgtggaaagatgtttgctaaaaagaatatttttaaaacatatcaaattacaaaatcaaaggagttttatgagtaactgagtttaaaattagaggtgttagaagaaactcggggcttcccctcaaacccacattgatgctgttcagtttgtccaaggacagagggtgctggcaagtaatgaggggcggaagacgaggcagcgtctttctcggggagaaggaaagcaccaggactttcccggtggcccagtggctgagactccgagctcccattgcaggggagctattaatagatcccacacaccgcaaccaagagttcgcatgccacagctgagacctggtgcagccaaatagacaagttttttttttgttgttttgttttgttttaaagaaagcaaaggctggtgacgtagtagcctgtgaggggaaaggtgggagggtttggttaatgaccgagttacatgagggtgtgtgtgcaagtccgggtggtctgcgccctcggatgctcagaggacaggcgacatgtggtctctctgagcggaagagggaagagtctaaacctgatcccgggctttacatgtcgctgcagacatgcccttgctccttcactatgaatggatttttcagtccgtttaattcctgggtcattgctgtttctgatgggaagcctcatgttaaaagcatagtcttgggacttccctagtggcccagtggttaagactgtctgccagtgcaggggacacaggttcggtccctggcccacgatccctggatccatggggcagctccgttcctgcgttgcagctgctgagcctgcacacgccagcgtccgtgctccacaccaaaaggagctatcacaatggaggcctgcacaccacaactagagagcagcccccactcgctgcagctggagaaagcccacgtgcatcagtgaagatccagcatagccaaaaataaattaaatttttttttgaagcatagtcttcacaatgaaatagcaaagtttttagaggtcacagggaatccagacagtaaatgtgtttttctaaaaggaagaattaaaacgtgaggcaataatgaaagttttagcattagaaacgcacaacggccttggggtactgctgctgctagaaacaggaatggcttccccagtaggctccagcctaaagatggccttgtatctcttatcacgaacgtcacaggtataatggaggtaatcgtttgcttttagagccagcatagttttttttaaaaataggcctgggcccagctgctgttcctggggaatttcatgtttgaaaagttgacattttaagccgcaatgctggcttgtgtttatctatgggatacactctcatctaagtaaattaaagttaagctacaaggttagtgacggtggagttttgtcttgtgcctgtcaggcctgtcttagctctgcacatctgagagctgagttgggcatgcggtcagctgagactcccaaaacttggtgtgcggatcttcagctgttggtctaacactgtgcatggaactgagctacagtggggcgttggggggttggggggggcgcatcctggactgttggcacggagccggttatagaatcctagctgagcgtcttagctttgggtgagcagggccgacagagccaagaatcacctgtggcttctggaaattttaaccccgaaaagtccctgggttctgggaggatgtgtaagcagggagagtgacccaggcagcaccctgtcatcaggacacagcctttacatttctccatcccaaagacgctgctgagtgtctgttcttgcttagaatcaggaaccaggcctccttttgagagggtaaggacagaaggtctctagggtgtttctcaatttaactaacaaggccatagtaaaagaattttctctcctttcctgccttcctctctctttttaaaactatttttaattatttaaacacacggatatatgtcttaagtaataagaaagtagaaataaaaaataagaaaaagaaagcaataaatcagtttaattatctaaagataaccgttggtttttaactttggtgaattatcacaccaacatctttgtgtatatatatatcgaaatagaaggctgagtggaggtgttacctgaatgaacagttgggaaggtgtgaggggcagaagagaacttttggtaagaatgggctcgggcaatttttaagttaaggtattaatttttaaattttacttgaatttagcagaacaaaatctcaagtaaaactgaaggaaatacgttaaaataattgtttctttgttgtgagagagagttgttgctgaaagatcagtcagagcaaaataatgattgaaagtcgggcagaagttagagcgctgttgtttctgccttaggtgccaggggcggggaggctcaggacctcaccccttccctctgcttctccccctccagcctctcagttgtgacccctaactttgtttacaagtgaggttttacagtatttgctttccgttctgcagtaataatgctgccaactgtttggtcttcagttcagttcagtcgctcagtcgtgtccgactctttgcggccccatgaatcgcagcactccaggcctccctgtccatcaccaactcccggagttcactcagactcaggtcagtcgagtcggtgatgccatccagccatctcatcctcggtcgtccccttctcctgcccccaatccctccccacgtcagagtcttttccagtgagtcagctcttcgcgtgaggtggccacagtactggagcttcagcttcagcatcgttccttcagcttctttctgttttggttggtttttagatctgtaatgatgtgattatcgttctgtttccttagctctgcggtctcacttttcatgccgtgtgtttgatgtcttttaataaactcgtatgactatttttcttacggagcatctggagaaagctgaggctttctttcaagttggatgcgttgtcttatctgcctctcccatattgaatccctttctccctactccccctctctgtttctctgcaaattaaagcgtgttgaagttctaagaattttgtcagcccactttctctttctcagggtggggtggttatggtgcggtgaggcatctcggttcttcattgagtctgttccgtgaattaggaacaacctaaacgtggagtaggagatgggaaaggttagggaaatgagccttttcctcgtggagtctctaaagaaaagtgtagtcacttctaaggtagttttcttaggttttaggaaagcaggtttccttaaattcggaaagcaaatctttttttggtcatgtggatgaaaagttaaaaaatacattacttcagagactgagagttctacagatggatagatattctaagtatgaggataactgtgataagaaaagtgtgccttcgtcagatgcattctaattaagtttttaaacagcaaaataaatgtcatgctcctgtaactcttagattaagcccagaaaacggtgaaaatccataaaatggatttttttaaaagttatgttcagaaccagggcgggtgggggggaagccaggaaatgatggaaccactgctcaggagagatgatgtaatcttaatagaccacagaaagaaggcagatctaatcaactcctgttttgttttcagctttcctattagaacaaacagtgattgggaaccttcactcttagtacttcagtgttatctttgatttgactagaacaaatggctactgataaaaacttgactttttaacagtggcatcctcctgtttgccatgctctcccagggaggggcctaacattcttttgaaggaagtcccggtgcctgccctgcacggagctctgagctccctggggctggctcggggcaggtagaaggcgtacttgtgaaacagctggggaagcctctgtttgaggcagtgcaaggtcacgtggtaggatatagacctgcctgataaaagaatttcaaataagagtgaatccacatagggaagggattcacctggagggctttatgaaggcactaaacctaggagtgggcttttgagatgtcaacgttataactagaggagaggagtaaggaaagcactttgcctagggagaggccagggtgtagaataatagtagcagtaactttcttgactgcttactatgtgcaagaacctctgctctgagtggcttttactgttagtgttaatctttccgtggtttttaagcatgctggtttttaagcatgctgtctacctcgttacctatttctcctatcagctcttaagtcctctcaccagtcgttacgttcatttcacaaatgaggaactaagattctgagaggtgaggagcagcagcggtagcacctagtaggtgctcgagaaatcacctaacaaacggctgagtgagtgaggaagcagacacgccccagagcagttactcagggagtaagagctcagctctaggtgtgactgacagaggctgactctcagcctgcacgccggccagcaaagtaagtgaaacgtgtgtgcagaaataaaatgggtctgggaaatgaagaggtttggcgtgatagaccactgtccttagtgaaaccataagaggggtagagtgttaaaggtgagagctgaggctgcagagtcggggtctgattttaagtcctgctctctgtgtctgttagtcatgttactaccgttacagacatttcccttcttcacacctcagttttttttatagatgccaaaaatctatagaatgggacggtgatcctcacctagtaggaaagtggagaggagtgaaacgtggacagtacttagcacagctcttggcacagtcatactcagcaattagctgcagtaattattaccagctgttgcaattcattgaaaagggaactgactcgaaagcaagcaggccagagaagcctgggtgtggcagtggcagccagggtgaatgaaaggatgggagaggaggcgagaagactagcagagggtcattggagctttctgggcatcgatcaagtcctgcctgcaagggcgcagcagtacggatgaggaacaggagggagtgggtgaatcagagacgctgtacaggctgcctccatcagaggggacagtacgtttaccaggtgtttcctatcttttcagagaatcctgaggtggttgatgatttgtcatcgaaattggtactaaatgtccttggctcacaaacgatagtggttctcattatgccattccaaatcctttttttttttcactttttagccaccgtgccgtgaacaaaaccagcttttttggtgtagtttcttgagatctaagacaatccaaaatgtctttttgtttgtccttttgttttttaatccagataagtctccccttgagtaagggctggtgactgaaaatccactgtctgttttgtttcagtgcaagcagctactgacaccgtctgtagactccagcagagggaacaggagcgaaaaaaggtaaaagtggaacctttggataatggagcctgtaactccagggcttttatcattatattattagcagttactttgggttaaaaaaaaaaaaaaaaccacacacctctgaatttgttttcttttatgcagtgatttttaaagattaaaaaatggctgattcattgaagatgtgctgagtcagtgaagtcacatagttgcactctgtatttttataattcagattgcagacttctttttttccctttccaacatttccatcttttccctgaaaatggatttctctctaggaggcgaaagaataggacttttacatggaccagaaaatacccaccagcttagaaacagcagtctttgagcctgaagccttgagtgtatattttttctagagaaggaggcattcctgcctgtggactggctccttaatgactaatctgagagtgtgtgaatcacttgctgggtagtgctttgcttatttaaattatatcttaactaaattcaggtgtggaaaaacagcacacgattttaagttcccgtgatactttggtgttttcggtttaaagaatttttataacttatttattactctaagccagtagaaatatacttgttaagaaatatggaaaatactgcctttttgcgtgtagtatatcagcaagtactactgtctccatttctctgcagtgtgtggttggttaacccatgataatggtatggatctgccactgcaaaaaaaaaaaaaaaaaatgaaccttgcccaagtttaaatttctcaactttctgttcaactcttaatgttgatatgaagtttaaagattcagcagtttgatgaatcaagccttaccaaaaggacttgatgattaagccaggtgggaaggctgcctgggaggaacaggatcccagtgggccagggggaagcagggctctcgccagcacacctgtgacctggcagggccgtgctggccggggaggtcggggcgtcgtaccgcccggtgtccagagagcatggcaagggtgggcggggcccggctggaccgcaggtattgttctggtctctacttgactaggtgccattggggctgaaagattttagtttaaggcagaagctaaagatctaggaatcccaaaccactgacactaatatagtgtaggatcaagttaagacctgtcgtaaagttgtggggaactttgcatggtctgggcaaaaagtgtctttactaggaggatgggggcgccccagcccaaccttgatctttgtgtaggaatgcgagtgatggaagatgggaagaaagatactgtaggacgggacagggggagcgaagcaatggatgggagaggtcaggggtccagggagctggcgtgtggagtatccacgtgggtctttccggagaagaatgcagagaaccaggcctgagatgtgaagcagtttgtttcgaaagcacccgggacatgtttatgtttgagaatcagggagactgtgatagagccctggctgtaacatacgcagttctcatggctttcaaaataaaaatgaaaaagtcttttttgtgtgtgactgtgcattcgttattgatcttcgtttctaagacattctcagagcaattctgatttctgataaaatggcaattcttgccattcttgagcagaactaacctaaaattaagttatattggggatggatcgttcttcttaattctttgaacttttttcacagctggtgtattaacagtgtctaaggaggaaaattaccagattgggaaaaaaaatacatggtatcttctatttttaggtgcttgcctttgttagctaaccttatgcccttgggtaagcccttgagcttcaacacaaatgctggttgttctcaccgggtggattgatggtttctgtacctgataacattgtgttgtgtaatttatgtgaaatagtgttactctccaaatgtcaggtggcatttttcccccaccagcttgatcgtttggttaagatgcaggcaatcactctgtggataagagccctgctgtggtctgtagagttggtgaagttcttaagaatcctgcctgttgataattttctaaattaaaagatactgtcccttggtttaaaaaaaagagcctcaagaaataataaagcccttggggattttcatcttaagtataggtattatctcagagattgttattgaactgttttttaaaatggaatacacattaaaaatcagaattttagaatacattgaaatatctttatttgttcttatctagttagcagagcatttgaaatatggatttttaaagtctttttctttttcaactgtcatacctggttttgccaaaactgtgtggcagaggtttgggactacatatatttaagacagagaagtgaggcttaatttctcatctagcaagtctgtaccaagcaaaattgacctctagctgcattttacagtctaatgtgaaccgttccttggttattcccttggctgcattttgtgtatttgaacggctctcagaacaaagaaagatagtcgttactgctttcatatcgagacaatttatggaattctgtgggaagtaaatcataataaatgtcattcatccaagtcacatttccgcaattgatacctaaaagtacactctgaacaaccaatgcgcattccccagctatttgacatatgccttaaaaactagtaacaaatgcaagttgcatattgggtgctaccaataagagtagtgaaatgaaaatacacatggctgataaaattcagtgacttaaataagccgtcaaaagctagtctacactgaggttcatgcacaagcatcaacttttgaagttctgttcaatcagactagagatagtaataaagtgaatgtgaatcctttgattcatcttgtccacaagtacttactaaatttagtcttacttcttgttttgttaagagagcagtgaggtagtgtggcttacggatttctcttgatagagtttggagatggtaggtagtgggttagtacacgaggctttctgtatccactggttctgcatccatgaattcaaccaaaatgttttaaatggatattttttaaattccagaaagttccaaaaagcaagacttgaattcgccacatgccggcagctgtttctatagcacttacgttgtacctgtgtagcatttgctttgtattaggtattatgcataatctggatatgactttaaatgtgtggaaagattacgtacgggttacatgccgtgtcctgtaccatttctctaagggccttgagcatctgtggactttggtatctgtgagggtcctggaatcagcaccccacagatccctcagggtgaccgtacatcgtgttttaagtactgaagataactgcacttgttattctgacacttaatactttctcatttatctgagtaaggcatatgtaagattaaaggcacatgtattgcttacagatattccaaagaaccttttagacagccgttggtttattcagagttttcccttagacccaggcttttcactctgcacttttgatattttggagcagattaatctctcttgtggcgtctacataggatgtttggcacatccttggccgctaccccccagacgccagtataaccccttccccccaacctgcattgtagtaaccaaaaatctgggggacagaaggcaggagtgtcagagtcacccccccaggtgagaattaccagcttagataaagcgtgcaaaaatgttcctgtgtctatcacttcttttatagacctggtcctggacacagtttgccttcaggactgacttcacatttatctccaatgggacataaggaagctgggttattattactatttctctgttgtagaaagaaacaaacctttacagctaattacttttagtactgagttacggctccttagtaaacttttcctttattttcttttaaaatggggttttcttttttatcttgagaaaacaaacatgtctacatctttgagtatgcaattgatttcatttgggaaccccacccaccccgaaacttgaagttttttaaattgtgataaaatacacacatacatagtttggggaagtattaaacataagtctggaagagattcataaaaagcacatttcacagtaaattctagaaattgcaatactgtctttatttctttggaaaccattgtagtgggtcccagtctccacaggataaaaattttaagtacagagtaaaaatatgtgaacttaggtaaacattgtcatgtagaattctagatttgaactaattcaggctatttctgcaactgctctgctgtcatttttttttttttttaacacaagaatattaagtaacccaggggttagaggggctgagcatctaaggaaagcatgtgacatgatcctgaactgcttggagtttactttggaaatgaacgtgtgtaggcaactcagtttgtccaggattggctctgtaactggaagtcccttaaattaacttagagtttattattaaaggataaacaatgaaactgtcttagtttgaaacttgggtattactgaactttagcagtaacctcagcaattttttagaattcagaccagagaaggatttgggggtaaggagtcctgtgtcgctgaccttagtgctgccagtgcctggtgataaggaaatccagtctctctggattgttgtgtgtgtcactgatgtaaactttgctaggacagggcgccctcttgttgcttctgctcaggcagagctctccccgctcctgctgggtgcgccattagtatggattgtatcattattgaaaaattgtacatgcagaccagcacgtgtgatatgactcccttttgttattaagtaaatgtttgtatcaacataggaaaaagtctacaagtgtagccatccgactagtaatagcactagaaaaaaggaaatggatttgatgtgtatgtggggtagaggagggggactgtccctttatattcttgtgtttgaatttgtttctacgctctgtaatacttctttaataaaaatgaaggggaaatgctaatccaagagaaattactgagccataaatatttacactttctgttttgatagatttttgcagattgctcgccaaaaatactaattactctcaccaccatgaacatcaacttttgaatgtataatttaagatgcacatttttggtagctgctagaaattttaactgcaaaccataattacctattacaggtaatttttaactacttattacaggtaaatagtttgattgctatattgcgttcttctgttggtcgtatgtgaatctgttgagcataaggacagatgagactatgattcttcaagagtgtttcagctagaggaatccttgtttcagactgacacagagtccctttatttgaccttaaaagcagaattactgcgcgcaggagatggtcgtctgaagttagctcactgtttacaaaagatttttcctttttttaaaaatttattttaaattggagggtagcagtagtgttgagtcacccagtcgtgtcccactctctgcgaccccgtggactgcagcccgccaggctcctctgtccatgggattctccagccaagagtactggagtgggttgcaattcccttctccagaggatcttcccgaacccagagatcgaacctgggtctcctgcattgcgggcagattctttacggtttgagccacaggggagaccttaattggaggataattgctttacaatgttctgttggttctgccgtactacaacatgaatcagccattagtatacatatatcccctcccttgcgagcctgcctcccacccaccccgtcccttatttgggagagtcctttttaattgtgaacagagtcactggcttgttaggctgggaggtgtgctccgattgagatgtgcttcggggcatctttgctgcttcagatggaggagcagttgggctccgtgtcgggaagtcatagctaggcataccacatttcctgacaactggaatagatgaccttcactcgtgtcagcttagaatacttttcaacttgcttctgagcatgcagggttagttagtatactctgtgcttattagaaatttatttcctgctaacgccagggtatcattttgataaagtttatttgcatttttcttatctgactatggcttttctcttagaatataatagttttgccaaagttccatgaaaagaatttaatgaactcttactgttttatttatcttttgaagaatgaccacctctgaagctgaatggtttaaaaagtcatgttttgccttttgtctaacctgtttccccaatgcattggatcggcaaaccccaaccctggtttctctgcaccacagtccactgctcagaccccgtgggtcgaggggcatacttgagggggttgtttcactaactgaaacttcagattcactgctgacctctttttacttggaaagccttggtgctgaggaactttagatcagattggcagaaaaatactcttgcaatagttttgtgtatgtgtgtgtatgtaagacttttagccatctgtgtaaaaacttccctgaaatgatctgattagcatttgtgatagaaaaggcataggtctgggtgtcagcgagtcctacctttgcatctacgatttagtagctcagtggccatgaagaagtacatttagtgtcctcatccagaaatattaaggaacatctcagaatgaacttaagatatttgatccaggtacttttggtgtttatttgctttaagaattggaactgaactaagagattgcttgagttcttgcccactgattaataatctgtggttcttttaaatgtgtctaaaagatattttgtgtaagaaatgcattttaatttcttgcaacagtgattcttttggcatatattctttaattttaaattatatgcaattaaatggaatttgagaaatagaggtatgtaaatttacttggatggtgtttggatctgttgtttaaaatattagatatttttgaaatttcagaaatgtgaatgcccacgtttaggcctagtaagagaagccttagatgtatctgatatgttttcttgttggacattaaaactgttaggggagttttatcattgtgacttacaagctgattgttatgctgcagtgagcaaatgtcaagagataaaattatttttgtctccttgcatggcaaaataactgtctaaaaaatgtcacataactttcaacttttcttttctcagattcatagtgaccttttaatagctcgtgagaaacagcacatgacgcagtgggaggatttcatgaccgagcagcacagcaagcaggcagaagtggacgaggagcacgggaaggccgtggagaagctgcgagcgcagtacgccgagatggagaagggcctggcgaggttctcagccttctgaggacgcgaaccacagcagtgacaaacgaacgagaagaaactgacatcccccgccccccccgaaacacctcccactaaaccatttagcctctgcttcaagcttagcaatatattcaatggcactcttctgtcggaaggcggagccctctcctggagtcttccctgtttcctagaggagtgccacctctttccagtttcaagtgcctctaaatgatcattcacaggggaaggaattggaggaaagcggtgtccacgtgctctcgggtagtgtggacccgtcttgctttccattgattgattatctcggataactaaccgtaagtacagacttcttagggaagcagtttaattcatccttctgcagggttaatattggtttatcggcttagaaggcagagatggtgtctgcctgtcgtggcctccttggctcttgaaggaatgtatacagtgttattccatgagtaatgtagacagaaacagctgacccgggagcagagatca

SEQ ID NO: 56 - DNA, 161841 bp, Hippotragus equinus
  source 1..161841: mol_type = genomic DNA
tcttgtccaatcttctcttcgagtaaatccgacacacagaacaggtttaggactgagaagagaattaatcggagccatggaaacggccgagcggaggaaacgtgggagaggagggtgggcaggaggggtaggcaccctcccctgacgacggcgcgagggcgctccaaggatcacgtcacgcacctcaggtgacgtcacgaccgtgacacgcgggtgacgccgttgccgcggcgacttccagtcgtctccgccccctgcccccgcccctgccccccggcctagcgtccttcccccaatcccctcaggctcagctgcgccgggggccgcaggccggttcccgaggtggcccaggcgccgtcccaccgccgacgccgcccgggccgcccggcccgtccctccccgccgccccccgtcctccgcctccgcctccccccgccctccgcctcccttccccctccccgcccagcagcggtcgctcgggcccggctctcggttataagatggcggcgctgagcggcggcggcggcggcggcgcggagcagggccaggctctgttcaacggggacatggagcccgaggccggcgccgcggcctcttcggctgcggatcccgccattcccgaggaggtgagtgctggcgcacctgcgcccctccggtctcggggctcggctgactggtgtttattttgggggaaggaggtggcggtgggggctccggttgccctcagccaccttctcctcggggctctgcgggctgagagactggctttcctcacctgtccttccccgccaggcaggagctcgctacgtaaacacacacagtggcccaggggggtttccctggttcgcgctctgggcttgggggattcgggcagccgtggtggagcaggaggctatcaatagggggcgagactcgggggttggtccgagaaggtcacggctggctgaaggtagccagcctcgcatctcctggatgttttctttatttttggtggtggacgggtagcgggggagctggggccggcatcctggtgaaatacgtgggttagtagccggggccggcaccccagcccgagttaacgttgtctgtaattattacatggtcacggtgaagatgggcgcatcattctctctctaactctccccgactctgccccttttcaggccgctgccctccctccgcttctctacttgttagggcggaggggaggatttctcgtcacctgttttaaccagctaatggttttgatctagcctctactttttcaatcctcagtgccagtgtttccgttctttcttccatcccgacctcagacccccagttcctaatgtttgcagtgtcgctagctggtaacccccatcgcaattccacctgcctccccgctccttagccagtggtcggacctgtctgctcctaacctcagcttctacttacgacgattttttgcccctctcttgtcttagtcttgttgaggccctctacttcattcccccgctccgtaacatgttatggttacaaatccttctggacactttggaactacttactttctgaatcctgaagctgtcaagattccgtcagatttcacttgctttcctggcaccttttagtccatcatccattgtgcacccacatctctttgtttattcctacctgtggtttttaaataggtgtgattgatttctttctgtcctattttttttcttttactttttcttctttagcccttccatctctcagccactgtttattttagtctcttatcaccttgtcagattactttctttacattttgggttttattatgtaaaatgtattacataaaataatacactttattatgctttccaaataatgagataatgtatggtatgataactgtgctttataattactgattagataatgtgatttaacgccattgactttgctcaaagttctttccttcgtactacagcacttacattttatttcccagttctcataacatctcattctttcttctgtctatgcagttctctttttcctgcttcatcatctttactttgagattcatcccatatgcttactctattcagtatcagtttgttcacaatactgtttttcattctctcacaccacttgcatctgtgcctaagatgcattctgtacatctcatcttaaattctcatttgtatatatctataaatatatattataaaaaataatgggcatgggttatgaactgtaattttctgattgtaacattgtttttgttgagaactttgtttccgaattatataaatggctctatatagatatatgtgatgtgtatatatatatatatgtgtgtgtgtgtgtcctttacaccacttcccacttacttttctgtttgcatttctgctcagatcagtttcctctaatatctgttcatttcctctagtttcttgaattttaaggatagtggtcatcccttcttccatttcctagttcattctgttttccttgtccccaattgccattcattctgctttgtttcctggcttttggtacttaacttgctgaggcttcctcttgtcttccccacacctccacattccttcttatttataaacaactttgttccgttgacatggaaatttatttttagaatacattgtttttaatggataaatacttggggtcacatctgctgtctattttttccatgaatcggatatgcctttgtcttactcctcacaggtgcctctaggcttgctttactttgtagagcttgtgtggttttgttgacttgcatcccgaagaatggtaagattcatggagcttccctggtggctcagatgttaaagaatctgtatgcaatgcaggagacctgggttcaatccttgggtcgggagggtcccctggagaagggaatggccacccactccggtgttcttgcctggagaatcccatggacagaacctggcaggctacaatccatgaggtcacagagacagaccagcctgagtgactgacactttctctttctatgaaattgtatttctgattgtaacattattttcattgagaactttgtttcaaaattattagaacagtttgcagtgatacagagaaattttttgttaagtacagtgtctgctattttatttgaaagggccagattgtttgagctctactctgaagattctgactcagtaggtgagagctagggccatcagcttctgtatttggcacatttcctaggcagttctcatgtgccagtacttgagaacttctaggttagatgaattcaagtttaaattggtaataattggaaaagatattagtatctcttgaaaccataagtatactcttaactaattttcagtagaagtgtttcctcctgcctcctccacccaagtttttatggctagtgatgaatagtagtttttcctccatattttcttataagagcttataataaatgtatttgactgggggagaggagagtaacgggttaaaaatgaatctcttttcaatataaatatcagtgttatggatgatagaataaattcctccaaaaaataattttaaatttgaagttggtttactgtcatcttttaaactgtcttccttatatgcacttaaggagataatgttatgattgtcaaatacatagaacgaaatgaaaaaaagtgtctattaaagaattaccttacttgacagtaaaatacagatttttaaaaagtttctcagaggaaaaacacatttattattcaaaaattagaaaaatataagtgaaaaattttggaaatttatctgtaatcttgccactaagatataattactataaaacattttagtgtatatacatacactcttttttatgcttgcataatataatgtatgtggttttgtaatatttttaaacagcatcataaaagatttaacacagtgtgattttaacaatttttatatttttaatttaaaaaattttgctgtcagacatcttgaacatagaatgtagatttagttttttaaattatgttggtaagtgaacaaatttcatgtcctgtatttttaagtattactttgtagaagctcaaaatagaatattctaataaatgacaggagctcattaaatatttatcaaataaatatgcttttacttttggcattaaacatttacttctgaccatttatatttccctgatgttactttctttctgtgaccatatggtatagtatgggacattacgacaatatggtataaaaattttttttttaatgtgttatgccagggtatgatatttattaaccattcctcttacggtgtatttttgtagaaaggagcctcttacaatcacattacaattaaaattgtattgttttcaagatctgttatcactaaccttggttaaactgtgtaattataataatgcattgactaagtagtattctgggatagtatgtcctttataatgaggttaagtgtgttaaaatacatttttatgaatcatgccaaaccaggttgaattgcatcatacttttaaaaagtggtaggcctgctaaactttgtgtttctacagttctgattattgctgtatgaacttgttaagatacatttcaaagtagacaaaacatgcctgtttgttaaaaccataaaataactgtgtgtctttggtgtttttagcattccctttctgtagtctttcttatcatttaatgaacgccctcctttaggcgccactcacctcttcttttatttagaaattttctgacacctgtcacttatgtgtgctgactattaaaggaattgatagtaaatggacaagaaagaaactttggaactgagtactcaaatccttgaatgtagtaaaacctgaaagcaacttgatttaattgtgtttagataataggctagacaaattatattaagactataggctagagaagtctgatttattttgattccctgtttctggctttactgtagagggagccgatcaggtcataacaaatggaaatctacgctctgtgagtgctagggaggaaagggagggagctttgtttgcatttgtatactgctttgttagcgttttctaagacctgatgcttaccttgttgaagaatgaggcatttatttagtgttcttttttctccaaccataaagctctttttctcctttagaaatgcgaaagtgcattttcccccttgacatcttgatattaatttagctggtacttagtgaacattttgtgccatcttcctcttttatgaaattcagtatgttcctgtgctttctaaatttctgcctcaaattgtcattcagataaacctttagagtcagtggcttttactgaatttttcttcctcagaagttgaattgttttgagtccttttactcattctctttgtctagttcgtctgaattggttattctgtaaagtcaggatcagcaatagctatacagcctctgaattcaaaatggatgagcctgttgaggagcttttctgttttgtaaacaatgcttgcatggtcataacgttgtagataagaaccaaaaatctagccttatttcttctattcctgccttaaatatttggtggaggcattgacatattctgggaagtggtttttatttttcagttttcttttgtctgccataatttactgtcacataattagcacaatagtcagaaaaaactctttaatacagcctctactctaacattaagcaattatttttttctcccctctatcctctgagattattttggtttccatgatttctcttgggtttaaaaaactgttattcttgtttctccccatatcaggactgcgcttatagaggcaaagtgatgctcagtaacattacatttctttctgggttctgggaatgcccttgataaagaatataaaaattgctctgaactcagttaactttatatcttctggaagctctgtaacatgaaatgaaacatcatttttattcttgtaatatagctgcaattattgacagcactttggggacaaatatgccataagattgtggttttccaattactatagagctctagtactgtttttaaaaacacattagcgctgtaaggagtatagatttttgagttgctctaatatccatatacatgaagcagtttttgcctgttttgtacatttttttatcctcatctggcacataggtactcagatatttagtgaaagaattggctaatgtgtacaaaacagggaatatagccagtatcttatagtaactttaaatggaatacaatctgtaaaatttttgcgttattgcgttgtatacctaaaactaatataatagtgtaaatcaactatacctcagttaaaaaaagatttttttaaagaattggtgaatgaaaccctattagatatggtgcacttggattttctgtaccattcagttctctttttttttaatgctactcataaaatcagtttattagattgacaaccacctggttggaacaatttgttttgagggtatcaaggactttctacagagcttacctcaaggctctatttagtcccactataccttaactgttgaaattcttcatttatctgcattaggcattgatctccttgaaaggaaaggagttgatggctgtaaaaattttagagctactgttcatggaagagagatttgtactgacatgaatcttcccaagtgtagtaatctgtgtagaagattttcagcaacttgtgtttaaggcagcaatcaactgacttctgtgtaaagggtcaagtgataaataatttaggcactgtgtttctaactgctctgtctctgttacaaggactgaacactcaatgattggtattgtagcataaactcagctaatagactatgtaaatgaataagtgtgactgtgttccaatgaaacttatttatggacactgaaatttgaatgtgtcatgaaatattttcttttttttttcattgaaaaatgtaaaaacattcttggcttgtgagctgtacaaaatatagctggggtggggggcagatttagttcatgggccaaagttttttacttagtctaatggagactaagtagatcatatttgaggttctgaagttaaggtgtgatataaagttctgtaagtttttaaaagtcaggtttattgggttataattcacacatactataatgtaccattttaaacacacaacttgataagttttgacaaatgtgtatagtcatgtaactactgccacaatcaagataaagaacatttccaccaaaagttccctaattcctcttttcattcattttcctcgctacactactgccagtcctgacaaacactgagctgacttccagctttgccttttccaaagtcataaatggggaatcatacagtgtgtgttaccgtgtatttggcgtctttcatttagtttttttttttaagttgaatttttttttcctctaacttaagccgcttagaagttttcagtattttgtttttatattttatgtatttatttaagtttttgactgcttcaggtcttagatgcggcatgcaggatcttcattgcaatgtgggactctagttctggtgtgtgagctctagagtgctgcacgctcagtagctgcagcacatgggctaagttgccgtggaccagggattgaaccgatgttccctgcattacaaggtgatttcttaaccattggaccaccagggaagtccctagtttggtatttttgagattcgctcatgttgttggcatgcatcagtaattggtttctgtttattgcttagtggtagcatatggatgttgcacatttaccagttgatgggtagcagggttctttctagtttttagcagttataaataaggttgccaaaaatgttgggttcaggtttttgtgtggacgctgggttttttatttctctagtaaggagctagaacttggattcatgggtcatatggtaggtatatacttaattttatacgaagctgtcaaactttttttttttttttgaagcaaggaatacaactttatttggaaagctaggtgtcctagaagatggcaggctagtgccccagcgtatcatcttatctaggtctgaatgccagtttcttttatagacagaagagtaggaggtgaggaaagtgaaagcgaaagtgacgtcgctcagtcatgtccgactctttgcgattccatggactgtagcctaccaggctcctctgtccatgggattttccaggcaagggtactggagtgggctgccatttccttctcctgtcaaacttttctaaagcaatagtaccattttgcattgccactcacaatgaatgagagttccaaactttatcctgtcaacacttggattattagtcttgttagttttagcagttctaatatgtatgcagtagtagctcgttgtggttttaatttgcattttcctaatgattaatatatttgacatctgtttatatgcttagttccattcagttcagttgctcagtcgtgtccgactctttgtgaccccatggactgcattatgccaggcctccctgtccatcacagagtttacgcaaactcgtgtccattgagtcagtgatgccatccaaccatctcatcatctgtcatccgcttctcctcctgccctcaatcattccaagcatcagggtcttttcagctcatatgatgagtcagctcttcatatcaggtggccgaagtattagagtttcagcttcaacatcaatccttcccaagaacacccaggactgatctcctttaggatggactggttggatctccttgcagtccaagggactctcaagagtcttctccaacaccacagttcgaaagcatcaattctttggcactcagctttctttatagtaaaagtctcacacccatacatgactgctggaacaaccatagccttgactggatggacctttgttggcaaagtaatatctctgctttttaatatgctttctaggttggtcataacttttcttccagggagtaagcctcttttaatttcatgactgcagtcaccatctgcagtgattttggagaccccaaaataaagtctgtcactgtttcctctgtttccccatctgtttgccatgaagtgttgggaccggatgccatgattttagttttctgaatgttgagctttaagccaacttttcactctcctctttcacttttatcaagtgactcttaagttctttgctttctgccataagagtggtgtcatctgcgtatctgaggttattggtatttctcccggcaatcttgattccagtttgtgcttcatccagcctagcgtttctcatgatgtgtactctgcatatgagttaaataagcagggtgacaatatacagccttgacataatctttttcctatttggaaccagtctgttgttccatgtccagttctaactgttgcttcctgacctgcatacagatttctcaagaggcaggtcaggtggtctggtattcccatctctttcagaattttccacagtttattgtgatccacacagtcaaaggctttggcatagtcaataaagcagaaatagatgtttttctggaactctagtgctttttctgtgatatgacggatgttggcagtttgatctctggttcttctgccttttctaaatacagcttgaacatctggaagttcatggttcatgtattattgaagcctggcttggagaattttgagcattactttactagtgtgtgagaagaatgcagttgtgtggtagtttgagcattctttggcattgcctttctttgggattggagtgaaaactgacgttttccagtcctgtggccactgctgagttttccaaatttgctggcatattgagtgcagcactttcacagcatcatctttcaggatttgaaatagctcaactggaattccatcacctccactagctttgttcatagtgatgcttcctaaggcccacttgacttcacattccaagatgtctggctctagtgagtgatcacaccatcatgattatctgggtcgtgaagatcgtttttgtacagttcttctgtgtattcttgccacctcttcttaatatcttttgcttctgttagatccataccgtttctatcctttattgaacccatctttgcatgaaatgtccccttggtatctctaattttcttgaagagatctctagtctttcccattctattatttttctctgtttctttgcattgatcactgaggaaggctttcttatctctctttgttattcttgggaactctgcattcaaatggatctttccttttctcctttgctttttgcttctcttttctcagctatttgtaaggcctcctcagacagccattttgcttttttgcatttctttttcttggggatgttcttgatccctttcttctgtacaatgtcacaaacctccgagcatagttcatcaggcactctgtctatcacatctagtcccttaaatctgtttctcattcacttactcatatattatctttggtaaagtagccattcagatcttttaatgtagtatttaccttcttactatggagttgtaagaatgttgtatacgtaacctgaatacaggttctttgttttcagacatgtgttttgtatgactcccagtctgtggcttgtcttttcattttcctaaatgttctttgaagagtagaaattttgtttttgatgaaataaaatttatcaatttttcctttttgtgtttcatgcattctgtgtcctacccagtatatatttgctcaacttaacgccataaaattttcttccatgttttcttctgtaagttttacagtttaagcttttacatttcggtctgtgatccttttggagttaatttttctatatactgtgaagtaagggtaaagtttggtcattcattttcatatggatgtccagtttttcaccttccttaaagagactaacctttttctgttgaattaccttggcacctctatttaagtcagttgattgtgtttgagttttatactctgttttattgacctatatgtctcttctttgcctggtaccacactgtcttgattactctagctttatagttcagtcttaaaattagttagatccagtttgttggatttttagaactttaaaatttgatttttaaaattcttttgtgctgttgtattttttgacagcacaggattcgtaattttctcccagttctcaaaggtgtcttctatccaagaaaagtttaaacttactgtagtatatagttaatacatcccttccttgatttatttggtggagagattgtgaaaagtggcagatacagaaaacgtgtttcatccaaaattaacttcgtaagaaatgacaaaaatatcctagtagatggcaccagaaggtcaacagtgtgccctttttttttttacctacatttcaaaaatattaactctataatctagatatgtatgggtgaaagtgaatatgttaagttgttttttcaccaaaaagttatggaaaatgtcaatcaggtggtgggagttacgagtttataatactagctgtgttattctccatcttcactgtgagtttttccatttgaaatctatgtcatgttctgtgatgttccagaattagcacccttattactcttagagtcatcattaaattgtttttactaaggataagcatatagtggtggttggtcatatttcttcctttttcattgggacccataggacctattaccttgtttgaaattacaatggtggtagctttttattccatagcctgaagggcttccctgcaatgtaaaatgatagttgtagtcatgattttcacttaagaattatgaatacattacctgatttttttttttcttagtttccttgtgaaggaaggaaaacttaagacttaaccatcagtgaaagtcatggaataccttagtacagggtcatgtgacaattgggaggatagactgttcaggcttctgttcatgttgtaagttcagtttggttcagctgctcagtcgtgtccgactctttgttaccccgtgaactgcagcacgccaggcctccctgtccattaccaactcccggagtttatgcaaactcatgtccattgagtcagtgatgccatccaaccatctcatcctctgtcatccccttttcctcctgcccccaatccctcccagcatcagagtcttttccagtaagtcaactcttcgcatgaggtggccaaaatattggagtttcagcttcaacatcagtccttccaatgaacacccaggactgatctcctttaggatggactggttggatctccttgcagtccaagggaccctcaagagtcttctccaacaccacacttcaaaagcatcgattcttcggcactcagctttcttcatagtccaactctcacatccatacatgactactggaaaaaccatagccttgactagacggacctttgttggcaaagtaatgtctctgcttttgaatatgctatctaggttggtcataactttccttccaaggagtaagtgtcttttaatttcatggctgcaatcaccatctgcagtgattttggagccccccaaaataaagtctgacactgtttccactgtttccccatctatttgccatgaagtgatgggaccagatgccatgatcttagttttctgaatgttgagctttaagccaactttttcactctcctctttcactttcatcaagaggctctttagtagtaagtagtatctggctatttgcaaattttgaaatggcacttacaggaagagagaaccacaacatttttggagactatcttcaactgttgttccaaaatcaatgtgttttaaaaaagtatgcatctccttattgtaaaaagatgccttgtgtttaaattgagaaatattctacttttgttttatatttttcttttactaaatatataacctttaaagtaataacaccagaaaaatttggctgtatttccagaatggctaataaattttaggatgctttgaattagtcacttacctttgattatttgaaacagtttaaaatacagcttgggggttattcctctgttgatctaagatttttatactgtatttgctgcattacagcacttactttgcaaagtaaatttctgtttgtatttatagatgtgctttattaaaggagtttactagctccagcagtgatattgtaaatagttattaaaacttctgttttatttttttcccacgttgggtctaatcccattttgtctgttttaaagtttgtactctctacctagaaatctctccgaagcatagagggaaaaaaacccagcagttactaatttgagagttttgtttttaaagagttcttaatagcataatttctggtaatgtatgaaggtaatttaatttccatttattatttagaaaaaaaatgctaccttttccgtgagtcccaaacaattactgcctttctaacttttttttttactatgaaaagataaagaactattgttaattattcctacataactcagaattaattttttacacatcacattactaaatttccatgggaatagtgtcagagagtttgagcaaactctgggagataatgagagccagggaatccggacgttttgcagttcatggggtcacagagagttggacatgattgagcgactgcacaataacaggtgtcagagaacttcagatggggaagactttatgatttagtatagtccttacattcctattctgcaactactgaaagtcttcatcttagtttttacatgcttgcttctaaaatgtgaaatgttttacccatatattgtatattatttccacatgtcttctcaaattaagagtaaattacacaatctaaaagtttcattatgcataaagatttagtgcagtgtaacattttggtaagtttgttgcagatgatttttctactactgaatttggcacttcagttgctatatgtatttagcaatcaaacttttagttattggttatcataaatgggtactcgagagaaaagtttaatcatgaagtcataacaattcagtgtcatagccattcatacactgcttggttttcactggcaattcttgatccctgtcctgcccttcctcatgctatgtactgaacttgtaagtggataacaggggtggcatgaggatacatacaagccttcacagaattatagttgtgttatttttctgccaatttttgggacaaagataaatatattcgaaattttgctttcagatatctttatggcgtttttaaagaatgtccagtgacatactttagcacagggctctagttgtcaaaaacttttggttagttcttaatgtaggactgatgattgacctagtagaactgtttcagtgttgccaacattccattaatgttatctttaaaccactattgaattaaggaaatttaaaatggcagcattggtattttgggtaaacatttcttaggaatgaggtaacttctctgtatgatagtagaaagactgtatctcatggctttataggaaaaatggtaagcattaggacttgtgttttggcatttttaaagctattgtccaccatttgctttgtcatccttccaaaactccactgataaattttgtattgagtcatttcacaggacaataggtatttatgtattcaataaatatttgaatttctactgtgccaggtagtaatctagctgcttagtacatttaaaaccaaaacaatgcaaagatctctccttatctagcttacattctggtgtagggggtgtgtgtgtgtatgagagagagacacacacacactcataaaaaaaattttatagtgtgtttgaaggtagtaagtactatggaaaaatgaaagagcgggtgaagtttgggggttaggtagcaatttaaaatagatgtaggtaggaccttgtctgaaaagggtgacatttgagcaaagattttaggagggcagagaaaaacgtatcagaagaaccaagatcaaaggttctgagccagggatgtaccttgcctgtttaaaaaacagcaaggatgccagagctgctgaagtgccttgaggaagggaggtgaatagtaggatgaaatccaagaggtgtaatccaagaggtgttgaagcagcagtgggagcatgaccacaggccacgtgaggagtttgacttttaagtgaaataagcagcagtccagagctgagagctatgatctgacgtctgtggaaataggaatactctgatggctgtgggggcaataggttgtaaagggcaaggatggacacaagggagccagcgaggagcctcttccagtcctttaaggcagtggcttaccagatgggtagcagtagaggtcttgggaagtggtcagagtttggacattttgaaagtagagctgacagaatttgttgatagattgaaggtgagatgtgcaagaaaggtgtcatggggaaggggagggttcaggttaagaattcagttttaaggatgttaagtttgaaatacctattagatgtccaaaatgttgagaaagcagttggtacatgagtctggaatttgagagtgaggtccagtggcagagactgttcaccatatctatgtcttattttgagtataaagctagacaattctcccttgtagttcgctgtgatcatgtggttaagctcaggctaaactatggtttttccagtggtcatgtatggttgtgagagttggactgtgaagaaagctgagcaccgaagaattgatgttttgaactgtggtgttggagaagactcttgagagtccctttgactgcaaggagatccaaccagtccatcctaaaggagatcagtcctgggtgttcattggtaggactgatgttgaagctgaaactccaatattttggccacctcatgcgaagagctgactcattggaaaagactgatgctgggagggattgggggcaggagaaggggacgaccgaggatgagatggctggatggcatcaccgacttgatggacgtgagtttgagtgaactccgggagttggtgacggacagggaggcgtggcgtgctgcgattcatggggtcggcaaagagtcggacacaactgagtgactgaactgaactgaatgtaatatgagcacaagtgatgtgcacacattttaggtctaggccataccaccgtcttccatctggtttttcccttctggtctgctggaacagaggtgatctttaaggaaagttgtaagccatttgttgtaaatggtagattgtccatcagtctagataagaaccatcttgccaacctgtttagccacctagtactattagatgagtaagcaataaatttaatgagtttgagtccttatacctttaagatgtatttgttgtaacagctaactttaaatttgggtatttaggtgtttttgtttttttagagtcagtgtcactgcttactcatcctaggagctttattattccacaaatcttattttcactttgtatctgatttttttttttttaaatcaagacatttccctccatgactaacccacttcaccgctcagccagagaatccatttcaatgttcactaaattacattaaaattttttttcttacatcaaattagttttattttctctcttaatttttactgggggcttccttagtggcttggatggtaaagaatctgcctgcaatgcaggagacccaagctcgatccctgggttgggaagatctcctggagaagggaatggtaacacactccagtattcttgcctgaagaatcccacggacagagagcctggtgggctacagtccatctggtcgcaaagagttggacgcgactgagtgactaacttactcacttatagttgctctacagtgttgtgttagtttctgctgtgcagcaaagtgaatcagttatgtgtttacctagattcactcttttttagatttccttcccatttaggtcaccacagagcactaagtagagttccctgtgctgcacagtagggtctcatttgttcttcatcgttcagtcgctaagttgtgtccgacactttgcaaccccgtggactccagcacatcaggcttccctgtcctttcccatctcctggggtttgcttaaactcatgtccatggagtctgtaataccatccaaccatctcatcctctgttgcccccttttccctcctgccctcagtctttcccagcatcagggtcttttccaatgaggcagctcttcgcatcacatggccaaagtattggagcttcagcttcagaatcagtctttccaatgaatattcaagagttgatttcctttaggattgactggtttgatctccatgctgtccaaggggctctcaagagtcttctccaacaccacagttcaaaaggatcaattcttcagtgcttagccttctttgtggtccaactctcacactcatacatgactactggaaaaaccatagctttgattagatggacctttgtcagcagagtaatgtctctgctttttaatatgctgtctagcttagtcataacttttcttccaaggagcaagcatcttttaatttcatggcggcaatcaccatctgcagtaattttggatcccaggaaaataaaatctgccactgtttccactttttccccatctatatgccatgaaattatgggaccagataccatgatcttagtttttagaatgctgagtttctagtcagctttttttattctccttgttcactttcatcaagaggctctttagttcctcttcagtttctgccattagagtgttatcatctgcatggctgaggttattgatatttctcctggcaatcttgattccagcttatgtttcatcagcctggcatttcccatgatgtactctgcatagaagttaagtaagcaaggtgacagtatacagccttgatgtactccttttccaattttgaaccagtctgttgttctacgtctggttctaaccattgcttcttgacctgcaacaggtttctcagaagacaggtcaggtggtctggtattcccatctctttcagaattttccacagtttgttgtgatccacacaaaggttttatcatagtgaagcaggaggtgtttttctggaattctcttgctttctctgtgatccagcaaatgttggcaatttgatctctggttcctctgcctctgcaaaatccaactggtacatctggaagttcttatttcacatgctgctgaagcctagcttgaaggattttgaccatttcctctctagcatgtgaaatgagtgtggttgtatggtagttggaatattctttggcattacctttctctggtattggaatgagaactaaccttttcctgtcctgtggccactgctgagttttccaaatttgctgacatattgagtgcagcactttaacagcatcattttttttagaattttgaatagctgaaattccattgcctccactaactttgttcatagtaatgcttcctaaggcccacttgacttcatatttcagaatgtccagctctaagtgagtgacagcaccattgtgcttatctgggttattaagaccttttttgtatggttcttctatgtattcttgccgcctctttttaatctcttctgcttctgttaggtccatactgtttctttcttttattgtgtccatctttgcatgaaatagtcctttggtatctccaattttgttgaagagatctctagtctttcccattctattgttttcctccagttctttgcactgttgactttagaagcccttcttttctctctttgctattctctggaattctgcattcagttggatatatctttccctttctcccttgccttttgcttctcttttttcagctatttgtaaggtctcctcatttctttttctttgggatggttttggtctctgcctcctgtacaatgttatgaacctccatccatagttcttcgggcactctgtctaccagatctaatcccttgaatctatttgtcagctactgtataatcctaagggatttgatttaggtcatacctgaacagcctagtggttttccctctttcctcagtttaagctggaattttgcaataaggagcttatgatctgagccacagttagctccaggtcttgttttcgctgactgtgtagagtttcttcatgtttggccgcaaagaatataatcagtctggtttcaattgatcatctagtggtgtccgtgtgtaaagtcgtctcttgtgttgttggaaaagggtgtttgctatgctcagtgtgttctcttggcaaaactctgttagtctttgccctgctacattctgtactcccaaagccaaacttgcttgttactccaggtatcgcttgacttcctacttttgcattccagtctcctgtgatgaaaaggacctccttttttggtgttagttctagaaggtcttgtaagtctgcataaaaccatttaacttcagcttctttgatatcagtggttggggcatagacttggattactgtgatattgagtgatttgtcttggaaatgaacagagattattctgtcgtttttgagatgcacccaagtactgtatttcgtactcttgttgactgtgaggctactccatttcttctatgggattcttgcccaccatagtaggtacaatggtcctctaaattaagtttgcctattcccatccagtgtagttcacaaattcctaaaatgtcagtattcattcttgttgtctcctgcttgaccatatccagtttatcttgattcatggacctaacagtccagattcctgtgcagtattgttcttttttttttttttaatcatacttttttttaaattttttttttactttattttactttacaatactgtattggttttgccatacattgacatgaatccgccacaggtgtacatgagttcccaatcttgaacccccctcccacgtcccaccccgtatcatctctctggatcatccccgtgtgcagtattgttctttagagcatcgaacttcactgttaccaccagtcacatccgcatcttatacacagcagtgcatatatatcagtcccagtctctgagttcatcccactcactcttccctccttggtaaccatacattcgttctctactctgtgactctgtttctgctttacaaataaattaatctgtaccatttttctagattccacatataagcaatgttatatgatacttgtttttctctttctgacttacttcactctgtatggcagtccctcggtccatccacatctctccaaatggcactgtttattcctttttatgacttatattccattgtatagatatgtgccacatctttatccattcctctgtcgatggacatttaggttgcttccatgtcttagctattggaaatagtgctgcagttcagttcagtcgctcagtcgtgtccaactctttgcgaccccatgaatttcagcacgccaggcctccctgtccatcaccaactcccggagttcactcagactcacgtctatcgagtcagtgatgccatccccccatctcatcctctgtcgtccccttctcctcctgcccccaatccctcccagcatcagagtcttttccagtgagtcaactcttcgcatgaggtggccaaagtgctggagtttcagcttcagcatcattccttccaaagaaatcccagggctgatctccttcagaatggactggttggatctccttgcagtccaagggactctcaagagtcttctccaataccacagttcaaaagcatcaattcttcggtgctcagctttcttcacagtccaactctcacatccatacatgaccacaggaaaaaccatagctttgactagacagacctttgttggcaatagtgctgcagtgaacatcaaatgcatgcatcccttcgaattctggtttctctggatatatcctaggagtgaaattcctggatcatgtggtagctctatttttagtttgttaaggaacctccgtactgttctccataatggctgaaccaatttacattcccaccagcagtgtaggaggggtccttttttcccacaccttctctagcatttattgtttgtaaatcttttgatgatggccattctaaccagtgatacctcattgtagttttgatttgcatttctctaataattagtgatattgagcatcttttcatgtatttgttggacatctgttatgtcttctttggagaaatatctatttgggttttctcatttttgattgtgttgccttgtttttttgatattgagctgcatgagctgtttgtatatttattgttgtttatatttattgttgttaagtcatgtccaactcttttgcaatcccatgacctgcagcctgccaggcttctctctccatgggattttctaagcaagaatactggagtgggttgtcatttccttctcttggggatcttcccaacgcaaggactgaacccacatctcctgcattgcagttggagtctttacctttgagccacgagggaagcccgtttgtatattaggtggtttataaagctgtgaggttgatatggtcatcaagggaatgagcatagataggcaaaagaagagctccaaggtcagagaaaagaggaggaacttgaggagcaactagtgaggtagaaaattaaatgaagaaagtttattagcagagagagtggtcatttgtgtatgctgctatgttaagtaagataaagactaaggattttccactcgagttaaggaatggatggtattgatgatttatataagaagatgctgagggagatactgtggttgagtgagtttaagagagaataggaggagatgtgaagatagtgaagacttttcctacaaagggaaaagagaaatgggaccatagctagtgaaggagttggggtcatgagatttttttaatgatgaaaaggtaagggcatataatgaaagaatgaaccattatggtgtaagacgttaatgatttcaggggagacagaagaattgctggagcagtgtctgaacaggccatagggaggggggtttggcacacaagtggccggactggctcccggtaggagcatagagactttgtctttgatagtaagtgtagggcagagtatgtggagtagcagtgctgatgggcagatcgatatgatgctgggaatctgtgcatgttgtcttccagttgcctcattttttcccagtgaagacaaactgaaggttatcagctaagataccttggggttttggtgttttggggatgtggcgttttaaggagaaaggtaaagacgttaaaggttgttgggagtgtgtgagagtgaagagaccaggaagagtgaatcgatagacgatatcaggttctttccctgaagacggagacggcagcccactcaggtactcttgcttggagagcccatggacagaggagtgctgcaggctgcagtccacgggatcgcacaggcggacacgactgtgcgcctatgttcacttcagttcattaggttattttacttagtattttacttgctgttgtccagacagcattgtgggcctcctaacttgtcctcagatcaaagttcaatgtaacttgccaaggcaatttaataattgatatgagtcattctcattttaactcacaatcattgggaaatagaacatgaattattacttcttcatgaagtatttgccattatcctgctatgaaagctaaatttggagagatctggttactaattttctttttaaaagtaattatttattgaaaaaattttgaatattgtttttttctttgtggaatagtatcccagctattgcaatctaatttttatactgtactgtgaagcaattgctatcctgttattttattctaagaaccctccaaatttgacctgtctttacttgtgcgtttcctcttgcctgaaatacagattccctctcttaaacccatcccccaaacctttcaaacttagttcacttattgttggaagccttccttatcctctttccaaggcctagttaggtgcatctactttgtgctcttgtagcatcccgaagtacatctgtatcattctacttactgtattgtgttactgggtttttgttgttatgtgtctgcttcctttagaccagcactgttcagtcaagatagctgtcatgatcgaaatgttccctgatgtccaatatgtccacatgcagctattgtgtactcagaatatgtatagtaggacccagtactggcttttacattttcatttaatttaaatttaaatagtcaacacttggctgtggctaccttggtcggttctgctgctgctgctgctgctgctgctgctaagttgctgcagttatgtctgactctgtgcgaccccatagatggcagcccaccaggctccgccgtccctgtgattctccaggcaagaacactggagtgggttgccattgccttctccatggtcagttctagaccttttaaaagtcaaggttcacttatttaaaagatagatccacagacatagaaaacaaacttctggttaccaaagggaaaaagagagagggggagggagggaggaataaattaggagtttgggattaatagatacacactattgtatatgaaatagataagcgaggacctgctgtacagcacagggaaccatattcaatatcttgtaataacccataatggaaaataatctggagaagtatatacgtatgtatacataactgaatcactttgttgtatccttgaaagtaacacagctatacttcagtaatatagtcaaggctcgtgtggacattattagcctataataagaggctaataaggtcttgatggaagttaatgtttaacctaggcaagtagaaggaaggaaaagggctgtaataggcagcgggaatagaatttgaaaaaaattggacttggaaattcataaggtagtttatttaaagaacagaatagtctgtagttaagtgaattgtaggaagtaaaatgtggctaaattagatgctgctggattgtggaaaataatgatagactgaaaaaaaattttaactttgtattatatgagtgggatgaaactggagatttaaaataaaaaattataaaagttatattccagggtgattgaattggtgagtgtttgtagggtagaatcaagatggaaagaggtcaaacaacaaaaaatgtttatagaaagacttggtagtcaggtgtcacactaggccacagttggaggttgggttctttgaaagcagatactgagacattttttgcaatgcaagattttattagaaatcaatacttgcaagaggaagaggctctgtgtgggactgagcagagcaaaaagttctctcatcaaagtattgtgatataagcctcagaaaacctttacctattagcggctctggagtgagagattgtctatcagagagacccatattaagccaagatggctgggcctttgtttggtctctaatccgggcagcagttgtggtggaccttggaggatggggcatttggaggctgtctgctgactatactcacaactgggccagcagttccttccatgaagaaaagcttggtgttgcatccctgtgtctgctacagccagacagtctgtgtgtgggcagtccttccctagaggaaatgttctgaatacttgaaggtgttttgctttttagcaaggtgggggaacagggcacttactagtattcagtgagcaaggaccagggaagtcagccttcccacagcgttcaggacagtctgcatattttcaaattgtttggataatcacgtggtttagaatgagttgctagattttgaggtaggggaaaaaagtgatcataatgaccagagcttagaaactaactttgttttacgtatgagtcattattttcatagagtacactagaagtttcaggaatttatcacataaattggagaaatatcaaaagttttcaatcagacctttgtcaagagttgtttaccacttcggaaaatcacataaattatggcagtgccacttgtatagtattgatgactcagatcctcttctcctcagtctgcagttgtaaccaccacagtcacagtgattctgcatatagatgcgagcacctgatggccctattatgttgtttattacagtaatgctttcacattttgaaatcaatattttgttataacttaatttctttcatttgattgaaagtacaattagggtattatattgactttttaaattgtgcttatgtaggttatctctaaatttcaagaagtagtacaaaatagttgtcataaaggggggaaatagatttgttttcagtaatggtagattaggttattcagataaacttttgatgaagacaactaaaaatctttgaaacattattttaaaaaatcttaatgaatgaagagctgaaaagagcattgtgtgtgtgtgcacagtcactcagtcatgtctgactctgtgtaaccctgtggactgtagcccacctggctcctctatccatggagttttccaggcaggaatactggagcagattcccattttctactccagggaatcttcccaacccagggatcaaacccacgtctcctgcattggcaagcagattctttaccactgtgccacctggaaagcccaatagagacttgccagaccaaaagcaaaaactcaaagaaaaaagaaggtaatgaagtagcttttgccctaggggcagttgccagtctgtttgaagttgggctttggttttggtggacgtcatgggggtgaagaggacagaagtcaagacctagagttcatccaagctgagagtcaaaaaggagaacgactccattgaggatggtacttcaataattttatcattaggtaaaaggtgaaagaaaactgtctgcctattccaatatcaggggaattgtagggttgattggagtagggcaagaaaaaggaaattaattaaactcttcaagtcttgaccatagttttagacctcacactgattgacgtttacatttgtcctgctagggtgatccaggtcccctttaatcatggctcttattttgactggttgtgctcccaaggtctggcagaaggaaaggcaaatcttctgtaggacagagtcttcttcactctgagggaattgccaatagcagttttccaaggacagagaaagcagtacattgtcataagtaaccaggcatatttgaaaaaactaggcaaaattacatgatgtatgtatgtatgtatgtattcagttcagttcagtcgctcagtcgtgtccgactcttcgcgaccctatatattaggttgatgcaaaaagtaattgcggtttttgcactattgaaatttgctgtttgatactggaatacattccaaataaatgtggttaagttatatatcattttaatgtgcacttctcgctttgtgtttttttgctaatgacttattacttgctgtttatttaattttttttgactatagaaatgatgttagacaaaaaacaaattcaagcagttttttaatttgagttcaaaatagcttgaaaacagcagaaacagtttgcaacatcaacaatgcatttgacccaggaactactaacagaggtacagtgcagtggtcattcaagaagttttgcaaaggagacgagagccttgaagatgaggagcatagtggccagccatcagaagttgacaacaaccaattgagagccatcattgaagctgatcctcttaaaactacaggagaagttgccaaagaactcaacgttgaccattctgtgagttcagcatttgaagcaaattagaaaggtgaaaaagctcgataagtgggtgcctcatgagctgaccacaaattaaaaaaaatcattgaagtgtcatcttctcttattgaactcaagaacaatgcaccatttcttgaccggattgtgacttgcaatgaaaactggattttatatgacaactggtgatgactagttcagtggttggaccaagaagctccaaagcacttccctcccaaagccaaagccaaaaaggtcatggttactgtttggtggtctgcttctggtctgatccactacagctttctgaatcctggcgaaaccgttacatctgagaagtagtatactgagcgattcagtgagacacaccaaaaactgcaatgcctgcagctgccattagtcaatagaaaggatccagttcttctcaacaatacttgaacgcatatcacacaaccagtgcatcaaaagttgaacaaactgggctacaaagtttgcctcatctgccatactcacctgacctcttgcagctgactgctgcttcaagcatctcaacaactttttgcagggaaaccacttccacaaccagcaagacgtagaaaatgcttttgaagagttcattgaatcctgaagcacaaatttttatgctacaggaataaacaaacttatttctaattggtgaaaaatgtgttgattgtaatggttcctactttgattgataaagatgtgtttgagcctaattataatgatttaaaattcacagtccaaactgtgatgacttttgtactaacctaatagaattcaagtaatatagttaagatttgtgtagctttaaaaattgagatataattgacacataagtggtttttctttatatacatatacctcaaagtaagttttttacgaagaaagatatagtagtaacatgtatggaaatggcactgtgaataatagtgaagagcataaatggatcctcaaaattcttagatactgcaaatatcactgaagttaaaacagttgttttttatgtttaaaggattaaagacaattgaagagaagcaggaaacaaggccttgtataaagtgacactttgttgttgttcagtcactaagttgtgtctgactgctacctcagtgactgcaatactccaggcttccctgtccttcactatctctcggatagtgaagctcatatccatagagttggagatgctatctaatcatctcatcctcttctgcccccttctccttttgtcttcagtctttcccagaatcacagtcctttccagtgagtggtcttcttcacatcaggtggccaaagtagtggaggttcagcttcagcagcagtccttccagtgaatattcagggcttattttctttaggattgactggtttgatctccttgcagtccaagggattatcaaggatcttctccaacacagtttgaaagtgttagttctttggccctcagccttctttatggttcagctctcacatgcatgcatgactactggaaaaaccatagctttgactatatggacctttgtcagcaaagtgatgtctctgcttattaacatgctgtctaggtttgccatagctttcttcccaagaagcaaatatttttaagtttcatagctgcaatcactgtcagcagtgatcccttgaatctgtttgtcacctccactgtataatggtaagggattgatttagatcatacctgaatggcttaggacttccctggtggttcagaccgtaaaagaagaatccacctgcaatgtaggagacaaaagttctatccctgggtcagaaagatcctctggagaagggaatggcaacccactctggtattcttgcatgaggtatccccatgcacagaggagcctagcaggctacagtccatggggtcgcaaagagtcggatacaactgagtgactgacactgaatggcctagtggttttccctgctttcttcaatttaagcctgaattttgtaaaaagaactcaagatctgagccacagtcagttccaggtcatgtaaaaacaactcttaactgtatggagtttctccatcttggctgcaaagaatataatcagtctgattttggtgttgaccatctgctgatgtccatgtgtagagttgtctcttgggttgttggtaaatagtgtttgctatgaccagtgtgttctcttgacaaaactctgttagtctttgtcctgcttcattttgtactccaaggctaaacttgcctgttactccaggtatctcttgacttcctacttttgccttccaattctctgtgatgaaaagaatgtcttttttttttttttttggtgttagttctataaggtcttgtaggtctgcaaagaaccattcaacttcagctttttggcattggtggttggggcatagagttggattactgtgatgttgaatggtttgccttagaaatgagtggacctcgttctttgtttttgagatgtcacccaaggactgcatttcagcctcttttgttgactatgagggctactccatttcttctaagggattcttgcccacagtagtagatacagtggtcatccaagttaaatttgcccattcccatccatcttagttcatggattcctaagatgtcgatgttcactcttgctgtctcctgcttgaccacctctcatttaccttgattcatggacctgacagtccaagttcctattcattcaccaccagacacatccacaagtgagtgtcatttccacttttgcctggctgcttcatttttttggagctattagtaattactctccattctttcccaatagcatatggacaccttccaacgtagggggctcatcttccaacgtcatctctttttgtcttttcatactgccacataagaatgggctgtttcatactgctttccaggcacgaatactagagtaggtgccattcccttctccagaggaccatgttttgtcagaaatcttcacagtgacccatccatcttggatggccttgtacagcatggctcatagcttcattgaattgcacaacctttgccacagtaaagttgcaatccatgaagtggaaaaagtgacatacttgaaaaaaccaaagagaaatttcagaaacaaaactgtgtcaaatatccctaaggggaaaatttgtcaaattatacctagctgaagaattagttacccagatggtaaggcataagaaaccccagaatgcaccactgagagtcaaagacgtggaaagtgctgaagggagtaaagtgatgtgaaagatagagtgaggtctaacatcattaaccagagctccagaaagagaagaaaaagagattgataccaaggtaatgtttgaaaaggtatttctggctgacaaatttctagttttgatgagaaaccagcaatagatttaagaagctctgtgaatttttaacagtataagtaaaaagacatctctatccagacaaatcatatagtgaaacagcataaacttgaatacaaagagaaaaatcttaaaagcagcccaaggaaggtttctttcaaagtagcaaccatagaccaaaagctgagttctcaataggaaaacatatattcacaaaataactggagatttatatttataaattctatacttaagtatcactcaagaatgagggtaaaataaacatcttgttgaagaaagtccatcagccctttgtaaagaaaattgaaggatgtgttatactttagacagaaagtttacatgtaaaggtctgaggtgcaaggtgggataaagagtaaagagagtgacaaatatgtgtacatgttgaattaaacattcactgtataaaattagtaagaccttaattaaggatgtgttctaagatagtattttctgggggaaggtaaagtgtgttaattgatgtgactttgataattccatgttttaatttctaggctaaatataactctaaaaactagacataacttctaggagaggggaaacatggaatacaaaagaaaaaattatcccaaagaaaaccagaaaggatgcaaaataacaaagatcaggaaggacaaaaaacacggattagggtgattacattaagtactaaatgagctaaatggttcacttaaaaggcaaagattgttagaccagattttttaaaacatggtgttatggagtttatctgggacttatgtaaaagttgtaagataaatcatgcagatttaacaacgtgaatgtggtacaattattttaatatcaaagtagacagtaatttagaaagatgtattggttatcaggggactcccttcaaaatatagaatgaacgattcactaggaagacttaataacgttaatcatacaggatagcctgaaatgtagcttcaaaatagatataacaaagatttacaagactacaagaagtagaataatttacagtaatgggatattttaaatatttcactcagtaattgatagaagcaacaggcacgttatgcaggatttaaagtatttgaacagcataatgagcaaacttaacccagatgatttatagaacctgttgtacccagtggaagaagactacacatcattttcaggcacataaggatattgggaaaattgactgtataaaacaagtttcaacagatttcagaagattgaaataaaaagagcatcttttctttccataacacatttttattaaaatttgtcagtaaggtaattttaaaagcttcatatgtttataaagtgtgtaactactttgaattaatccatgtattaagaaagaaatcacaatggaaattagaaagtgccttgagctggatgagtacataattttgatgtccaattgtggaatttggtcaatctcaggttgttaaaagtgggataaggagatgttatgtccctcacatgtaaaggatcttgacagaaaaatagcgattacccagcaccaggctatgaaagattctttattggagggaaaaaaaaggaatcttatcaaatctctcaatcagatctctagatctagctggcttatgggaaatatgggaacaaggtaagtgatcccgtgagaaaacaaatcaaaccagaaagtgggactttctacagtatacctgacttttttccctgacaaatcagtgtcactgtaaaggaaagaaaaatagggaaaggaaaggataggtgtactattagaataaaagttttgattaatgtaacagtcactccccccagtggaaacaaaattaaaaagttacagaatgcaactaaaatagtacatggagaaaaattcagtcttaaatgtgtttgctgcaatacaagaagtcgcattaattgttaaatttgatatccatttataagagcatcttaattttgataaaacctgaaaaataaagaaggaagcaaataataagagagtcatacagtggatagcaaaggcaaaatttattttttagaaagagaaatggataaatcttgaatgatagtgatcaagaaaaaatgtcataaaataaccaagagcaaggagcaaaaaaaaaagtaggggagagtggaagagaagatggcattacataccctgaagacattttaaaagatcaaagacaaaattatgaatggttttaagccagttaattagaaaacttcacagaaatggacaaattcctcaaacaataacaccgaaggtgactctagaaacttgaaaggagtattacagcttaaaaccagtagtcagagctttcccacaaagaaaaccaatagttcattcaaggaacagaatttctatcttgcatatgtttttccagagaacagtgagagagaaaatgttctcaacgtcttttaaagttagcataactttgattccaaaatgagacaagaatacattttaaaagaatattaacaggttactttcttttaggaacaaagatgtaaaatttctaataagttattaatatatttatctaaataagatgagagtgcattgtaatcaagttggatttatcttagaaatgtaagatttaataccaggaaaataaatttatttgtaataccatcttaacagcttatagatgaaacatatgatcttctgaatagttgcaaacagtgcttgataaaattgagcattcattcgtcataaaacctgaaataaaactcatgtgctaaggttatctactataaaaaaatcaagtttcataatgttggaatattgaaaagtttccctctgagattgggagagatacaatgtccattataattactttttgtcagcattatactaaaagttgtgaccttcactaaagcaagaaaaagaaattttaaaaacttgaattggaaaagaagaaataaaactatcactattcacagactagacatgagtgtgtatttagaaaaatctaaaggtatctacattgttaaaaaacagtaagggtttaacaagattgctgattaggaaaatgaaagatcactttattactatattctagcaaataaggaaaatctaaaactgtaatttcacaatagaacaaaaaatatgtgcctagaaataagtctaaaaaacagtctaagagttctaggatccttgttgaaataaattttaaaagacctagtaattgaagcaaaataccattttcatggattgataaaatattttatcaccattatcattatacccctgatttttcatcatgcccaacaaaaactcattaaaaaataattccttcttcctctcttcccccaccttggtaacctctattctactttgtctttatgggtttgcctattttaggtacctcatataagtgaaatcatacattatttgttcttcagcagatgaaatgtagtgtctgtcttatttcactaagcttaatgttttcagagtccatcttagtgatgacatatatcatactaaccgccaaactgttttcccactggccttccatttacgttctcaccagcagtgcatgaggattccagtcttttcacatcctgtagcacaagctggaatcaagattgctgggagaaatatcaataaccccttatggcagagagtgaagaagaactaaagagcctcttgaaagtgaaagaggagagtgaaaaagttggcttaaagctcaacattcagaaaactaagatcatggcatctggtcccatcacttcatgggaaatagatggggaaacagtgggaacagtggctgactttatttttctgggctccaaaattactgcagatggtgattgcagccatgaaattaaaagacgcttactccttggaagaaaagttatgaccaacctagatagcatattaaaaagcagaggtattactttgtcaacaaaggtccttctagtcaaggctatggtttttccagtagtcatgtatggatgtgagagttggactataaagaaaggtgagtgccgaagaattgatgcttttgaactgtggtgttggagaagactcttgagagtctcttgaactccgaggagatccaaccagttcatcctaaaggaaatcagtcctgaatattcattggaaggactgatgttgaagctgaaactctaatactttggcaacctgatgtgaagaaatgactcattggaaaagaccctgatgctgggaaagattaagggcaggaagagaaggggatgacagaggatgagatggctggatggcatcaccgactcagtggacacaggtttgggtggtctccaagagttggtgatagacagggaggcctgacgtgctgcagttcatggggtcgcaaagagtcagacatgactgagcgactgaactgaactgaagcattggtggttcagtgataaattcttgcctgccaatttctccacatccttaccaacatttgcaattttaaaaaaaaattagctatcttagtggacatgaattggtatctcattgtgaggttttttgttttgtgaaaactgcatttgtggcatgtggggtcttagttccccaacaagggatcaaacccatgcccccctgccgtggaagtgtggattcttaaccattggtccgccagggaagtccatcattgtgagttttgtattgggtgatttactcttaatgacagttcctcaaaaatctaaacagaattataacactacccaggaattgaaaacagagacttgaacagatagactatgtatctgtactgtgtgtgtgtatataagtatgcatatgtgctcactcagccatgtctgactctgtgatcctgtggactgtggctttccaggctcctctgtccatggtattctcctggcaagaatactgcagcgaggtgctgtttccccctccagggcctcttcccaatccaggatcaaagccatgtctcctgcactgcagggggatgctttgctgctgagccaccagggaagcccgtatactagatatctgctaatgtctactaatattgattgcagggttatttacaataagcaacaggtggaaacaaccctcatgtctgtcaacagataaatgaaatgtagtacatacaatgaaatactactccgtcataaaaaggaatgaggttgtgatacatgatgtaacatgagtaaaccttgaaagtgttttggtaagtgaatttagccagacatagaagacaaatactgtaattctatttatatgaaatacttggaataggcaaactaatagagacagaaagtagaatagaggttaccaggggctggaagatgagggaatgggagttagtgattaatatgaatattagtttaatgtcaggtagaacctagtcttacttctcaccatagtgcagacttttttttattttctgtaacattcctgacagatgttcagttgaatacccttaatattaagtcagtttgttcctttgtcaagtatctttactacgaataaagataaaattgtagagctcaaatttaccttctctaggttcaaattcagtcttagtttagctctctgagacagcacagaacagtctgtctctatttcataccctggctctctcattgtttgacatgaacacacacatacacacacagcatttagacctttctttgatactgtttacttgtttgccttcaaacgtattcaggtcatcccatcccatccaaaaacaaaaatactttccctgactctattaccccttgagcttttttgttctgatcactaaatgcctttttttagtaactcactcaaaccttacttcttgaaagtcagtcttccatttctgttacacagctgaatctggtcttttgaaggccactggtggtggtggtttacttgctaagtcatgtctgactcttgcgacactattgactgtagcctgccaggctcctctgtccatgggattctctaggcaagaatactggaatgggttgccatttacttcttcaggggatcttcccgacccagggatcgaaccctggtctcctgcattgcaggcagattcttcaccaactgagctacaagggaagcccttgaaggccactatgtatccttaataatcaagctcccctgtgaactagtgtcagttctcatttccagttatctcttgagtattttaccttaatgtctcactgacatcacagagtgagcaggtccaaaattgtgttagatctttccctttcaatcttcttcccttctggtaatattttccacttagcatacgttatgcttgaaacttcagagcatctctgatttcacctgtcttcttatttttcccgtgcagtcaatggaaccgtcatgattgggattattagtgcttttataagtgacctcagagagctagcttgtccctttttccatgtgagattatagctagaaagcaccatctgcaactacagagtggatcttcactagaccctgaatctgttgacaccttgattgtggacttctcagcctttagatctgtgacatatctatttccaggccactcagttcatggtgttctgtaataagcagtccaaacagactaagacaactgctattgctattaaggcttatgagactgtgacctccaggtcagtaaggactgtcattacagaattcctgatgcactgtatatcatgtgacactagtattaggcctttataaagtatgtgtccaaagtacaagttacttttagaattagatgataaaacatctaagaacttcacatattattatgtccagtacatagaaggtactcgataaatggtggttcctttccttgtaagatagtttatgctttacattcattgattatatttattcattcttttgtttaaagtttaaaaatactgagctcccttgtgctggttgctgggtgctatggtagaaaaatgaatgtcagtctctgtctttaagggtcttatagtctagtggtagaagcagacaaatcaagaattaaggacagtatactatgttaaaatgtggtccaggtgccagaggaatcatagagcaggagcatataattcaaaatggttgtaggggatagaggatggaaagattttttggaagagggatacttaaactgaattttagctatttaagatgtgcaagacttttataaagaaaggtaattaaactttatttagagacagaaagcaacacccaaatacatggagttatataccatatcctgaggatggattgaaagactgaatggtgaaaatgtcagtttttctcaaattgatcagtaatttattgaaatctacacctctgttagtttttctgtggaatttgacagcttgattaacggtttcttttgaagtaaaaagaggcaacaattgccaagatattcgtaaagaacagtaagatgagatgactcctgtaatacattttttttttttcagtcaacaaatttgaatacttgctgtatgtgaagcactgctgggccctggttattaccttggtgaataagacacatggctcccaccaaaggtcacattcaaattcacttctagtgatatctggaggttttaacaaaccacttcctaaaatgtcagatgagtgccaagaatacgaacagacttatcactctaatttttattatatgactttttttatatttaaaatttttcctcactgtatatgttctttgtttatattttcctttgtgaatttttttaaatggtcggaagcctagaagtagactggtttttctttaaatagatctttaagaatgtcagttgtattacagccttgttagaaaggcaggagagggttgggatctgctgctgagtgatgtccagagcagttaacctgaccttggggagccagggagagtgactttgagggttccacaggcatgattttgagacctaggcagttgggtgtctgaggtctagcctgtggggtgtcgtgagtgagtgagtgaagtcgctcagtcatgtccaactctttgcgaccccgtggactgtagcctaccaggctcctctgtccatgggattctccaggctagaatactggagtggattgccatttccttctccaggggatcttcccaacccagggatcaaaccctggtctcccgcattgaaagcagacgctttaacctctgagccaccaggtgcctataataagaaaagggaagatgaataacaaaataacagatgatactatgtaagtagaggttgctaaatgagcttcatatgcttttatgggggtaggtgggtggaaacatgtttaatggcaaattagttgcttattgcattaaataaatgaagttctaccccacctctttcttgctatgaataaaaattaattactagtgaggattaagtacaaaagacaaactcagaaagctttttaaaataaggggcatacttttatgagctcaaagcagggaaggatttcttgagactgaaaaacaccataaaaattgatgaattattgactgtgttaaaagtagaaacttaattattgagactcccttaacagacttaaagtacaggatcaaagatgtttgtaacacatgcagtagctgcctgttgctgataacaagtgtttgtctctcagtttctgtggatcagggatctgagagcaacttagcttagtggttctagctcagtgtctcttgtgaggctgcagtcaaggtgtcggctgggcctgcaattatctcagtgtgggcctgaagaaggacctcattccgtgctgcctcttgcacatgtggcagccttagaagatccagtttcagattcactcacatgggcctcctcctagggccgtctcatagcatggcagctggcttttcttgggatgagagatccagatgagagtgagactccctaaggtgacagccacagtcttttttgggggaggtgaggggggagtggtgagtcaaagtcagtcagttgtgtccagcactttgtgaccccatggactgtagcccgccaggctcctcttcccatggaattctccaggcaagaatactggtgtgggttgccattctctcctccaggggatcttcccgacccagggatcaaagccaggtctcctgcattgcagggagactctttaccatctgagctgctggggtctttttttctaaagctattttccctgtgctctcctatatatccttgtaacttatttattttatacatagttatttgtaccccttaatcccctacctctattttaccccttcctccttcccttttccttctgtgactctgtttctgcttggttatatttatcacttgttttatttcttagattccatatgtaagtatatttgtgtttttctgtctaacttacttcactaagcatgataccctccaagtacctccatggtgttgaaaatggcaaaatttcattcttttttatggctgagtagtattccattgtgtatctatagatagaccacatattctttatccattcatctgttgatggacacttaggttgattgtcttcttaatcttaaaagtgacattctgtcacttgtgccagtctattcagtagcaagtcagtaagcccagcccatactccaggaggtgaggttgaacaagggcatgaatatcaagaggtgacgatcattggggcctttatagatgttatatcctccatgtaatgaagggaccactgttatgaaaatacacctgaggagctgttcactaagacagcaccaagcagaaaaaggacaagaagtctgagaaggcatttgatggtaaaagaaatttaaataactaatgaacagagttaaaagatcattatcctcattaacaattgaatagaaactcaaaccactagagaccattttatacagactacatggacagaaataaatatctgacagcatcaagcattagcaaggatatggagcaatgggagttcttccactgctgctaggagtatgaattgatgaaccactttacaaaataatagttttctacaacctacaatactactgctgagtagttaccctagaccagcggttgtaagatttgagtgtgtatcagaatcacttgtgggggtgcagtgcagacagatgtctgggcccagccccagagtttctgattcagttgaagtggaatggagcctggtaatttgtgttattggcaagttcccaggtgatgggaacttggccgaggaatcatactttgagaaacaaccactgtcctagagaaatgtgtcaatatatggactagaaagcttacttatagaaaaatgttcatagcagcattattcctattaaccccaaagtatacagacacaaaattaaggtgtccatcaatagtggcttagatagataaatcattgtatattcatttatggaataaaaatattgttcagatagaaaatctgtctcccgcatcaacctgtacaaatctcccaaacatatttagtcaaacattagaaaatcacagaagattctatacatgattctgttcataaaaagttcagaaacaaattaactatattgttcaggaatgcaaatcaagttatcaagttctataaaaggtcctactgggattttgatagtgattgtgttaaatttatatattaatataggacatagatatttacaaattgaattttctagttcatgaacatggtcttgatcctcatttattttagtccgttatttccttaaataaatgtctatagttttcaatataaggttcttatactttgaggagtgggggattagttttattcccaagagtcttttctgctattgcaaatgggattaggaaaacaaaaaaacttatcgcagggaactgattttttcttctgtacattgattttaaaaaatctgattcctagagaagtcttattctcaaattcatcagtggattgtcttagatttttaagtaacactcatatgtgcaaatgatgattgttttattttttcctttctcatgtgtgagtctctgttttcacacactgcttagggtcttgcatacaatatttgatagtagtagtgatctgtatcactgcatttttatttttcctatctttaatgggaatgcttctatatgcttggtgatgcagtttctggtttgagagatttgtgtgtgtgtgtctttaatcataaatgggtattgaattttgtcagattttttttacctacatctattgaggtgattgtatgattttcttctgctctggttttcttctttgtgacttccctggtggctcagatggtaaagcatctgcctacagtgggggagacccgggttcaatccctgggttgggaagatctcgtggagaagggactggcaacccactccagtattcttgcctggaaaatcccatggacggaggagcctggtaggctacagtccatggggtcgcaaagactgggacacgactaagtgacttcactttcctgttgaggtgattgtatggttttcttcttctgctaatgtaatttaattcattacatttgccatacaactttttatttagtgctgttacatctgtgcttataaatgagattagtctataactttcttgtgctgttctacccagttttggtatcagaattcatgttgttagaaagacctgattaattttctaagatttttttatggtcttgaagagtttttataacagagaaaatgtttcttgaaataacttaaaatgattatggttttatcgttgcttaggattccctgatttaactacccttttcaattaaccaaccatcagacttcaggattacaattgtgatgatttactttgtagagctgggattacagtttctcttagcaccctacttttctggtcatctaaactcataactgaattattaggcaaaaagttttcagtctttctcttttggaatagctgtttactctctcagaaccgtaaattcttccttgctacaaagcagggttttcttagggtactaaatttatcaacagtagttcagattctcattacttcttgctgatagttgtagcgtgtttttaatgagagtcggcctgtaaaaactctctgacttattagttaacttaaacattgttgccagagtaaacaacctaaaatatatgtctaatcaggtcaaaagacatttgtaacaaaaactgcatttaaaaaagttactgtatgatgtctctgcaatcagctatctgttaaaaaattatttaaaaaatatatacatgcacacagattctgaattgtgattatctgctgtgagagtgtaatgagtatgtggtatagattgggaggaggttagtgaggaaaggctgcttggaggaaataaaatctaaaaatctcttctatctaaacaagttgctagcttggaaaagttctgagccgagttttctcagaagaaggaatagtggtaaagctttgctgctggaacatgattgtggttgagtttattgagtaagagatgaagagaatagtgcctaatgaggcaggagatagacagggggcaaaatccttcaggatcttgtatgctttgctaagaacttcaggttttattatgagtcattgatgagccggtaaaagctttaagcaagaatgattgtggtcagatttgtgttttagagattacactggagaaaggatatgagaggaatggaagtagggcaaaagaagtgggggagccagttaggatgcctttgtaagtagtagttcagggagaaaagataatagtttaaactagagtaatgataatagtttaaactagagtaatgatagtaaacaaggtaatgcatggaatgattgtctcataaagccattaaaataacctacgaagtatgagcagaaaaagatttggaataaacttatcaaagttcatctagtaaatggtgatacagaattgaaacctggggtgttaaccatttgatcatatttttaaaataaaagccaactccactgaagatttttcagcctacctttattacctttatcaccaatgctatagccagaccaaactgtggaaatagttaatttgaacataccgctggttttagaaaaggcagaggatccagagatcaaattgccaacattcactggatcatggaaaaagcaagagagttccagaaaaacatctatttctgctttattgactatgccaaagcttttgactgtgtggatcacaataaactgtggaaaattctgaaagagatgggaataccagaccacctaacctgcctcttgagaaacctgtatgcaggtcaggaaacaacagttagaactggacgtggttccaaataggaaaaggagtacgtcaaggctgtatattgtcaccctgcttatttaacttctatgcagagtacatcatgagaaacgctggactggaagaagcacaagctggaatcaagattgccaggagaaatatcaataacctcagatatgcagatgacaccatccttatggcagaaagtgaagaggaactaaaaagcctcttgatgaaagtgaaagaggagagtgaaaagttggcttaaagctcaacattcagaaaactaagatcatggcatctggtcccatcacttcatgggaaatagatggggaaacagtggaaacagtgtcagactttatttttttaggctctaaaatcactgcagatggtgactgcagccatgaaattaaaagacgcttactccttggaaggaaaattatgaccaacctagatagcatattgaaaagcagagacattactttgccaacaaaggtccgtctagtcaaggctatggtttttccagtggtcatgtatggatgtgagagttggactgtgaagaaatctgagcaccgacgaattgatgcttttgaactgtgatgttcaagaagactcctgagagtcccttggactgcaaggagatccaaccagtccattctgaaggagatcagccctgggatgtctttggagggaatgatgctgaagttgaaactccagtactttggcaacctcatgtgaagagttgactcattggaaaagactttgatgctgggagggattgggggcaggaggagaaggggacgacagaggatgagatggttggatgacatcactgactcgatggacgtgagtctgagtgaactccgtgagttggtgatggacagggaggcctggcgtgctgcgattcatgggatcgcaaagagtcggacacgactgagcgactgaactgaactgaactgtaccttgatggcactgatgattgtttactgtgactggagtactccaatcccatatacttaataaaattcagactatcctttgggatccaggtcaaatatgaagccttccaaatttgcctcctgacacacattgtccctttaccttcttttaaccagagtagtttctttgtattgtaatatgttaatccagcagatatttatgtgatgactgtgtgctgggcactgtgggtacacattgtgaagatatttatatatagaaatagatacagtcactgtcactgtagaacttatagcccagagataacacagattttgaacaaaatctgtgcacacatattgttgtttagtcctgcagtcatatccaactctttgcaaccccacggactgcagcacaccaggcttccctgtccttcactgtctcccagagtttgctccaactcatgtccctggagtcagtgatgccatccaaccatcgcatcctctgccatccccttctccttctgccctctttgccagcatcagaggcagttagctcttcacatcaggtggccaaagtattggagatttagcttttgcatcagtccttccaatgaatattcagagctgatttcctttaaaattgactggtttgatctccttgctgtctagggtattctctagagtcttctgcagtaccacagtttgaaagcatcaattctttggtgctcagccttctttgtggtccaactgtcacatctgtacatgactactggaaaaaccatagctttgactacacagacctttgttggcaaaatatgtctctgctttttaatatgctgtctagatttgtcatagcttttcttccaaggagcaagtgtcttttaatttcatggctccagtcaccatgtgcagtgattttggagcccaagaaaataaagtctttcactgttttcattgtttccccatctgtttgccatgaagtgatggaaccggatgccatgatcttgattttttgaatgttgagttttaagccagccttttcactctcctctttcagcttcatctagaggctctttagttcctcttcactttctgccatttctgcacacatatatttgaattaataattacaaattttaaaaagtgattattaaggaatagtaaagaatgcctgtgggttcttgagacccttagagggtctttgagtcaaaactgtttttataatactaagacattatttgcattttcactgtcaattctcttgtgaatatacagtgatgtggtgtgtcatagtgcagcagattgaatgcagaagatatgaaaattcagatgtcttctgttaaggtagatattaattagtattatagaagaatgccactttccatctccactgtttcttgttgctttggaaagtgtagttatgttttttcataaaaactagataatttgtgttaatgaatatattgtaatttttaagtgaattaagtataaaaatttcttggatataattttaatatagatgaatattgattactataacctacatgaataaagtctctgtgggctcctcaataatttttaagactctaaagggatcctgaagggaagactaagagtcttctgtagtgagaacctggcttatgttggtagcttccggagaagtaaaagataccttatgtttccttttaaattcttacgttttttctaaaaagtagagtctggttatctctgtatctccaaagcctgtaattatttgcacataatgggtatgtttgttaaattccatttttaagttctgttgtagatggtacattgtttgaagcctttgttcagatactgtcatttctaattgctaaaggagatgtatctggattcagattcctcttcttacgagtttgagcaagttacttaaccttattgagccttaccactcatctgtaagatggaatacatattatcttactctgttgtagtgatatgaattaatacatgtaacctcattagtaaatgatatttactattttattgtgtgtttttacaaacacgcctatttctgtgcctgttgttattttacatacagagcatgtacattctgggcttagttatgttagtaggcagagaggtctgtgaataaataagtatataattttaaaaaatcaccatttgagtacatacaacagtttatcaggaaggttgaaaaccaaaataatgtattttgtggttattcatcttcatagacaagggaactgaaacaaaacgtgggcttggaatagttttaagtaactccattatactataaggatagggacggtgcctcacatttactgaatttttgaacagtattaaatagctgctgctgctaagtcgcttcagttgtgtccgactctgtgcgaccccatagacggcagcccaccaggctcctccgtccatgggattttccaggcaagagtactggaatggggtgccattgccttctccattaaatagctggagatacttgaaaacatgctttagaaatcttgaaaaataagtactgtagattaaaggttaagccccaaaatattgcacatggctaattgaaaaagtaactaaaggcaccatggaagaaaaacagaattgccctgagagaataatatgagatgttacagagtgtgactaaatatgatctagtaaaataagagaacataggacatcctacctgtggtggattctaaattcagtggtttaaatcctaactgtattaaaggtagactccttaagatgacagtgcagaatgtttgccaaggggtgaccaggaaatacgaagatcaagtgactgctttgcttttcatagcagaaagctgtaggaaaattatcctttatattctgttttgaagcagataattcagttgtgcttaaaaataaaaaaagagaaataatgttttttccttaaataagataaaaactgtaagttggctaaacgtctaggtttggacctagaacttggttacgttttgaatagaaagggttatagacattctgttcttggtacagtatgaagttttctggggtgtgtgtgtgtgtatgtatcctatatatatacatacatatattcatagtatttcttatttgaagattttgtcagtttaaggtttacttgatttttcattgattattactgtgtattatctccatagctgtagtcattgaacttgcagtctgttaggttgtgatctcatttgtatttaaagcaaatgaaaagctatcctgctagttacgtttcctatttaagttgatcatgcagtcagagcgagttgattgaaaaaggttgttaactgaaaatggttaaaatggaaaattatttaaagaaagaaggagatacatattttaatttattaaaacatataaatatattcatatgcctatattttgatatagggtttaagttttttgtttgattaatggtgttctgagtggagttacatgtttttaattccgcaaccatacggtaatgcattatccgcagttgcctgttttctttttattttaatcatctgtgagttcagtgaacaaattagtggagattctaggggagagatgatggtagcttggactagcaggggaagtagtaagaagtaatctgatccaggatgtatttcaaacatggaaccaagataattttctcttgtactaatttccaaatgtataacttttggacctgaaactgaaaaagagaaaccactgctcagaactgaatatgtgttctggaagatccagtaagatcttttttcttcacatctgaaatccaccttttccagtgagctccattggctctacctttgaaatacagtaagtcttcaacacagaaaccttctagtagtgaactttaaagtaatatgtgaatgtgcaatgtgtcaaagtcctattgttgacatctttaccatctcccaacccctgcttcctcctccgggcagtaattcttgcctgttcactcgctaccagcctctgtatgccagctgttgtactgtactctgagattaaaaattattttttgtgttttttatatatcatttctgtgaaaagtattataaacccattacagtacagtcctatatagctgatggtgttacttggttacatcggctaattttgttggcgttatgaacacactcttggaacggaactcgttcatatgtaggggttttgtgtgcctcttaaaccaagtaacttcccactgttttctttgccactatcttaggcctcactgctgtcatccccccagttagtgcaataatcttccaactgatgttgcccccttatattttgttctgtacatagcaatcagtcagtcagtcagtcagtcagttcagttgctcagtcgtgtccgactctttgcgaccacatgaatcgcagcacgccaggcctccctgtacatcaccatctcccggagttcactcagactcatgtccatcgagtccgtgatgccatccagccatctcatcctcgatcgtccgtgatgccaagcagccgtctcatcctcggtcgtccgcttctcctcctgcccccaatccctcccagcatcagagtcttttccactgagtcaactcttcgcatgaggtggccaaagtactggagcttcagctttagcatcattccttccaaagaaatcccagggttgatctccttcagaatggactggttggatctccttgcattccaagggactctcaagagtcttctccaacaccacagttcaaaagcatcaattcttcggcactcagccttcttcacagtccaactctcacatccatacatgaccacaggaaaaaccatagtcttgactagaaggaccttagtcagcaaagtaatgtctctgcttttgaatatactatctaggttggtcataacttttcttccaaagagtaagcgtcttttaatttcatggctgcaatcaccatctgcagtgattttggagccccaaaaaataaagtctgacactgtttctactgtttcctcatctatttgccatgaagtgatgggaccagatgccatgatcttcatttctgaatgttgagctttaagccaaccttttcactctcctctttcactttcatcaagaggcttttgagttcctcttcactttctgccataagggtggtgtcatctgcatatctgaggtgattgatattgttcccggcaatcttgattccagcttgtgcttcttccagtccagcgtttctcatgatgtactctgcacagaagttaaataagcagggtgacaatatacatccttgacgtactccttttcctatttggaaccagtctgttgttccatgtccagttctaactgttgcttcctgacgtgcatacagatttctcaagaggcagaacaggtggtctggtattcccatctctttcagaattttccacagtttattgtgatccacacaatcaaaggctttgacatagtcaataaagcagaaataggtgtttttctggaactctcttgctttttccatgatccagaggatgatggcaatttgatctctggttcctctgccttttctaaaaccagcttgaacatcaaggagttcatggttcacatattgctgaagcctggcttggagaattttgagcattactttactagcatgtgagatgagtgcaattgtgtggtagtttgagtattctttggcattgcctttctttgggattggagtgaaaactgaccttttccagtcctgtggccactgctgagttttccaaacttgctggcatattgagtgcagcactctcacagcatcatctttcaggatttgaaacagctcaactggaattccatcacctccactagctttgttcgtagtgatgctttctaaggcccacttgacttcacattccaagatgtctggctctagattagtgatcacaccatcgtgattatctgggtcgtgaagatcttttttgtacagttcttctgtgtattcttgccacctcttcttaatatcttctgcttctgttaggtccataccatttctgtcctttaccgagcccatctttgcatgaaatgttccttggtatctctaattttcttaaagagatctctagtctttcccattctgttgttttcctctatttttttgcattgattgctgaagaaggctttcttatctcttctgactattctttggaactctgcattcagatgcttatatgtttccttttctcctttgcttgcctctcttcttttcacagctatttgtaaggcctccctagagagccatttttcttttttgcatttcttttccatggggatggtcttgatccctgtctcctgtacaatgtcacgaacctcattccatagttcatcaggcactctatctacataccagtaggaataattatttaaaatgtaacttatataatgttactcatttgcttagaaaactacacttaaaacccaaactttaaattgtggtttcaaggtttatataatctggcccctaccagcttctatagcttcatcttctagactgtgattctcaaaatgtggtccaagggaagctggaggtccctattctccttttaggagacctgtaaggccaaaactattcataatactaggatgatatttacctttttctctctaattctcctgactgtagaatcaagtttctatatgctacatgatctgtgttattgttacaagttaatgtagaaaccagtatgacaatctagctaccttctgttaaactagtcattaaagagaattgcaaaaatgtaaaactgccattcttctcactaaattttttgttttggacagtggacttgttttttatttttaaaaaaagttgtttaacacataacagttttattcaaataatttaaaacataatttcccagtctgatttcttaatagggcaaatatcattagatataactcacagaaacagcagtttgggggatcctcaataatttaagagtgtaaagggatcatgagagcatactcataaattttgagagctattgtcttgcactgtatgcattttcttacgtcacatcagcctcactggctttcttgttgtttgtagaatactccaagcatacttgtaacctaggacttttttcattaattgctatttttctctacctgaagaatattttcaccagctttctcaccttactctcatatctgttcaaacgttactacctctttgagaagacctttcctaaccacaagcctacagtttctgaaaaagccttctcagaacttccctggttgtcccgtggttaagactctatacttccacagcagggggcactaattctatccatggtcaaggagttaagattccacatgccacatggtcgtggtgtggccaaaataaataaataaaattttagaaataaagcaaaagagcctctccctactctctgtcttttgccttgattgaatttttttcaaagcattgattcactgctggaaattatacatttgttttcttgtttatttgttcccttaatagaatgtatactccatgagggcaggagctttgttacatgtctaaagcctagaatagtgtttggtacataaactaaactgttaatcagtaaaaagaaaatacacagaaattgaattcattagtaaaaatgtaagtgatttagaagatagactaaggaaatctaacatgaattaatagatttttagaaggaaaaaagaagcaaggaagtaatagttaactgaataatagaaaactatatcctgacctgaagaaagacttgaatctgtatactgaaaggcagaataataagcagaagttatactttgtagtgaaattactgaatattagggataaagatgatcagaagcttagaaagaaagctcagatagaacaaaaaggaaagattataaggtcaacaatggcaacactgagaggtaaacaacagctgtgattaagaatcccatacctcatcaagatattttcagacacagaaggaaccaaagtatgtccatcacccatgtacactatgtgtacatttgagagagatgattagtaaaactagaaatcaacatatatagaaaactgatctcatatcttttaacataactttcttagaattttgaaacatccttttaaataactggttctcaaagtgtgatgcccgtaccaccagcagcagcattacatgggaatcttaaaaatgaagactctcctgtagactgactgaatcagaaactctgagcttgatactctgcagtctgtattttaagaagccctttgagtgattctaatgcatatttaaagtgaattgcttgtagaaactgtgtatttagattttttcatccattctcatggtctttatcttttaatttgtatctgtacactatttacatgtaatataatgatatatttttaaaagtgtatttatgtacttacttttggctctgctgggtctttgttgctgcacagactttgctctagttgcgaagagtgagcagggggctactctctagacgtggtgcaccagcttttcattacagtggcttctctttctatggagcacaggctctagggaacatgggcttcagtaggtgtggcatatagcttcagtggttgcagattctggctctggagcacagtctcaatagttgtggcgcacaggcttagttgctctgtggcatgtgggatcttcatggatcagggatcgaacctatgtctcctgcattggcaggtggattctctaccattgagctaccagggaagcccagtatgttttgatttaggttaaccagtttagtaattcgttttctgttagtttcctctgtttttcattactctgtttctcctttcctgccttctcttaggttatttgaacattcttttagtattccatttaaaatttacctagtgtgtttatttttagttatatctctcaatagtttctttagtggttactctggcagttgcagtatatatactaaagttttcattgtctgcttagaataaattatctactcccctaagtggattatggaaatattactactatatagatctctttatgcccccccccccgcccccaccaccagcaactactttctgttatccttgtcttgcatgtttcatttcctttatggaaagtctcattaggaaatgctataaatttttctttcagctattaaacatatttaaagagtgtaagaggagggtattaatgtattgtgtttacccagatatttacctttttttttttttttctcttcattcctgctctttaaggtttccttttgatacaatttctcttctgtttgaagaatttcttttagtaattcttttggtagcagaatttttcattttatttatctgaatatatctttattttacttcattgctgagagctattttcactgggtataaaatactaggttgacagttcttttttatttttaatttatttattttttattttactttactgtattggttttgctatagacagttcttttaatactttaaaatgttgtgctactactttctgccttcatggtttcttttgagacacctgtagtcatctgaaatgttattcccttgtagtttatgggtcatttgtctctgctttcaagataatgctttgtttttagttttcaacacttgatgtgtgtagtatgtgtttctgtgtacttacccattttgggactcatctttcggaatctgtagttttatgtgttttgaggagatttcaaccagtatttcgtcacatattttttattgcttcattttccttttcttttggaagtcagtgacacaaatgttagaccttattgttattgccctgtagaaccccaagtttttaaaaaattttgatctctttttttttttcttctgttaagactggataatttcagttgatctgccttcatgctccctgactcctctgtgttcattctgctgttgagagcatccattgagttttaaaatttttgttattgtaattcttactgtcttctgttgtttcccgagactctagttttccattgagttctagagtattattgattgcttgttgaagcatttttattaaagttgctttaaagtttttgtcagctaactccaacatctgagtcatcttggggtttgtaatttttgcttatctttttcatgtgatgtgggggttttcctagttctttgtatgctgagtaattttgaattgtttgctggaccttttgaatattatgttaagagaattaatctgattttagggaatgatagtcatataagttcacaatgagacaaagaagtgttctctgtgattctctcctttccctcactccttttttttttttttgctgtgactgtgttcaggagagcaaaaacttacagcatcctagttggaagatagaccaaagcccttttttgtagttacctgaatcagaaaggtgatgtcgctaaagatttgggagtaaagggagctacctgaaagcacttttgatgctaagattatctagaacctgggagatgtgtatactttcaagtagggccttttgctattagttaataaaagttgagaactatcataaatagactgaactaataatattaatttgaaagagttcagttactttttttccctttaaggttttaacatatccttttaaaatgtagttttgaatatgtttgagacctgtttttattttaaactttcttaaaagttaatataaaacatatacatcttcatattgtaactcatagaaaagagtttattgttacttgattatcacaatagattccttaagtatataaaggaaagaattattaactgcatttctttgatcaaagaaaattatcttaaaagtttaagcagaataagatttcaacagatgtcagaatagtcttaagttctctgtcactatcatagctttattttgtggtaggtttataatccctgttaggaaatgttttctaaatgctctgtaattgatattttatcctgtaccctgatgacaaaaagaggcctctggttacctgttttttaatctttgctcagatattcatcactgccctgccatgctcagaggtgcaggttcatatacaatgatgatttctcttccctttacccttcacctctctcttcttttccttcttcttcttgttttttgttgttgttgttgttattgttgaatctatgtaaataagatctattgactatatcaagtttcagtgaaagttacctccttgtgttaaaagttatctttttcaatttatacttggtaacttgatttgactacttgaatttataaggattattgcttatcagatttttaaaaatcattagcacatgtaacttctgttcataacacattgaatagaactatttatataaccttttacatgagcagaatagtggatacctctagcttatgaatatttctttcacgtgtctatttttcagtgttaattaatttgagccttttatctgggctttccagccaatcacagaattcattatgaagctcgaattagatgggcatgtttgcagccagatgcatttcttcctagtttttctgtcatctccagggaatctggtcttctggtgtcttcagccaatggagactaaaccaaactcttcttttaaatacattatttggcaaaaacagtgttggtcaaaacagaaacttaactcattcagcttaatcaaaaagagggaaatttatgggaaatatactagagtaattagttgagctataggaatcagtcaaggtggacctcaggttgcccagcaccagtgagttctaaatatttcccacctttttctacttgtttcttaatatttgctccttatcctctgttggagatagacttacccatgtgctggaaagcatggctataagtagccctaggttcatttgcttctacttaaatgactatagtcttatgtgtatagtgaagaacagatacatagccacacatataatagtcaggaaagctacatttcaggaaaattgctgggaaacaatttaattgttcctaactagaatcatgtgcccacaatactcaattacctggtctagtgggatgaagtacatgattagcccatcttgtatcatgtgtccttcctgtggccaggtggcagtgtgtgtcgtcagaagtcaggtgttaatataattattatggatcaaggaacaccctaatttatgtttattatctcttctttatagatagctattttgctacctaattttttctcttttatgattgggagaaaagaacaacattaaatttcaagtttttcagtttcctggataaatgttacttaaaattgtatctcagatttcttataactgtattgtttatttctatatgaatcggcttaagtatgtgctaatcagtgtgtttggggcttatggtttttgttcacattaaagacttcagaggaaaaaacctagttacccatttggttatgccatgagatggtgtggctaatggaagaaaagaatgttctagcagaaggagcagtgtattcaaagaccactaaaatgtagtttgatgtaatacatttcttcatttctcccatgacatctagtaatcattcttcctaagcccaagtctcagactgtttttctatagttttcttgtgcctatagatttctagataaattagccttccctagtagtcctttgtgctctttatgcatatccagttttcctacctggtcacaaagaaggcatgtgactagttctattctttttgttataaatatgacctgtatcacctcaggtgacataccctatgtctagttaccaacgtcaggccctccagagtatttttttttcctatccagcctggtgattagcattattaaaaacagtgactactgctctgttaacctgcatccctgtatgactgcaataaacagggcttcccttcctacctgaaatagacatatagcatgaatgaaaactaaacttattttgtttcaaggcacagagatgggaaagtgtttctttttttcctgattgtaactacagagatgggagatccttaacagagtataatgtagcctattctgattgcataccttccctggaaaatggctcgttgatggagcttctgatatttaaacatttgatgataatattagtaactaataattatattttcaattatttcttaagcaatctgctcaatgttttataaaatatctcactaaattcttaatgttttcctgtgaggtaagaactatgatgaggtggcaacttgcctattttagtgcttattttcacttaatatttttattttacttactgacatagtctgttgattgagtaaagtatagttgatttaccaatacagtgttgtgttagtttcagatgtatagcaaagtgatattcctttccaggtttcatttctattatagcttattacaagatattgaatagagttcccagtgctatatagtaggtccttgttgtttatctgttttgtatatagtagtgtatatctgttaatctaaattcctaatttatccctcacctcaggtaactctaaatttgctttctatgtctggaagtctgtttctgttttgtgaataagttcatttgtatcatttctttagatttcatatatcagggatatcatggtatcatatgtttactgaagactcttttgaatagtagtggtgagtagtttttgtctgacttacttcattaagtatgataatccctaggttcatctgtgttgtggcaaatggtattatttcactcctttttatagctaagtaatattccactgtgtatttataccacatcttccttatccattcatctgttgatggacacttaggttgcttccatgtcttagctattgtaagcagttctgcgatgaacattagggtgcatgtatcttttcgaattagagttttcatattttcctgatatatacccaggtgtgggattgctggatcatatggtaactctatttttagttttttaaggaactctgattttgttctccatagtggctgcaccagtgtacactcccatcacagtgtaggtgggttaccttttctccacaccctctccagcatttattatttgtagactttttgatgacggccattctgactggtgtgaggtgatacctcattgtagttttgatttgcatttcagtactaactagcaatgttgagtatctttttatgtgcctgtttaccatctgtatgtcttctttggagaagtgtctgtttaggtcttctgcccgttttttgattgggttgtttgtttttctgatattgaggtgtatgaatgagctctttatatattttggaaagtaaatcatcttcagtcatatcacttacaagtattttactccagatatagcctttttaaacttatttgtttcatcagtatcaaatttatgcttggcatctctatgtctatctgcatacataacttgtttcagtatggaatcatgttataatcttgaattgtgatttcatcagtctgctctgagcttacccagaatatagaattttttatattttcaggtagccagcacctataaaaacctgcttcttgctggaacacttaagtgctaggagtcaaacagtgattgatgtgtaaccgatctcaactttactgaacttatggcccttacaggcaattatgccccagttatttatttgtgacagtgttttcccacaaatctttgattttaggatgtggcacatagaagtgtttcccatggaaacagaaagtgctttgggataggagacttacagtggaagaaaattatgactgagttgtatcagaattagtagcagaagacatggtatgtttttaagatacgcaaaagtatttgcagttgaaagtcctgaatctctgctgcatctgtttcacatgatatgaatctgcattttcattcagttttattcctactccaaatataatttcatttaaatcagttatatgtatgtggcaaaaatttgatctgtttcctaaagactagtagtggttagtagctgttgaactttcagtttaaaaactaattaaattagtggacaattttatggacagtttagaaataattcatttatgtgctgttttcttttgtgctttgtcaggatcctggaaatgttagggtttacttactcttaatcagccataagaaatggtttgattcacttattctgttttagataattttaatttccaagcttaactcaaagtcaggacattttctatttgttgatttcatgagtaccactttcctatttttatttctcactgtctactggccaaagtaattgtgaaactatgttcaacagacttttaaatcctcaacctctttcttaagctcagaaaagttccagatatctgtcttgcccttgattataacccttcttcagccttctcaagtaaaactttcttcacaacttacagacttaaggacgaagattttagtaaggaatgcctgtaagaattaataatatccttgactgtctagttccttctagtccctctcccgatttatgggcagaacaaaataccaactggtcaccgcctctctgcttgcactcaggcagttgaatgtactgctctgagtttatgccacaaacctcaaccaggtttcaacagtgtctggcagtgctgctacttcttcttcactttcccttttaatactgtgtttccactcattgcaaacctctcacagcccccactctcatctgtggacctcacctcaaactttattgagaaatcagatgcagctgtcatcatctttgcatcactgtatctgcaaacctacctccattggtcttcaggttctcagtcttcctttctcttgttactaagagaccttccctgccagtctaattccacttcttgtgactcaggttccatctcttcttagtgtctctggggcttctttcctgcagctggcatctctttacacatcatcagtttctgtcttttggttggattttccctccagcctacaaacatactctattatctgccacccctgatacatatgcaaatacatataaacatgatgacaaactatatacagatacttatatttcattcttctgtcttctgtcttactatttcttgttcctgttcttatctaataaattatcttcattgaatcaagtttttctcctacctcagtgtctgtttcttctcaagcatttttgtggactctattctttatcaatcttctcaatttgggtgggctctagggttgagtcttctttgcctatactctgttggagatttccttattagcattctgtgacacctaaatatatatcctgcctcatagttcttcctgagtgctgaaatgcatagccaactgcctacttgatcagttaactaacctctcttttaggtgatataatacttgatttcttcccctagagattccccacttcagtaaatggcgtcactgtccatcctgttatctactcaaaattttgaggtcagctttgattcttatttctctcatatctaatttaacaaacacctctgtgccacagtgttctcatctataaaatgatatgataattgtcagtaataaaatatcagattatgacacacatacgtctgcttttgaaaattcaaattctcatatcttagaataaaattaaagcaacttaccatgactttcaggactcttcataaccacaccttatgtctagttgttctgactgctttttgttatcatttttgctatctttaattctccactttaaaacataactttttatgcgatgtctttttggtagggggtgggaaagcagcttcagtttttgcttttgcttgttttgtggtattaaaatgtaaagacagtgccaaattttaaatcagttgatgttttttcacctagtgaatcacttatctttataaatagacctactatgtttttctggttttgtaggagattggtaaaaattcctagaagtgaaattgctaagttaaaagataggagtgttttcagacctgtgaatcctattgaggtaaatttttgagacgttacatgaccaaaaaggtttcatttaccctcatgcttgattggtagtttgcctgagggtagaattctaggttcagatcatttttatataggacagtgaaaacattactccattgttttttctgtttaacagctttattgagatgtaattcacatatcacagaatgcatccatttaaggggtatatttcagcagtttttaatatggtcccagagttgtgcaattgtcaccctagtcactgtagaacatgttcatcaccccaaagagaatcccccagacagcagtcattccccattcccactaatccaccagtcttaggcaacaagtaatctactttctcttttcatgttgctgatcaaaagtctgatattaattctagttattttataggaaccatttagggttttcttttcaactctgaatttctgaaatttattcatggaaactaggatttattcagacataagtcttattttacttactttacttaaaactttataacctttttattttgtactgatatatagtcaattaacaatgttaaaatactttcaggtgaacagcaaagggactcagccatacatatacatgtattcattctccatcaaacccccctcccatccaggctggcacataacattaaacagagttccctgtgctatacaataagtccttattggttatccattttaagtgcagcaatgtgtacatgagcttcccagagtccctatcattccaggatgtctgactctaggtgagtgatcacaccatcatggttatctgggtcatgaagatctcttttgtacagttcttctgtgtattcttgccacctcttcttaatatcttctgcttctgttaagtccataccatttctgtgctttattgtgctcatctttgcatgaaatgttcccttggtatctctaattttcttgaattttcttgaagagagctctagtcctacattaaaagagatctctagtcctgcattaaaaaatacatatagagtactgagttatatttgagttagattattttgtggctttatttttttgtttttgtcaagttttgacacctagattttgctagcttcataaaatgatttgaaacattttcttttttatatttactatcatctattagtgtgtttccttaaacatttggtagaaaccattgatttgaacctgataccttcttgttgggaagaggggcatcagtgcctatagtttttttttctgccattgtcacccttcatttctttccatagcagttatgcattatattttagcatagacttttttttttaattcaggttttttggagagtgaattttgccgtttgtaaagttgtgagacatgattggttgtttactaatatttagttcagtttaattgctcagtcgattccaactctttgcgaccccatggtctgcagtacaccaggcctcctgtccatcaccaactccaagagtttagtcaaactcatgtccattgattcggtgataccatccaaccatctcgtcttctgtcatccccttctgctcctgccttcaatctttccccgcagcaaggtcttttcgcatcaggtggccaaagtatcggagtttcagcctcagcatcagtccttccagtgaacattcacgactgatctcctttaggatggactggttggatctccttgcagtccaagggactctcaagagtcttctccaacaccacagttcaaaagcatcaattctttggcgctcagttttgttttatagtccaactctcacatccatacatgaccactggaaaaaccatatccttgactagaaggacctttgttggcaaagtaatgtctctgcttttcaatatgctgtctaggttggtcataacttttctttcaaggagtaagtatcttttaatttcatggctgcagtcaccatctgcagtgattttggagcccccaaaaataaagcctgccactgtttccactgtttctctatctgtttgccatgaagtgacgggactggatgtcatgatatttgttttctgaatattgagctttaagccaactttttcattctcctctttcactttcatcaagaggctctttagtttttcttccttttctgccataagggtgatgtcatctgcatatatgaggttattgatatttctcctggcaatcttgattccagctgtgcttcatccagcctagtgtttctcatgatgtactctgcatagaagttaaataagcagggtgacaatatacatccttgacgtactccttttcctatttggaaccagtctgttgttccatgtccagttctaactgttgcttcctgacctgcatacagatttctcaagaggcaggtcaggtggtctggtattcccatctctttcagaattttccacagtttattgtgatccatacaaaggctttggcatagtccataaagcagaagtagatgtttttctggaactctgttgctttttccatgatccagcagatgttggcaatttgatctctggttcctctgcttttttaaaaagcagcttgaacatcaggaagttcacggttcacatattgttaaagcctggcttggagaattttgagcattactttgctagtgtatgagatgaatgcaattgtgcagtagtttgaacattctttggcattgcctttctttgggattggagtgaaaactgaccttttccagtcctgtggccactgctgagttttccaaatttgctggcatattgagtgcagcactttcacagcatcatctttcaggatttgaaatagctcaactggaattccatcacctccattagcttagttcatagtgatgttttctaaggcccacttgacttcacattccaagatgtctggctctagtgagtgatcactccatcgtgattatctgggtcgtgaagatcttttttgtacagttcttctgtgtattcttgccacctcttcttaatatcttctgtatctgttaggtccataccatttctgtcctttattgagcccatctttgcatgaaatgttaccttggtatctctgattttcttgaagagatctctagtctttcccattctattatttttctctatttctttgcactgatcatgcaggaagcctttctatctctccttgctattctttggaactctgcattcaaatgggtatatctttccttttcttctttgctttttgcttctcttcttttctctccttctttgtaaggctttttgcttctcttcttttctctccttatttgtaaggcctctttagacagccattttggttttttgcatttctttttcttggggatggttttgctccctgtctcctgtacagtgtcatgaacctccatccatagttcatcaggcactctgtctatcagatctgatcccttcattctatttctcacttctactgtataatcgttaagagatttgatttaggtcatacctgggtggtctaatggttttccctactttcttcaatttaagtctgaatatggcaataaagagttcatgatctgagccacagtcatctcctggtcttgtttttgctgactatatagagcttctcaatctttggctgaatataaccaaagaatataatcagtctgattttggtgttgaccatctgttgatgtccgtgtgtagagtcttctcttgtgttgttggaagagggtgtttgctatgaccagtgcagtctcttggtagaactctattataagcctttgccctttactaatattacttggttttaatttctgtgttctgctgaagacataaaaaaaggataggaaatcttctagtacctttcttgaaattttttgtttttaattctttcatttcccttttaggattgtaacaatttttcttgttttttcaagaagacattttaagccaaaactctgtgtctgctgttaactttacaatatcttattctactttttaatgtatcatcaaagtattatcatcatcacagtttcttttttcttattctttaggaaaatctgaaagagtttgcttgctcagactcattttttctaattataactgagtgatcatagtgatttttcttcattctttggatataaaattacttttgtttggaagttaagaaacctgcctttcaggcagttgtggtttggccgtgcattatgtaaaccttagcattttctactgccaggaagaaaaggaatcagttttaatcggctcagtctcctcgtttctcgcctgctcttttccttctctaagttttttttcttttccctttctcccattctttgggtgaatggttctttaccctgactccgcgagttttatctgtggaactttaaggggggaaagaaaaaagagaggctgtaggtaatagagtacttaatttcttggactgtaaagaattactgaactaggattaatttttctctcttatcctattctgaagaaagcttaaatcagctccagcactactttgactacttgtaatgactaagacaccaagataagtgatgagggaataaaagattaataaaacatatttctgttttcaaagtagctaatagacatgaaaaacataatcagttttagcatatcaaattctgatgataaagcagtcctgccctgggtggtcagtgaactcatcatagagggagtttgtcattttctgaggtgaagaaactgtaagaaaaacagattttgatacaggacttggtggatagatatccagttaacttttgaacatgttaagtttgaaatactacttatcttaaaaagtatgtaggaatgtacagtaggcacatggagaaaaataccgtggagttgagagaacagagctggatttaaaaatttggacttcatcagtacatatataaagccacaagattagataagattacttgggaagtaagtgtagctagaggaaagacatcctagtgcttcctggggatatgagaaattagccaaggattcataaaggaaaaatattgtaatatctgattatagaaaaaaactagaaacttctgtcatttcttctcaaactttaataaggatcattttgttaaagttcagtaagtttgaaatggggcctgagattctgctactcctacaaacttccagaagattgtgctgctggtagtctatgaaccatgctttgagtagcaagactgtctatgactaaagagacaaagtaaaaagaaggaaagactgcagcgtctgtagcagaataaggattaatatccagaataaaaggcatctataaactgaaaagaaaaaaaatagaagggagaaagaatatgggtagagaatttttcataaagaaatttaaatggtcaatcagcgtgaagaatgctcaacttcctgggaaatacacattgaaacaagaagatcatgtttcccccattaagatcaggaaaaattttaaagtctgataatatacactgttggtgggattgtggggaaagtgtggactgataccctaacaggaggtatcttggtacttttgtccttttggaagaccatttgccataccatttgcacatttttaaatgtgcatatccttcagtccaggaatcctgtgcctcactatctaaaaggaacttctacctttgcccagaaagacatttcagagccatttagaaacattgtttaaagctgggagaggtgaaatctaatgtcctccaggaagaaattattaaataaaccatgtgcccttgtacatttaaaaaattatctcacatttttcattataaatttaagtaatttaagtggccatgatttctagagtatatttatgttaaatacattttcagtcacaccataaaattacagatttaaatcattcagtttatagagagtatctgtagacagtatatactgtagtgtaatttgcaaaaagcatgttctcacaccactcagataaattgaactcatttttcactaagaaaaaaaaataatctgattgcttatttatcttaaacatgtaatatgtgcctatactatgagcactagacttctgaattctcagttgggtggctagataaatgttaaggcttgaaaccttcccaggaatttgtttcactgataaaataaggtcttgctcttaatatctaccccccttttttgtcaaggaatttcccttcttttcttgtttgttaggtagtttgaagtttatatagctcagaagagtacacgttagtagatgcacttgagatggataagaattttacctttctttcacaaagtggagaattacaaagtagtgatttttaaaggagaggaagaaagaagaactggtttttaagcagattagttaggaagaatacaaatagacactggaaatctggaaatgattctcctaaaatcattcatatccacctaaccttaagttacctttgaagtttgaagccattgaaataagcaatgtcctaacattgtgaaatgaatattgtcttgtctgaacttatgatgttgtaatacagtcatttaaaaggtgtaaaataggactaccttggtggtacagtggattagaatccacctgccagtgaaggggacatggatttgatccctggtccaggaagattccacatgccacggagcagctaagccctgcagcacagctgctgagcctgtgtgcctggagcctgtgttctgtgatggaagccaccgggaggagaggcccgcacgccacagtgagcagtggccctccactcaccccagctagagaaagtctgtgcatagcaacgaagtaaaagaaagacatgaattaattaattaattaaaaccaaaactatattaaaagaacaaatacttaaaagcactaaagaaaataaaagcaaaatacatacatattgacatggaaagaattctgaggcatgttgtttggtgaagagagcaaatgttgagaatattttaacatgtaatatttatatgtatttgtctattttatatatgtatgtatttttgttttttatttgagtaaaaagttatggaagaatgtataccaaaccataaacaggacttactttttttggcaggacacccagaaatatggggaatgtgaaaaagagatttttattgctcgttcctgaatactcatgtattacttaaatgttttataattgagaaaatattgtattactagtgtaataaaaagtttaaatcatcttgagatctctaagctctaaatttcaaggaacactgacagttacaataatacttcagcaggaatattaagatatttctaattcatattctaaatgatttgtatttaaattcttttaaaatattttttaggtgtggaatatcaaacaaatgattaagttgacacaggagcatatagaggccctattggacaaatttggtggggagcataatccaccatcaatatatctggaggtaagcttttgagtgtcatatttgtagtaattttgaggaaaagaaaatgaacttatagacacgtttgtattggtaatatgggttattttagggagtgggattaaaaatagatattcgaagagagaattagctttgtctttattgtactctttaaggttgtttcacttgttacaataaatatgtagtatttggtaatttggaaaatagcaaaactaaagaagaagttgtatataaacttcaaaatattaccctggtttaaaaaaagaaaaaattattgaaaaaagagaaaacattcttttctggaggccagcaaactagttgctatattagaaaatggggagaattttgcagaatatcttgttttcagaacaaatccccccaagtaggtttttgcttcctcatgggtaaaatttacaaaatttgagtatctcaagattgcttaacgttacagtttaatagtgccttgaagcttttgtatccagtcttgaacatcattgtaagtttatagattagttattgtttttaatcctgttaggtagcagttactgtaataatcacagctatgctttcttggcattagtttccttatgtaagtcactcaagttccacagcaaggaagctgttacagaatcgaggcagtcaggctccacagcccactacttaccacttcactatattgccggtctccataaaagctagctccaactataagcaccagtcatactgggagataaccctaaattacaaatgatcaggttaccatttgccttcaaatgccagagattttttaggcatggattgacagactcctaaaccaaaattctagtaatctaattacttttaaagggtaagttaaatcttcagtatttcaagagaaagtaagtttgtatatttctaaaataaccttgaaagtttggaaataactgctaataaactattctctctttatatggctcatcacagagcacactgccagttagtaccagtgctaggactggaactcatacctctgaatactagtcagtatattttctaatatcacatgctctctgttttacttttgtgtgtgaggagaacaagcaaaggagtcataaggaggcaaatagtcctggtgaaaatggtaattgcttgttagtcagaattagacaacttaaccagcagtttttctgccaaccatttttgtgtcaggaaactttccccaccctcagatgtaatacatttgcatcaatgacatggtttcactatagcagggattcattcgcccctccacacacatactcttcaggctttttactattaggattatatctaactaggacagtatagggctacccaggtggctcagtggtaaagaatctgcctgcagtgcaggagacgcgggttccatccctgggttgggaatatcccctggagaaggaaatggcaactcactccagtattcttgcctgcaaaatctcatggacagaagagtggtgagctacagtccatggggtcacaaaaagtcagacacaacctagcagctgaatgacgacaacagaacaatttacagcagactatacctcatagattgtatcattagcacatagattgttactgacaggtactaacattacacagtttctctatagaaagcagtataacatagtggttgagatgaaccatggagttacacagaccctgtgtttgaattgtagctctgccttaatttctgcagacaagttacctaacctccctatacctcacctaatcggtaaaacggaaatatatcacacatggtaatttaaagactaaattttgagtttatgattatgaaataagtgctctgtaaatcttttactcatttattcaacaggcaattattgagtgcctgctaacatttgtacttgtttaggctctggggatatgtatattaaaaaaaaaaaatccccttctcccaatgtctgccttcagatagcttatgttttaatcaagggggagtggtttacagaaactaaatacataaataagttaaaacattgaacttaaccaccatttgatttactatgaagaggagcctggccggaattgaagttccctcaaattgaaagtttggaaataactgctaataaactattctctctttatatggctcatcacagagcacagaggaaagttgaccaggccaagcaagggaaaagactgtgggtcctgatatttgatggcccttaagtgagtaatctactgattacccactgagacccaccattctcctttctgtctcgatgaattttgctactctaggaatgtcatataagtggaaatctaacatatttatcctgtaactgactgatttcacttagcataatgtcttcaagcttcatccatgttgaagaatgtgtcaaaagtttcttcctatttcaggctgaaaaacatttcattgtatgtttatatacctgtatataatataatgtatattatccatttatctgttgatggctaccatcagtggttggttgtttccaccttttggttattgtgaataatactgactttttggggtgtatatacctggaaggggaattactgaatcgtaagataattctatattaaatttttaaaggaactgccattctgttttccataagcagctatgttttgctttcctattaacaatcctttatatctttgctaagacttattttctgtatgtgtttgtgtaagaatagttgtcctaatgagtatgaagggatatctcattgtggaaatgcagatctccagctttgttctttttcaagattgttttgactatttgtgatcccttggattttctcatgaatttcaggatggtgtttctctgtttttgcaaatacattgggatttgggtaggggttgcattgaatctgtagattgctttgcatagtattgacatcttcagggttcataactcttaaatacaaatgaacagttaagaataaccagatatttaaagaaagcttttaacaggaaagatagtggcagaaatggtcaaaagggactcagaaacagtgcagagaacagaagaaaatttgaaaatcactataacatcaaagataagagaagatccataatctcttcttgcttcatggttgtattaaagaagcaaaagtattaaagaataagaaagagctcttggaaattaaaatagtaggagttaaaatagtatagtaggaaatttatatatgtgtgtgtatctgcacgtgcatataaacagacagataaacacacgctatatagttaaggacatcttccagaaagcagaataaaacaaagatagaaaatattaaaggaaagatgggaaaaattagagtaaatctaggaggtctgcaaaattaaacagcaggctgtccaaacttgttttgaatttcttctcccataatgagaaacatggaggtacaatattcaaagattggttctacagctcaaggttgttacacactggcatagattgctaccatccttttggtttccatctgcagcagatctgagaattgtactcttaacacaatacctcaagtccagaagcagggatcacagatactctggtgtactgagttatttcatggaggaaaaccttcccctcaaatcccctacaagtctttacatctcaccaaccagaatggggttacataattcctagactagtgactctgcttacattttctgaaataagaggctaaaaagtaaaaattttccggtgttcacagtctggcttcagattagtttgtgcactggcagatagaagttgtgctctagttatttcattacatagcatttccaaagaaaccattttgatgtttccatagaaagttaaatctttacctatccccacatctcttcctcatagcaaaacagaatgaaatcagttatatcaccatcaaaaatcctcgtgactttctcttttctgtgtactaatttatttaaaagcaagcttttaagttgtagattttctcctactggcatatgaataataattaacactctattgattcccttgacgataactgcagtgaaatgagctgtcgtactctaaaagaatttcagttttgtcttttcagtctttggttccaatcttttctttttaccatcacacaaagaaaagatatttcccctaaaagtcatttcccagaatttcttatttttgtcccagttcttttatttttactcatctgacaaattatttgaatgccttctgtatgtaagatataatgctggatgcttttctagaagtagatttctgtttctgaacctgatttattggattccagaagtggaagggtggagaaggcagtggcaccccactccagtactcttgcctggaaaatcccatggacggaggagcctggtgggctgtagtccatggggtcgctaagagttggatacgactgagcaacttcactttcacacattggagaaggaaatggcaactcactccagttcttgcctggagaatcccagggacgggggagcctggtgggctgccatctatggggtcgcacagagttggacatgactgaagcagcttggcagcagcagcagaaatgaagggaataaagtatctggaataaccctccaagctaccactgagtttatgtgtatgctcagatcccctgcagacagacagtaaagctcctaacatttattgagtgcttgctatgccaggaactgttacaagcatatagtagatcatttaatcctcaacctgccctgtgagttatatttaatactcatttccattttatcgaagaagagactcaggcaaaaaggattttaataataacctgaccagctttacacaacttgtaaatggagtagccaaagtttgaagccagacattctgaatttagaatctgtatttttttaatgagtcttctgtaactgcttacatgttccccaagtgtatgtcgtctctttttttttttcctatcagaacctgtgctcttaattgctttatcattattattatgcttacagcctttctgatctttagcctgtgcagaacccaagataatgcaaagacatttatcgaaatagatactgtagtgaaaataatactggaagctaggtgcttcctgtggaatgcagaacagttcattaattatcagttgtggacagtttgaaagatgttgtatcttgtgagattaagttcaataagaataaatataatgaactctaatgataaaaattttttattccattgttttttcctattatgttttaactaagtagggccttaattgtcttcccatttttaatggagaaataattcatgaactgtgattcacttttttaaagtatacagttgagtaatttatagtatatgcacaaaattgtacggtcatcaccatcatataattccaaaacatttttatcaccccaaaagaaactattggcagtcattctctccagtccctatcaaccacttaacctaattttgaacattttgtgtgaatgaattccaccaagtcgtagcatgtaccattcattccttttttggctagtattctatcatgtggatacatcacattttgtttatccattaatcaactgatggacatttagcttgttaccacttttgggctttcatgagtaaagctgctatgaacattcatgtacaagtttttgtggtagacatgttttcagttcttttggttatgtaccttgggatggaattgctgtgtcctttggttactctgttttaactttttgaggaactaccaaactgctttcagaagtggctgcaccattttacattcccacaagcagtgtgtaagggttctagtttctatacatcattgccaacttgttagttttcatttattattattattgccatcctagtaagtgtgaattggcatctccttatggttctgatttgtaattcagaagtaactaatgatgttaagcatctttttcatgtgcttattagccatttttatattttctagaggaaaatgtctattcagatcctttgcccattaaaaaaactgtgttgtctttttattgctgagctgtaagagttctttgtatactctgggtgagaaatccttgttagatttgatttgcaaatattttctcccattctgtgagatgtcttttttccccccccactcttttgatagtgtcttttgaagcacaaaagcttgaatttagatgaagtcgagttcatctattttttctttggttactgtgttttcgtgtgtcatataagaaactattgcctagtccggggtcatggtgatttacttctattaatgttttcttgtaagagttttttagttttaactctttttttttttttaatctttaaatggaggataattgctttagaatgttgtgttggtttctaccatacaacaacatgaatcagccataagaatacatgtatcccctccctcatccctcacacctttgcccatcctgccactgtaggtcttgctcttcctaaatgtatgatccactttgagttaatctttgaacatgatgttaggtaatagtccagcttcattcttccgcatgcagatattcagttgtactagtaacattgtcaaaaatcaattaaccataaatgtaaggcttttttccccctggactcttaatttgttgtgttatgtatatatcagtaccacatgtcttgattattgtagctatgtagtaacttttgaaatcaggaaaagtaaatcttccaactggttctttttcatgattgttttagttattccaagtcctttgtacttctttgtgattttaagatcagcttgtccatttctgcagaaaagctaactgggattttgataaggactgcattgaatctgtatatcaatgtgaggagtattttcatctaaataatactgtgttcttttctctacattcttttgtttttttagttcaaaaactatacttcagtttaaaaaagaagccattgaatgaacgaatggataaaaaaataaataacatgagttgtgccctcaggtaccttacagtttggtagagtcatgttgagaacctagtcaagtagtacattgggttagagaaaaagttcaggtttttctgtaatgtcttgtggaaaaatttgaatgaactaattgaccaacccaatagtagtaacagtaataatggtaagaactattactactaataaaagtattgggtttttgctatgtggtagtctctgtagtaactttctttactattatttatcttacttaatgctcacaaaattttttcacaaatgattttttttaaccatataaagaaaagtgtggtaatactataaagaaggtgaaaagaaagtactgattttggagtttatcaagcagagctttgaattggactttgaaaaatgggtaggattttgataagaaagaatgggattatggaaaagctacctcttgaagaaatgcctggtttctgcaacttcttgaagcaccaaaggaatttcattgatggtagtattgatgcttgaggtatatgtttatgcaagatgacccactcacattttcagggtaagaaaacaaaggaaaagggaaagttggaagataaaagaaaaaatggagatagtgatgaaccaaggcctccgtagtgggggaccttaaccacccaatgctagaattaagaacaaaaaaaggatggggaaaaatggggagaattgctcagtcaaagaaagaaaaggaagcttttatttgatggctttgatcttgagtaaatttgaatgtaatggtattttctgagtgaattaaaggttggggaatgaagttaggagccagagaatcatagaaaaggttggagtaaatgttgtgagcaatgtaatatgaattaaaaataagtacaaattttcatgcaataatgtggaaaactaatttccatgaattgataatggaactcaatggccttgttttattattttctccagtaatatgtggtaacctgagagaaagaatgaataattgaatgatggaatttaccagagttggtatttaacaaacaagttggtaaaagaattaagaattaaccagatagtctaagatgttaaccagtggcattgttgaaatagtgagtcataaagcatggaaagaaaatagcaaagaaatctgaaaaactttaagagattaatattgaccattaaccagagtagtatggaagtgagatttaagaaatttaagacagtgggataagtgtgtgtgcacagcagtgtgggaggttcccaactgagatcttgtcatcatttacaatgcttttgttaaagaagaatttgtatctctgaatcttgtaggtagagtagaaataaatgcctttgtagataagaggtttagagaactttaagacaggagtgttataagagtaatcaccatccacactgaatgcagcaaggataatggggtgaaatgagccaaacaagatacaaaacaaggcggggaagtaagtaccttggtagattgcatctgtgagaagggagagaggtggaataagtaaatgttttgtatttaagaaagttattgataaatgcagtggaataatagattgtaatccacagtggagggaataatatattttaaaaaattaaggctaatgttttgatacagaattaacattctgaaaatttgtttacatttattacttttcctaagcttaactctgcgtagtaaacgtacctgctcagatgataataaggttatgtgatctatgcaaggaggaatttttgtctccttaggctgtatgtatataatcttcaaagggtaggaatttgtgttggtctttatttctgtggtttgagccccaagtaataccaggcacatgcatgctcagtatatatttattgaatgattaagtatcaataagtggatcatattgaaaaaagatgtccttaagtaattagcccatggaactgaaagctaaatagaaacatagctcagtagattttggactgatttggctataacgccctgaaatgctgtgaaacgttttggggtcagcattgggcaactattggattgtaaaacagagtgcttttttatgtagtttaattaagcccttcaatagctcattttagtattttcccttcccccctaaaaaagttatatggtgagatcagacatcaggtgtggtggcctatattgaattgaaacttctcctttattctcctctgaaagtattagtcactcagtcatatctgactctttgtgaccccatggactgtagcccaccaggttattctgtccatggaattctccggacaagaatactggcatggattgccatttccttctccattattctcctctacctgtgataattcttccttgcttatagagtgaagttcaggcttcaaagcatagtatatacagtctctccaagctgtcctttacccacttttctagtcttatgatttgtgttcgtattcttcacttaaattacacaaacatctattgatccctttgatatgtcccaggtattgtatgacaatcagctatactagtccgtagttttcctctgtcttaaaatttctaacctccttactgtgttaaaaatgtctcctatactacacagtactctcttctccccacttaattctatctatgtaaatgctaacattttaagcatccccccttccttactcttaccttgtatcaaaaacattctttctcatatacaacacaaataaaaatgcagccatttgcttctctgcagcccagtaataaactctctaggtagtgggaaattttgtagccttttgtaatgtgtgtagtgttgcatctgtttcaggttggtagggagacgtggtggtggattacggtgtggaggggagagggtgattaccactgcagtaaatcaccatgggcatatgcattcgaatccattctctctcttaattttcaattattctattttcaggattcttcctgcttttagaaaatgatatcttatgtgatcatttgacctttcagctttagtaaaatgatagttctagaaacataccctgatgggtaatggtctcaaaatttcttgactacaggatgtaaaccaccttttcaaataaaattctattctgtaagcagtgtttgatgggaagggggaggtcataaggtatccagagtgtgaaaaagaaaatatttttaactaataactgtttcagaaaaaaggtcacagttatgtatcctctaatccctgttgaggagactttggtggttatggtgagatttggcactgtgtacctttgcctgcctgccaaattgctttagtcatgtccgactctttgcaaacccgtggactgtagcccaaacggctcctttgtccatgggattctccaggcaagaatattgaagttggttgccatgccctcctccaggggatcttcctgacccagggattgaacccacatttcatgtctcctacattggcaggtaggttctttaccactagcgccacctggactgtgtaccttaggcttgtctttttgacagatctctcttaacacctcatctccttttcagcctctctcagttagttagagagagactgagagagatgtgaaaccttttatacctataacttatctagaaaaaaatgctttgatgtagtagtttatcttatgttaggtgtgtagtttggaagataaattgtgatttggccagaaaatagctaacactaatttttttaaattgatattcatggctgttatggacatcatacatgtatgtgtgtgtgtcagtttctagatgagtgtcttataacaaaagatttatcaatttaaagataaaagtactaatttataatacttccagtacttattttgtaatttgtaacacaaaatcctgttatctagatttgattataatcaaaaactaaaatttcgtatttccttttgttactgtcaggaaaaagtccagattcaatgtaagtctactttattttataggcctatgaagaatacaccagcaagctagatgccctccaacaaagagaacaacagttattggaatccctggggaatggaactgatttttctgtttctagctctgcatcaacggacaccgttacatcttcttcctcttctagcctttcagtgctgccttcatctctttcagtttttcaaaatcccacagatgtgtcacggagcaaccccaagtcaccacaaaaacctatcgttagagtcttcctgccgaataaacagaggacagtggtgagtcagcttttaattcatcatagctttttcttcgtatttttcagaaagactagttgtgggaaatgaaatgtgatacccagtggtcatgtgaatggaagcatccatttaagcaagaatggaaaagacatagttatttggtgccaaagtctgtgttccttaagtggagcaaattgcattgtctttagtgtcgcttgtatacctgtctgccaagcttgaactacactcacgtctgagtattagtctagaatcagaattttgatacttaagcttgtttgttctttgccatagagaaatccctattcggatttattatcaaacgttggattcttagtgtgcttgacatttttctcgtttatataagttttgattgttgatcattatatcatcattggaatacagtactctgtaaataacctttaaagcagggaaatctgcaagataatgatagatggtctgtaatctcacgtgcagcaagtactgccagtggacataactgaatggaaaaacgcacttacctgcatcactcattttttataatgtatatggttattttgatagcaataaaaaaacatttcattaccgaatacaattgaagtgaaagtagttttttaatttttcccctcagatagcattagtaattcttcatagaagatgtttgccgacttacttatgctatagtggcctccagtggggtcagtttgttactgggtgaaacaaaggcatatgaatgtcattatgtggagacacaagactaggccttcagcctgtgccacaaaggtagttgaaacttatatcctcacataatctgaacctttgaaaagctttaccttcaataaaagggtgaattagaagaagatctgttcaccagcatatataaataacagtgaaacttttctgtctttgccagggccccagataaatgttaaagtttcccttgtgaattcttaactgtagatctgttcttaccatagtgtggggttcatcattatgttacctgcattattcaggaattctcaacccaagaaagaaatttttaaaaaaggttctggaatagtaatagcactcaggcactgggcagaaacaaatgtaaatccctcccttagcccatatagatcttatggaattcatacacataatacctcaatgacaaggtcaaaatcccaagttacagtatgcaaggaggaatagtctgtcatcagtgagttagaagacttaatagcagcaagattagattcctaagaaggaaccaaatagaatttctaggtggccttaaaatttaaagtggatgacacttatcatctctgaagtattattgctaaaaataattgtgtcgaatgttaagcttctagtccttccactttataagaaggacaagaagtaaagggaaaagttaagcaccatgagaagcagacacattcgaaagatggacattccctaagacagcctggactctcaattaatggagaataaaacgttggagattattctacactaaatagaccaaacaaaccaaatagaccaaacaatagacaaaacaaccaaatgcattgtgtaatcctggtttgggactagggtgagaaagagctgtagaagtccttcttgagatgggatatgtcaaatattggttgaatgtagtatgtttttatggaattattagtttccttaagtgtgataatagagaaaatattatgtaggaggatatctttattcttaggaaatatatgcttaaatgtttaggggtaaattgttatgatgcctgcaacctctctcacctcttttttaaaaataaaactgacatatagtaaagtgtacaaatctcaagtgtacagctcagtgaccttctaatctgcggataaagattatagaacatttctaatgttgagagtgtactcttgtgctccctcaattgagtacccacctttatcaataaatttagaacttactttcaaatggtatgatggaaaacaaaatattaaagagagaaaacaaatatggagaagtaattatcaagccagttacagcatattacagacctagtgtaaatatgctgtatagaaatcaaatatttatttttaaaaactcaatgggttaatttaaaagtagattgaattcacctgaaggaggagaattggtgacctctggaaaacagagaaagagagttatagaaaatatgagaggttaataggtatgaaggatggatagaatagtttcatcatatgcctcaaagtagaaaatgagaacagaaaaaaagaatgggtttcctgatggcttggtggtaaagaatccacctgccaatgtgggagacatgagtttgatccttgtttcaggaagatcgcaaatgctgcgtaacagctaaccctgtgcaccacaactgctgagcctgtgctccagagcccagggaccccagctgctgaagccctggtgcctcagagcccatgctccacagcaagaggagctgcctcagtgagaggcctgccactgcaagtgaagagcagccccagctcaccactagagaagagcctgtgcagcaacagccataaataagtaaacagatattttttaaaaaacagaaaaagaatagagcaaaattcaaagaaatgatggctaaccttcattaaagacacaaattaaggatttgagacgcataagctttaagttgtttaagtaaatttgaattctttcttattagatgtaacagaatgaaagaatattgttctaaaggcacttaggaaaaattacctataaagaatccaattagattatcaaaaaatttctttatagcagctatagaagccagaagacagtagaataatatactcaaagtgctgagtgatgctgtaagttacttagctaaagtatgagtttaacttattggtacactatgagtcagggcacagtaaagcctttccagatgaggagtttacttttcccaagctctacccaaagggactacttggaaatgacttagggagaaaactgaacacaggaaggaatgaaaagtaagaattaaatgtaaaaatgtaaacattctaaagtaagaattacatgtaaaaatttgaacacagaggaaggaatgaaaagtaagagttaaatgtaaagctagtttgtacaagaaaacacaaaggaaaatattttgtgacctggaatttggtaacagtttctaaaatatgacaccaaaacacaatccctaatgaacatattgataagttgtactttatcaaaattaaaaacttctcctctcctaaagactgtattaagagaataaagagacagaccacagactagtagataatctttgcaaaatatatatatctgatcaaagacatgttttcagagtatataaagaactcttagaactcaacagtaagaaaacaattaagtggacaaaagatttgaatagatacttcaaagaagatatgtggatggcaaataaacacataagaagatgctcaacatcatgggtcattaggaaaaagctggttaaaggcacaaggtaccaccacacacctattagaatgactaaaatgaaagagtggccttaccaactattggtgaggatgtggaatggaataactgaattttcatacactggtgataggaatgtataatggtataaccacttttgaaagcaatttgaagattaacttaatgttttaaagtcttttagctttaaagtctcaatagcttttttttttttttttttgcaaaaataaaaaaatccaccctgaaattcatatggaatctcaaggaatcctgaatactcaaacaactttgaatactaacaaaattggaggtctcacacttcctgatactaaaacttactataaattaataagtaaattattttggtactgatatagacagaccagagaaataaatggattacttttaaattatttctttttgattatagccttccttcatactcctattgagtatgaagtgggactttgttgtgattttgatatacttttctctgttggctgatgatatcaactggcttttctatatctttcatggagaaagtacttttataaatagttttgcatgacgtgtgcaaaactgggcattacccaaatggttaaataagtttggtatatctgtcaaatgaaatactacttagtagaaagaatgtattactagtacacacagtagcatagatgactctgaaagtaattatgtcaagtgaaaatagccagacaaaaatgactatatactttataattctgttataaaagtctagaggaaatttccctggtggttctgtggttatgacttagcactttgactgtcacggccccagggttcaatccctggtcagggaactaagatcccacaaggtatgtggtgtggccagaaatagatatgcagctagattaagcagttacagaagatttgaacaacatagataacaattgtatgtaatagacatgtaaaccttgtactaatcaatgaaagaatacacgttcttttcaagaatgtatgggacactgaaaaatttttttactgcattttaggcaaaaaagggaatctccacaaacacaaggtatgttttttgagcataatgtaattaaagtagaaattagtaacaataatgggaaaccacatttttagagatttgaagacacttctgaatgtcatatgtcagagaaaaaatacgaaaaaaatcctagtcctatgtaaattttattcttctgtaaaaaagttaaagagaacatttcctaactcatttatagaatttgtgtatcttcgttctaaaaccaaagatcatttgataaagaaaaactaaagttaatctaagaacatatttgcaaaaatctttaatgaaatactggttaactgaatcttaacagtgtatatatttttaaaaaattattcttctagaagtgcaacaattatttttaaaaatcagtgcaggtctgggatttccctgatgatgtagtggttaggactccatgcttccactgcagagggcatgagttcagtccctggttggggaactaacatcccacatgtgtgtggtatgccctgctccaaaataatcagtgcagttcttattagcatattaaaggaataacagtgtatggatatctctagatacagtaaacaagatatttgatgtattgaaaacctttttgtaacaagaaagaaagaaaaaaactctgtaaacttggaataaaagacaacttttttgataaagggtatctatcaagtatgtctaaaggattctgcattctcattaaaattggaaacaagacaaatctacttatggagttgaatattctagccaatctcgatcaagacaaagaaataaaaaacataaatattaaaaagaaacaaaacttatttttagcaactaatttgtctacatagaaaatctactaaattattataataattctgcagttaataattagaacatgcaattttatttaaaaaaggatatcattgacaaaataatttttaaatgtttaaggcttttataaagaaatttgtacaactttattgaaagacatttgtagagagtaaagaaatcaaaaattactttgttcttgataatcttcctaaatatacttctcacccaaattaatcaaaagtacgtgcagtttctgcagaattctagggggatctcatcccatccttactaccttatctgaaaagttgattctaaaatttgtatggaaaaccaaagagctaccctagaggcctcgtctagggactgaccttttttagtgtactgctgccgctgctactgctgctgagtcgcttcagtcgtgtccgactctgtgcgaccccatagacggcagcctaccaggctccccatccctaggattctccaggcaagaacactggagtgggttgccatttccttttccaatgcatgaaagtgaaaagcgaaagtgaagtcgctcagtcatgtctgaccctcagtgaccccatggactgcagcccaccagggattttccagacaagagtactggagtgggttgccattgccttctccgcttttagtgtgaagaagtgtttattaagtgtttatttgaagtttggttctaataaaagacaagtaagaataaagaaccaaacttcaaataaacacttttagtgtgaagaagtgtttatttgaagtttggttctttattcttacttgccttttattgtattaaaattcacatgaaatgcatgtgaaacttcttttctaaatgttacaatgattgtttcatgatggtattagaggtatttattcttccttttcagaatttctaacaaatatgtttacttgaaaatttcaaaactgtaatttctttaaaagtaatttagagattttataagatactctgtatcaaaatgaatgtgtactcattatttctaaaaatgaaaaaagtataaacaaggtaagtgtaccttggtacagaactacttaagactatccaggtcatggattagatacagtgactaaaaagaataaatgtgtgtgtcctttgagatagttttgaatcatatataaaaacctgttaattgcaattatctggaggatggagacattgctgggggcaggagaaagggactgatctttttgccttatacttagccccttctttcacataatgccaagctacttgttttattatggttaaaattattgtttagaatgatcatatctgatttattaagtatttatttcattatagataattaaatgttgcaaaatacatttaaatacacatatcctgaaatgtggtgggactattttaatgttagggatttaagtattgggtcatggggtatgcccacttaaaacttcgtaaaatgtacattttatgcagaaaaattgtaccggtttatattctccctagggtataagaaagacttccttttcccacaagaccctggtcaacattgagtgttaatgaaatttagatgttactgccttccaatgcaggaaacgtgggttttatccctgggttgggaagatctcctggagaaggaagtggcaaaccaccctggtattcttgtatgggaaatcccatggatagaggagcctggtgggctacgaaagagttggatatgacttagcagttaaacaaccgatctaatagaatttcaagtatattagacttgagataccctcattcatacatatttttcaatgtgttgtgttaacaacaataagttaatttaaaaaaaaatctcactcaattttcctgaaatgtggctttttctaagctgactttcttgaacgtgtagtttaaaagacagaatttgcttattttattttttatatgtttactaaaatatcatttatagacatacagtttacttatttaaactatacaattttagtctattcacagttatgcaactgtcagcactaattttagaacattttcatcactctgaaaaagaagctgtgtaccccttatcagccactcaccatttctccccagtcttcccagtcctagccaaccacttacttcatttctacttctctagatttgcctgttctgtacatttcattccatgtaaatggtgtcatagaatatgtggtcttctgtgactggcttcttttgcttagcataatgtttccatggctcatccatattatagcatgtcagtgttcatgcgtttttatagttaaataatattctgtgtgtatatcaaaccacattttatttagctattacgaattttgttttcacctttggctattaggaataatgctatgaatattcatgtccaagtttctttgtggacatatgtctttgtttttcttggatatattttcctttgcaaatattcagatgattacattgaccttagatctttgttaaggtaggatgctagtttttaactaagatcatggcctaatcaaggacacttaattttggaatttggaaaaggcattaacttggttcttctgaaaatatctttttagtctttccatctataaaaattgaaacaatgctcccctacgcctttacctttgttgtttagtcactaagttgtgtcagactcttttgcaacaccacagactatagcccaccaggctccacggtccatggattttctaggcaagaatactggagtgggatgccatttcctccagaagatcttcctgaccctgggatcaaacccgcatctcctgcattgataggaaaattgtttaccacagagccacccggggagcccacctgttttcctttgtgaataggtaattctttcaggtggtatttgtatcaagaaatcttgtttctgcccctgtccctatacacccagattcccctgcatcttttaggtaactttttatttgaggcagtaggggggtgtgtgctgcatttctaaagatgtagcaagaagaaaatacaaaaatatattcttattttcccactcctcttcatacaacacatcatattgtatatgtcattctgtattttgcttttaatgttttgctgtgtttttaatgtttaatgttttgcttttaatgtttatgtgagccagcagtatagctatagattccattgtacagatgtactatagtttgccagttataatatactaaaagtaggcttccttggtcaaagagaaatatacatttgtaattttgataagatactttgaaattttgcttcatagattttgcttaattttgcactgctaccagcactataaaattcagaaaacttaagatcatggcatctggtcccatcacttcatggcaaatagatggggaaacagtggaaacagtggcagactttatttgggggggctccaaaatgactgcagatggtgactgcagccatgaaataaaaagatgcttactccttggaagaaaagttatgaccaacctagatagcatattcaaaagcagagacattattttgccgactaaggtccgtctagtcaaggctatggtttttccagtagacatgtatggatgtgagagttggactgtaaagaaagctaagcaccaaagaattgttgcttttgaactgtggtgttggagaagactcttgagagtgtcttggactgcaaggagatccaaccagtccatcctaaacaaaatcagtcctgaatattcatcagaaggactgatggtgaaactctaatactttggctacctgatgcaaagaactgactcatttgaaaaaaccctgatgctggaaacgattgaaggcgggaggagaaggggatgacagaggatgagatggttggatggcatcaccgactcaaccaatatgagtttgagtaaactctgagagttggtgatggacagggaggcctggcgtgctgcagtccatggggtcacaaagagtcggacacgactgagctgaactgaccagcactgtatgagatgcctgtttaccatagcctcaccaacagaatatgttgtcagacttttgtatttttgccaatttgataagtgaaaaaatatttgggcaagtttgagttcgcgtttctctgaggttgaacactttttcataattctgaatctcatttataatttgttttcctgaactctttcttttgcccatttttctgttggattggtcttaatctcaatttttcaggagctccttatgtatcatgaagtttattttcctgttacataagtagcagatatttttcccagtttgtatttgtcttttgactttgcttatatagtcattctcccagtatttgtaggggatttgttccaggaccccataatgcatcccctacaaatattgggggatgactatataaggataccaaaatccttagatgcctaagtcccttatataaaatggcatagtattaatatttgcatataacctatgtacatcctcctgtatactttaaatcatctccagattacttacagtaggcaaatttaaggtttacttttttggaactttcgggactttttcctaaatatttttgaccctcggttggttgaatccatgaatgtggcaccagcagagatggagggctgacggtagtatgttgtgtgagtgttttcttttggcttccagattttgcatcatagtttcataggcctgctccacttgagactgtaagggagccatgtttcttccagttcttttacggtttgtcccctccttccttcaacatttacatctttgatccatttggaggtgaccctaggatactgtatgaactgtggatgaactttcttttcctagattggttccagttgtcccagcatcaattagttaaaagttcatctttaccctattactgatgctgcctttattttgattttatttatgtgttgaagagtctgcttttggtttttctgtttcattccattggtctgtcagtctgttgaacaggtagtatcatgaagaaacaaaaatcagccttttgaagtggatgaaggacagattgatgactttcccttggtgataagagtgggaaaccaaaattttgcctactgatggaacatatatacaccttggaatcaacctgttcagagaagcataagggagcttagctatattagaatatggcattacaggactgcatgagagaaattaccaaagaaactgaagggtggatagccccagtccactaatgactttgtatgctgtattaaggaatttgaatttcaccctataattaactggaaaaatttgagaagattaaggttatatcacagaatgaaattctgagttcagtggactcctcagcagtccatagatgggcttgaagttttatgtttcagagagattattctaaggctttcatcaggttctcagaagtatctggcaagcaccatacacacgttaagaatacttttttcaaaaaaagatttcactgataacgggataggatagattgggtggggtttaaaactaaagatagggttgccacctaagaagtttagagcaggcagaatacaaatagcagaggggaaaagtcagcttccccttctgttcattatttctggaaggtatggacagttctcactattggcagtagttattttctgtgtatttcctgcaaacactgaattagtgaatactgaaaaactgctcctaggacaagtgcaggattactattataaatgagccaaagatggcctctgtatattgacccctggattgtttgtttcttcacagcaggctggggtccattaacttaaaagtcgtctggcatagggcacttgtttacagtatgagagctaggaaaagaaggcatatcaccttgattaacctcagctgctgctgctaagttgcctcagtcgtgtctgactctgcaacctcatagacggcagcctgggattctccaggcaagaacactggagtgggttgccatttccttctccaatgtatgaaaatgaaaagtgaaagtgaagtcgctcagtcgtgtctgactcttcgcgaccccatggaactgcagcccaccaggctcctccgtccatgggattttccaggcaagagtactgcagtggggtgccattgccttctcgaacctcagctgggaagagtcaaatttttcagtcttctggacatgcctgcaaaagcattgcaagtattgatttgggggttacaaataaattttaatgaataggcaaatttgcaaatacagaatccgtgaatttagaggatcaactgtacaaatctggtctcttgaatacttccagtgatgaacctactccctcaaacttttcccttgctggatagttttaacagttatattgagctaaaatctgtctcctgtttttctaatcttgggtcctaatttggctttatggattgttgcccgttgacatactgtttaaattcatctgtcttatattcactttcactcaattcactctggcataagagtcccaatttctttagaaacttctggtttgctgaataccttagtgatttaaaagaatgaaacctttaattttgttattaactaacacatcttgtctgtcaccccccactcccctctccgcctaaaaaccgaccaacctgaactcccattgcttcaccttagtctatctacactgtgtttgtcagttctttttcagttttaaattattaaaattaataagaagggagatgagtcactggcagaaaagaccaaggcagagataacttcaaatatataggaagattctttttctctctcttttcgatgcctcttctctcttcactcctaatgtcttctcttcttctccttaagttagattcattctatagccagattttctcagtgtactagggaagataaccattagggaatccatatttctgtcttcttggaacttgacaataggaaagaaacttctgtcaaccagagtctatctgtcagtgaaaggaagaactgtagtactgttggggtcatacatctagccctggatctgggatatgggaaactaattagccagcttatgtcatgtgcagccagaagagcagtgaccctggattcataacttctcaagtaccatgtggtttttagggaaaggtggattcccagaggaaataggaatgctaaacaacaaatatcagctgtatacattaagacaagtattctcttctatgtttaggatcagtaagagatctcttaaggaccatgataatgcttgaaagattaccgttttcaactttgaacaatgttggatgaaaattgattttgctttaaatgttgacatttattatttctcagcagagagcacttagtgatctgttgcattttcttttcttttatgtgtttaagatattttgtaattttaataaaaaactaaaaattgattttgccttaagttggtgagtaataatagatgtttgagtcataattttccattaatattaagttagccctagaaataattttctgacatagtaatccatatgacattttcaaaatgttataaaggtaaattactgggttttgggttttttttttaagtaatgtgaaaaaatctataatttacttcttctgcctcatgtcctgcctttgtgataccctaggtgcctgcacggtgtggagtcacagtccgggacagcctgaagaaggcactgatgatgagaggtctaatcccagagtgctgtgctgtttacagaattcaggatgggtatggtttgtatgtgatgtgaaactttgtttaaaaaagggaaaaaaacatcagatactaaattttgaggttttctgtaagatttttacccaaacctagagtattaaaaatcaacctcagaaaaaaaaaaaaaaactaaattaattagcctagacaagtctggtatgccctttgaggagtgaacattagataattttgtatgatgatggtgtttattattctgataaaatgactttatatggagtttaagattcttaaaattttgaaccattttctctgtttcttatttgaataatggactctttcccactcctgtttttaatataaactcatagtttcaccaaagacttatcaaaattaacattttatattgaattatttttcagaaagcatgaaattatgccatgaccccacccctgccattcccaattttgaatccatctggaaaagaaaaaaagagatctcctttttgggggcatattgtcccttgagtactctttttctttgaatggataggtaaatccatacctgtgattttttttttttttttttttttttggaccccaggaacaatccattttctgctgttgtaggtcttttctggagctgacttgaagaaaagagtacatctctttaccctgctgtttgtccaagagtgatacatttatttggggtaaacttaaaaattaatttattgccatttaaatttctaacgatggaagactagggagccaaaactccctcaccattactagcccctcaataaccaattttcatatcttcagcatgaggtatatgaagctttttaggtatgataaccaagaaaggctgtgtctacgcttttcagggagaagaaaccaattggctgggacactgatatttcctggcttactggagaggaattgcatgtagaagtgttggagaatgttccacttacaacacacaactttgtatgtactttttatattttaatgtcaaaaatcgtcaagttctttgagtttttatttaaagaatgaagtatgagatgaataattttggcattgtttttttacctaagttgaaaatcagttttattctttaaaaggaaaaaaaagcaccacatattaaagaggtttttttttttaatcattgtactttgtctttaattttaaaaagtaatagatagtcatttaaaaaatttgaatggtatgaaagtatatcaagtaaaaacgtggaagtaccctaccagaggtaaatagttgttaataattgattattgtgtagtcttccaaagtctttctgtataaaatgtgtgttcttatatctgcaagcccaaaatattctttcttttttccttccttcattttccttcattattttccatttctttcctttttgaaaaaaaactaaaaatggaattatattttgtatgatactcttttgtaaaaaagtgttaagcacagcatcataggcatctttctatgtcattacacctagctttataatgattacatagtagtccataagaatatgcattcagtgtatttaaccattcctctttgacatttaagttttttttaaaaaatccattctacacatggtaaatagattctgcatacaccttgacacacttgttaaatgtttctgaaagatagtgtgatggaagtggaatagctctccttgaggactgaagaaagacagatgttaaagctctccttccatacttctccctttatctgtttttttcatttgccagaacctagcctaagctttggagaaggcaatggcaacccactccagtactcttgcctggaaaatcccatggatggaggagcctggcaggctgcagtccatggggttgctaagagtcggacacgactgagcaacttcactttcacttttcactttcatgcattggagaaggaaatggcaacccacttcagtgttcttgcctggagaatcccagggacgggggagcctggtgggctaccgtctatgaggtcgcaaagagttggacacgactgaagcgacgcagcagcagcctaatctaagcgtctccagtggaacagtggaacctctctacctcggagataagggtacagttcccagagcttgagaacctgtcctctgaatgagtaggcagcagccaagattagaatgatctataaggcaggagtgcatttctttcttttttgtgtatgaaatttgaagtgtagtttatttttctagatggatagtaattgcttcccttttggcatcaagtgttttcccttgtgcctttgtgattagaacagctgggttcttctgatttcccagggggttagtgttttgggggctcctttagtggtgaagaatgaaattgggtttgtgcttcattagataaggcatcttttggacaagtgtacaatggacctgatgtcagtcagatttaccatgaagcacataggtttataatcatgagataaggcattcactagtattgattttgttttcaacttgtagaattttgagaagataaatcttaagaatttttatttcagtttttaggaattaaaatagttgtttacatttcacagtgatggctatcctttttcttagttattctccttaattaaaaattggatatgagaaggtaaaggaagacctaagttaatgaccttgaagtagtgcctcaggcaggtctttgccacaaaaggaaaatgaaagcaagcttttttggatgtgagagttggaccgtgaagaaagctgagtgccgaagaattgatgcttttgaactgtggtgttggagaagactcttgagagtcccttggactgcaaggagatccaaccagtccattctaaaggagatccaaccagtccattctaaaggagatcagtccagggtgttttttggaaggaatgatgctaaaggtaaaactccagtactttggccacctcatgcgaagagttgactcattggaaaagactctgatgctgagagggattaggggcaggaggagaaggggacgacagaggatgagatggctggatggcatcaccaactcaatggatgtgagtttgagtgaactctaggagttggtgatggacagggaggcctggcgtgctgcaattcatggggttgcaaagagtcagacacgactgagcgactaaactgaactgaaagtgctgtagatacacagaatagagattcctagaataaatgttttaattaagaattttcaaaaacaaaaaaattttcataaagactcttaattactatatacgtttaaagtgctctgtctgtgtgtgtgtgtgttagtcgcttaatcgtgtccaactctttgcaaccccatagactggggcccactaggcccctctgtccatggaattctcctggcaagaatactggactgagttgccatttccttccccattgaagtacagtagatacacagaatagagatttctaacctggcttttgaggagtcaggaaattttcccaaaggaagaattatcaaacctgagacctggtggatgaggaaagatgagtgaaagaaagactacactaaacaaagggaacagcaagaaagcatgttaccctttcagttttgagaaaagtttagaatggaggctacatacttggagaggtggatgttacagtgtagcatgtatagggatggagtaagctcatgttcaagctggttttagaaaaggctgaagaaccagagatcaaattgccaacagccgctagatcatggaaaaagcaagagagttccagaaaaacatctctttctgctttattgactatgccaaagcctttgactttgtggatcacaataaactggggaaaattctgaaagagatgggaataccagaccacctgttccgcctcttgagaaatctgtatgcacgtcaggaagcaacagttaatactggacatggaacaacagactggttccaaataggaaaaggagtacgtcaaggctgtacattgtcaccctgcttatttaacttctattcagagtacatcatgagaaacgctggactggaagaaacacaagctggaatcaagatttccgggaacaatatcaatcacctcagatatgcagatgacaccacccttatggcagaaagtgaagaggaactcaaaagcctcttgatgaaagtgaaagaggagagtgaaaaagttggcttaaagctcaacattcagaaaatgaagatcatggcatccggtcccatcacttcatgggaaatagatggggaaacagtggaaacagtgtcagagtttattttttggggttccaaaatcactgcagttggtgactgcagccatgaaattaaaagacacttactccttggaagaaaagttatgaccaacctagatagcatattcaaaagcagagacagtactttgccgactgaggtccgtctagtcaaggctatggtttttccagtagtcatgtatggatgtgagagttggactgtgaagaaggctgagcaccgaagaattgatgcttttgaactgtggtgttggagaagactcttgagagtcccttggactgcaaggagatccaaccagtccattctgaaggagatcagccctgggatttctttggaaggaatgatgctaaagctgaaactccggtactttggctacctcatgcgaagagttgactcattggaaaagactctgatgctgggagggattgggggcaggaggagaaggggacgacagaggatgagatggctgaatggcatcactgactccatggacgtgagtctgagtgaactctaggagttggtgatggacagggaggcctggcgtgctgcgattcatggggttgcaaagagtcggacatgactgagcaactgaactgaactgaagctcatgtgagtccttgtatgctctgttgaatatttggacttttcccaaaaatcattggaaatttaatgactattataggcaagggagcagtgtgactagttagatttgtggttttgaacaattgctcttagcatcatatagaaacaagtgtaagcctgtattctgcttagaaagggaaagaattgctctctctgcttctgtgtgctgaattttgttggctatgggaagaaggctgcttatgccccctggtttcatagtctgttacaaaggcgattccttcagtatttacctatatcccatgaatccttgggaattgatggggcggaggagacaggaaaggtagagaagcaagattagaagcagatgccgtgggtccagaccttcccattttacatagatgctaacctcagacagccccaccccttacaaatcaatgcatgcaaattgcctgttctatggcccacatgagtttaccattcatgtctcaaattccaaaataagcataagttgtggcccaaaagaaaagatataccttcctgtacctgcttataaacaaacgtatacataccatgactgagcgacttcactttcacttttcattttcatgcattggagaaggaaatggcaacccactccagtgttcttgcctggagaatcccagggacgggggagcctggtggcctgccgtctatggggtcgcacagagtcggacacgactgaagtgacttagcagcagcagcagcacagaggtatatgtcactcagtttatgctcaaatgcctacccatattttctcctttctgcctccctcctttctcccttctctttttctcccacttcctttacatatagaagcaatcagttatgcatagttttcaagtatgtcagtgacaggaagaaggactgcaattgactagattaaagaaggaagagaaattagagcttcatgaagcagatttttaggcaatagaaagtatgagtatgtagcaaaaaagatgactataaagtgatgattcctatgaatacgatttatatttttctgtgctctaatttccagagattatgctcgagtataaaaagatgcttgccttagtaaataatagcagataaatattaaagaagcttttttttactgcttgtatatccagaaacaaatggaaaaagaacaaagctaaaaacaagtcagttgcctctttatatcttctgtaacttgatccatagccagaatgtgaagaaagcaagagttactcttaaaactatccaaatagtttatctaaatattctcaaaaagccagaatggatgatatgccaaggtaccattttctatgaaacatttcttttaataacattttatcctgataaatacatgtttattgaagagttttgtaaagtgagtattgaaatcaatttaatggatcatgaaaagcatttatatgtaatagaatggattagaaattctgatgtgcattatatagagagtaatattataagaatacaactatatcctgggtcacagtgtattttttttattattgtgtgtgattaatgttgtctgaaaacttgagaatatacagcagaaaacaaagggcaaaatagagtcacctatgctctcatcactcccaaataggcattgttaacatttgtcatttacttatccttcttatgttttctgcttattacataaacaaaccaaacagttgtaaacaatttctggttttgtctgttaccaagatagaacctccctagcacagttctgtttatgtgacacatgtttgccttctgacagggagttcctacatgttgccctgtaagcatcacatagaggaatgttcacagatacattgaggtgttctgatcctctaagaaactgataatttgttaaacatagttcttaccatcttttaggtgatgttcctgtcctttgtcctaagttaacaagtttagttaacttaggttaatctgattttcatataattttaattataaactagtttttttcttttgtaattttttaacacttaatcaaagtatattacattttaatcaaatatatatagttttaaaaatagtgcaaaggggttgccccaacccttaatagcctctagtgccactctatagaggaaatcattcttttccttttatttcttctttcttttttaaatttgaaaaaagacataggagacttggaaaatacagaacaaggttacatatagttccactatatattacaattatttcttaagtagataaattaagactttgagttgtagtttcaatatcaaactttcaaaaatcagttgaatggatggaaaagtagaaggatatagtagacctgaaaagctctatgaaccagttcaacataattacattcttaacttctaatggtttctgttttaagctcttctagtgattcttttcatgttattgaataataactttaggtcacaacttctgtgtcagttttagacatcatttactgattgccagttccattggaaattagatcatctgtaacatgacagcctttccccctctttcctctcctcctctgaagtgtttttggtttttgtgggttttttggttcctctgttccatacctttgtaactttaagcatgctattatttcttgtgtagaattattcaactggactcttcctcttcctttcacctctattacttccttctcctgtactcttatatagtaaagcttgaaattagtttctagtctttcattcatcccccatcttcttgacttctgagtttaattgaatagtgggtgggagataaattcatgtagtccatctgttaccttgaaccccctggtttcgttttagactcttcatggttaagttggttctcatgatgtaaacatagtaagtctacacccataccaccctaaatgcgccagagctcatctgatctcggaagctaagcagggttgagcctggttagtacttgaatgggagaccgcctaggaataccaagtgctattggcttgggcttccctgatggctcaggcggtaaagaatctgcctgcagtgcaacagatttgggttcgatccctgggttgggaagatcgcctggagaagagaatgactacccactccagtattattgtctggagaatcccatggacagaggagcctggcagtctatggtccgaggggtcacaaagagttggacatgactgagtgactaacaaacagtaaaaatttgttattttaaacaaaagagtaaataagttgatttctaaaaagattcttacagaatcctccatgatgttttactttgcaggtacggaaaacttttttcaccttagcattttgtgacttctgtagaaagctgcttttccaggggttccgctgtcaaacatgtggttataaatttcaccagcgttgtagtacagaggttccactgatgtgtgttaattatgaccaactagagtaagtaatcaaaaaatttttcttttctgccacttggcatttaacttttcttaatgtgaaactagtatgtcttagagtctgtggatgttttctttacagaagagttgttacagggaattttttgaggtttggctagacagtagtgtagccagtacttctcttcagattgtaattctagtttgctgtacatttcatttatatttcatattcttttttaattaagatctcttccctgtagatatcacttttagatggtttttaagtgtttaaattaactattatatttttggaccacagattggggaatctggttctgtcagctgttctgtaaattttctctctttctcaaagttaatgtctgtctgtgtctctctctctgtcccttctctcccactccgtttcaatatattgagttaattttagtctttgtgtgtgtattgtcactactgctattaaagtctttttttttgagagttccactcagtagtttaaagtacatgataataatgtaatcttttaacaataaatatattttcttctaattccttagccatatagcatagtttttcctctctactatatagaaatttgctatatagaacaattagttatagattctgagcttgtttttgaaagtagagtataattttttaccctaagctatcagacagaaatacagctaattgaatttagcagtctttcctgaaaatgcaatttgagctcagaaatttttgctaattctctaatgtgtactggtgtatgaagcttctgggttttgcacaagttaggtttgttttgttttgtttttgtttttgcctcacagtttgctgtttgtctccaagttctttgaacaccacccaataccacaggaggaggcctccttagcagagactacccttccatgtggctcatccccttctgcacccccctccgattctattgggtatgatttgattcctgctgttcagtgacatgctacttgagctgatttttttttttttttaacttttagttgcttagaaacatttccaacatttgggtcattaaattaaggacgtttttttttccaggtaactcatcacacctgtcatacatttggtacagatacagagggttaaaactgacatagactgttgtaggaccatacttggaaaaaaccgagcaacaaataatttagagtccctgccttgtgcttgctttatttttaataatcagatagagaagtatatgatttccatttagaaaaaagcattaacacaggagataatggccaactgttataagctaatatataattataatctacaatttatgatatattattttaaactatgtgataaatattgcaatgtctacaaaagagaatagtgagagagagtagtgaacgtttaatcaagaaagtgggatttgaactggaccataaagaattccaggatctgaatgagcccaggagataaaagcatagtagtgatggtgggaccagaggggtggggggagaagagaaggacagaaacagcttatcttcattttctagtttatccattttctttagatttgataataacatttatcagatttaatccagatttttgtttttcctacgtaaagaccagtgtcctttgcatacatatttctgacttaggtgctacttgttgctgccatagtcttcatttattattaagttttgagaatgacttgctgtcactacaccagatcaattatattaattagaccaccctctacagttgtagttagtttaggctttttctacttttaagttctgacataaagtgtgttactgccttgagactttaaattagcctctaagtatttagaaagtcagtgaatgtttcaaaactttctaaaagctaatactgtcattttaaaattctttttacctgctcccaaaatctcttgccaaaggctgttattggctgtctaaagcagaagcagagacagctttgtcacatactaaaaattaatcaattaatcataataaaaaggaccacgactcagtgacttcactttcacttttcactttcatgcattggagaaggaaatggcaacccactccagtgttcttgcctggagaatcccagggatggcggagcctggtgggctgccgtctatggggtcgcacagagtcagacacaactgaagcgacttagcagcagcagcagtagagcaattattttcatttcaattctaagtggattcatttagttaatatgaacagttaaagttaaattttctttccctacccttttaaaagggtgcttcaaagaagtaaaactcataagctggtatggttcagattctagtaatatattttatttagaagctttttgtcacaactcagcttttttggctcttccgaccttcatctggtccaaaactatattttcttttcattcctctttaaaccctctctcctcttaaaaatgtctttttattccctcagctgtctttctggctgtcctattaatcacttgataatgctgattagttacagagtttacataagatggggtgcaacaataaccaatctctgaagagaagctgttagcattgaatcattcattggtcctgacggagctcactgagtcgcacctcatcgatcaagtggtactcacttttcagctcccttggatactctttctgaagaacatagacttctcatgggtgtttacagtctattctcaaaactttaatgtgctctgtgaatgccagcttcattttgggggcagtgagagatcatagactttgttatttatctacagtaccaggataggccagtgtgtcacagtttcatcaaagagcaatttttcagaaaatttgctttaaggtttaatatattattcttctttgtgtcttgtatcaattattgggcataataaacatttcaaactgtgagagattgacactctgagaatcaccttttgaatttggaaattatttttgccatttttgttcaaggttttaatttacctcttgtataaagcaatagatacatcttgtgtaaagcaatagatacctgaaatacacatgtatgctttaaaaagatttatgatttcctaatatttcccataaaaatttcaccttagtgacttcaactatcaagaaatggcaaaggtagaaataattagcagatgttattcagttagtgtgtacttagaacatttttgtataatgttaaagaacaagagtttcttcatctgattaaccacaggtaatttctagccatttcaagatttctttagagttttctgaataaaatcagtgttctatcattgatacttcgtggagggtctgcttgagcaaagcaactttgttggtgttagttgtaagcttatattagttttaaactaattcttttaaaagccattactgccattgcctttattttaaggttttatttgagaatatgaaaacaaaatctttatataattcatttttctatgttattatctctagaaagttgctctaaatcttatcttccaatcacttgacttttccaggcccccaattctcaccagtccatctccttcaaaatccattccaattccacagcctttccgaccagcagatgaagatcatcgaaatcagtttggacaacgagaccgatcctcatcagctccaaatgtgcatataaacacaatagaacctgtcaatattgatgtaagtatccagcagtgttcgaatctagaaaattcaagtgtgtttatttttctgctgtttttttggaccacagattggggaatctggttctgtcagctgttttgtaaattaagttttctctctctttcgaagttattagtgtcggtctgtgtctctctctctctctctcctctctctcccacaccctctctcaatatattgagataattttaatctttttgtgtgtatttttaatatagatttataatatagatcagaaataagtgccatgttttatttatcacagttagtataagtgatagacttttcatgaattacagatcagaaaagccttgtcatcttctctgctggcataaaatatttaactggtaccaaagtatagagttattctcattggttttttccttatgacacctctgtaaaagtcttatcttcatttatttaacagataatcagtccacttgacccatttgaaggtatagaaaaaataagaatatacttgcatatttcaatgtgaaatctttacctaaatttctaaaagttcagctttgagttaaataacccttaaggactaatcattaatttctgtacttctcgtgcaaagctactatttaccttctttactttcttgagtataccattgtactccatctctatacaaatcaattattttagttacttctggctgatcactcttgaattttttccttttctagtttatattacacactggaagttaattatgaaccttagtgtcacttcttcaatttaaccttaacttttggacagcaaaaaccattcctaatatagttccctaaaataggaactattaggtgatgacctaacttaagaggtcatcaaaaaacatttgtattaataaaaggcttagaagacaaagcagaggtctatttcccataatatagaccaagggtcagcaaactcttaaagggccagatggtaaatattttaggcttgtggatcttgcagtctctaaagacaactgttgaactctgtcactagtgtgaaaacaaccatagacaataagtacattttaagcaaacagatgaggcttttattccaataaacttcagtaaagcagatggtcagcccattgtattttgccagtcccagatatagacaaaagggaaagaagagttgagaaaaaaagatgacatacacaggatcactccaaaaggactggttcattctactgtatcatcctgataaccaaattcctgaagagaataaagagcccttgacatctgagctgtggtggggtcaggatcatttctcccatagtttgtactttagaataaaaagtgtgggttatccttaatctttgaatgtaataagcaaaaaaacagaaaagctaccaaatttgtttgcattgggaagtaatcatatttaaaaagaaatctgaaactctttactcagataagcagggtactgaaattactgaggggtcatgtgtatgctagaggacagcctgttgttctctaatgagcctaatgttctcattatataggcattccttctgtgagttctcataaggttgagtaaaggagccaaaattatcctaacaggaaaatattcactaattaacagactcccctaataagtctgcacccacatattcctccctacccatttaatactagcttgcattccagccctttttcatcactatccaacattgctatgaaaaagtaaagcagactgattgctagtctgacaacaaaaaaaagattttaaggatttattgaagacagtgaaaagccattgggaaataaggatgcagcagaattaaattagtccagttaacagtaaaagagagtaagtgtctaaaggatgacaagagaacaggcttttctaaagaaaatgaattaaatatcaaaggattgatggaggcattgagggaactgatgaaatcctttaaaatttttatagaaatgagtgattatgatgtgaaagataaatattaaattgagagtttcagtttatattattgtaagcttgatattacaaccaacaaaaccttgattccctctgtattaattctaagaattaacatattattgacattataacttaatatttttgttgaagtaaatgaaaataaacttatcaatcttaacttcatttttcaagatacattcccaagtcagaccttcttcctactttttgctatgaaattttttttttctgattttgttggatttatttaaagtagccttttcttaataccaatttttctcagctgaaaaggtcttcttccatctggctagacccatatacaaagggggaaaagagtaggagagggaaataaatgaataaggagattttgtgaaatatgaaatcaaatcttctttctaggttagatctattgtcagcatggtcaaggttgtaaactttgtatttactttcaaaactaacattcttttagactattcctctttatatcttagtgttactaagattcccttgttctcttgggcttgaacatttgcagcgtcatgtttatatcttgctttttcatcttccccataagcaaatagtcataagatgtcacctttccttttgatatatatctcaaatttgttttttctaccaccatttgggcccatatttcttcacttgaactacttatgacgttaatctgctatataaatttcctgccattgatttctctgtccatttacattctttattgctactgtcaaaataggattttattctttattgtaagacttcaatcaccatctgttcctttgttataaaacttttgtttacttcccattgattataaaatataaaccttttagcatttcattcagtttcagtcatttcattcagtttcagtcattatttatcatttattactccagtaaaccaaatttaatatttactgtgggataggcactgtatcaaaatagggaattaagatgaattagcatacagtctttgccctcagggaggtcacggtctaatggatgaatcagacatataaataaataaacacaaaaatatacaatgatagtttatagaaggggatgaactctacctgactaaagacagtcaagtttagcagagaagagacaacatttaagccagattgtagaagatgaacaatgaatatgaaggagtaggaatttattaagtacctagtgctaggggttttaagaaggaagaacatttgttaaggaaatggtatgtgcagagtatggaagtacctttatgagggatgtaattaatacttgatattgtagggaagatgacatgtattattctgagttctctgtagttgatagtgaagggtccagtaaactgagtgggaaagaaagtggtcagctctttgctttagaaaaatcttttgaattagtgagacatttgatagatgggattgttaggattgatactgtaaatggcatgcttactagtgctaggtcctttaccaagtacataaattttcttattccttcctcataaacacttgtgagttaagtactattattttccttcttttactgttaagaaaattagatttagagatgtcaagaaacttattccagatcacacggatataaatgataacacaggtgataaattattgaaatggggtaaaacctggccattcttcttatagtcaatcattgttctatctagtagtagaggagagaagtgggagatgagagataaaaaaagacaatgcctagaattctctgccttagatgaatacatagtatttatttgattcattaagatagaaatgcatagggaagaacagggtttgtaggaatgaaaaatgttaacttttattttagacatactgacttgaagatgtctgtggatctttactggtttagaagtccagtagcagttgaaataaagactttgagtagaggtacacatttagaaataattagcctatttgtgttaaagtcatggatgtaaatgatattactccaagattatgtaaattgagaagtgggtagaaatgcaaccctagtgatcattaacatttgagatataggcagcaactgtctttctctgtcttcattataggctcctcttcctaaatttagcttcaaacaaataagagaaagtagtgttgaagaagccaaagggagaaatggggacttcaggaatgctgaagtagttgatggcagttgtcattgagactcaaatgagatgtaactattgaatatattcaatataactattgaactgagcaattacagtgtcattttgatgtcattgagagctgttttagaggtctagtggaggagagcaaaagctggtaaagatttgggattcagtgccagatttgagaagcttggctacaaaggaatgacgaaagccatagactgaagcagagtcatgtgagagccttgagcatcttgtaacttgagaggaagaagcaagtagagagagaggttcaaaggaacaagaggaggaataattaaggtagtaaataaaaattccttgagcttggaagtgatgttcctcaggggctatgaggagttaaaggtgaacatagctgcctccgaactctttagaggcagaatgaccatgggcagatgacttaaccttggggctaacagtgtctaccccttgtagtgatgatcattcttggcacaaaaaaagaattcagaaattatagctaatttattattatgcaggtgtttgtagatataaagacagaacagaatgttctttgatagcttctgttttctctatcctgctaaaaaggggaagagcagtaattaggaaaggaactataggaaattgggggaaggtttgaaatagccagtattggaatactagaagatcttgtttaacctagatcacatagaaaaagattgtcagagagctttaagaacatatttaagattggaaaatacaagcttgtggtggttattagcagtaggttgtccagaaggcctttctttcttttttttcttttttttttttctgtctgcgctgctcagcttatgggaccgtactttcctgatgagggcttaaaccccagctctcagcagtgaaaggtcagagtcctggaccaccagggaattcctcctctgcttttctgcatcctatctacagctcagactccagctcttagattaacttcttcaaatgcttcaccagtgaccaagttctatagttatttctttatcctttgaacttatgttgcaccaagaatctttttacatataccgtttatttggcaattaattaagcaactttggtacctttttttattgttttcttaagctcttatttttatgtaaatttatgtgtttgtatatctttcttagatgataagctgtcaagaactcaaagctagtgagaccatgattttatatttattggtagtcaaacaaccactaacacttagcatcttatttgcagatatttgttaattattctgtataaaatgttaaaggttttttatagtacattgaacatggcagaaatgcatctgtaaagaatcttctcttgttttagcttataagcctttgggcatacttagagacatttggggtcgttcagtcatcagttatactgggtaaactaagttctgacaaagtccaaattgtgtccaaattgcactgcattgccagtggactcctccgccactgccctgcctcacattgttgtaaaaggctgtattttaataataaagacaactaaaaaaatgtttcccttctagtgtgtccttaaacatttatatttttatgatcgtatcagtgtacacttaattttgtatccttttttaattataaacgtttcatgattcagacttcataactgttttagtagctgcataatatgttctaaattgacacactataatttacttaaccagtatgtcaatatgcctaaaatgttagtatgcctaaaatagggaaataattatttctggtgtttttttagtataatgggtaatgttgcactaaacatctttgtgcatatcattttttcttatgaattatttctttaggaaaaatttccagaagtggaattataggatcaaagggtatgaacattttatggctcttaatatgtgccagtagaatgtttttgagcattaatgcacccattggttttgaatggcctgaaatggatttcagcatttgatcaggactagtaatcccttcagtctagggttaggttggcaggtgtttcaaagttgttattttatcatgttcactagttaattccatattctttctgttttatgaagtaatttataagacaggtattattttgaattcacctttctgttaatgcttagtggaaaataaaatgttgttgcttttttatcatatgctttggtttgattaagtgtacattactatctatttgtaggacttgattagagaccaagggtttcgtagtgatggaggtaagtagtgatttcaatttaaaaaaaaaaacaaaaactggggaagaatgcaattgctttgctgcttgtctcctttatatgtgcttctttcatgaaacacagacacagagaaaaatatgtagagaaaaataaaaaattgtttgcttttctttagtaattatcacttattgctaataaaattttaactgattttaaattttaactccagaaacagagaaaaagagaggacataaaaggggagtcttaaatgtgacatctacaaatttttaaatgtttttatcaaattattttacccattttattcctaagtatctccactaatacttaaagactgagcttacaatcagttaaaacttgacttccttaaatcattctttggaaaaatccctgggattacctgctacagctcgtcagtttgatagacactgtcagctacttcccttcagcttttagaaggccctggaagataaattttagagcgtggacccctaatagaaaagcccagttcctctcttactagtccagtaaataaaataagcaaatgagagatcaaattgagatttcttaaagaattttatcagctgtttactctagcacccagtgaatattggggtcatagaaaaacattactttagaaaatactttttaaaataagagtttacccccataagatttttgtaagagatgttgtttgaaacagtcttgacgttttcttccaggtggtcctttatgcttccctcttcaactgtctctgtttaataaggaagccctgcaatgcccacatactttgtttagagtcagtctcttcactgtgaccctgctttatattcaaaatatctaagcccagatgcaaagatactttatgtcagatgttgcatgaaccatctttgttatgtttctatatacttgtgggcctaccagaataataaacctgtgttatgtactctggagttagtatttactatacgtagtacatagtttaaaaagtggttttttttcctgttattccatgaacccaccaattaatgttgctgccagtttgactttcgtatgtcttaatagctgtggcttttgacagttttgcccagtacatctggcatttaaatgttgccatcacgttaccatcacagagctaactagtcataaaaattgcctgcttagtaccaaaagtcaaacagcatttatcctttatatgaatcacttttaaaagaatgattggaattttatgaaaataagcagttttttaaacatccagaattattttatgaagcaggcttcaactcatttattccccgtgacttctttcatttcttctgtgtctgtcttcctgtgtttgcctgcccctctctttctcttctaacagcccctttgaaccagctgatgcgctgtcttcggaaataccaatcccggactcccagtcccctcctccattctgtccccagtgaaatagtgtttgattttgagcctggcccagtgttcagaggtagttgggctcttctttcttgttttcacccaaagcaaattaaatataaacaccagatactgtttgtgtctcgccctcacagtgtgcttgtaagtgtgagagttttcagtactcagtctctgcttggcctggctggagtgctctggatgtgcttctcacacatactcacttccacaagctttctgtatgctgtctgtcataaatgtttaaaagtgagggctgaaatttccatcttgttttttgttaatactactttttggtcttgataatatcttaaactcagggggtggcagtaaataatgtggggagggttttcttcaagctgaatttcttttacttttatccatttaagcgataaccttgatggttgctaatatcaatttttttggtttttaaaaaatggaaatccctattatgagttcttattagacttttggctttgcctttttgtaatatttgttctttttttttttaaagcataagccatgtatattttatatcaaaactaggtaacttaaagaagatctataatatatttgaggtattttagcatactttagaaaattaagattgatactttgagttatgctctcatatgaggggaaagtttagcagtataatttcagccatccattttatctcaccattctttgattagtggttaaactaattcttaaaaatttaagtcaaaatttagacaagtgtcttgctgtaaatatttctaaagaattatatttagcggtttttgctagtgtctgttacttattctgaatgaatgatggttttcagatttttgctctttctgcccaactttctcagaaaatccatggaatgggctggaagttatagagaaccgagtagtgtaattaaagtaagtgatgcggtacagcactgagtaggtcaggattgtgaagcctgagtaaacagttagggctttatgatgttgaaatattatcagtggaaggcagaatatggattgtagttaatagatattccagttaataactgtagttaatagatattccaggtgtcattttcttttagaaaattgcatgtgagatcatggaaattagtaatgatgaaatttctacacagttttaacattttaaatgttgccattagtattttgatccttgtcctttgagagagagtaactttttaacttggaatagttacctaatttttttttttaatggaagtctttgtgttctgtttgtgtaattattaactgacatctcagtcctgcttagctatactcaggccccaccaggagtcattaccctgaacccctctgaaccaggtgctttctgtacatgaattgggatttttgttcagtcagcacttggaagaaaaagtatccatcagaaaggtatgcaaccctgccagctgagtccattttcagagtgtagcccttggactcattttgctgataaaatatttccatttgtagtaacttggctgagatgccattgcacttaccttgttctcattttatataggcagagatttttcagaaagtcttgagaaacctacttggctttgttggcattaactttgttgtgcaggtaaaataatctttgtttagcaaaataaggctccagaaaccaatgacagtgaccagtatctctcttaaatagtatatagtatgtagtataggattttttaaaattttaatggctaatatgaaagagttagataatgtcaatattaaggacattattagaaaatgtttccatttggagcatttctatctttttttattattattgattagctgttaatgtcacataattaaagtttattttttatgtttgcttttaaattgactttgctttttagtttttttgatcaaagaaaaaattgggatatatttaagattgtttttctcctagactgtacagcagtaagcaaagtatatatctataatcatatattttaaaggttattaaattgaccaaaatgctaaaactgtaaaactaaaagaaactatagtttttaaatttatagttaatcaccaaatgaggcccgctttttgcctgtcctttcctaatggtcaatattaagacatgcactgcattttttaaaataagtctacatctccctgcatcctctgcccccagtaagctaacgtacttgatcctcctttaatagataaatttttcctttcactaacttaggatcaaccacaggtttatctgccacaccccctgcctcattacctggctcactctctaatgtgaaagcattgcagaaatctccaggacctcagcgagaaagaaagtcctcttcatcctcagaagacaggaatcgaatggtgagagttttcctctgaagtgctttcttcttagaaatcattaagagctgatagtttttaacttaaagcatattcctacaatgttgatttttgctctaaactctaatataattcagtaaaaggcagttttggaagagttagaatagtgttctgtttctgaactatggaaagagagtaagctggaattttaggaagcattaggcatatatgttttaaagagttggtctgaaattcaaatatctaccaaaggacattttttcctattgaaaaattaaatttatgctgtaacttaactatttattaaaaactgaccacattagcagcagtgcactagtatgtataccagagttttgtatgtgttgataacatttttgagagagagattggatcagataagatgtatgaagtaatttaatttagtactgactgggagaaaataattagattatcaacagttgcctagtaccttaactcaaatttttggcctttggagccaaagctagtcacaaatgtgtagtgcttatcttgcccctagtagtcttccaaatgatttttttaaagttgctttattttattgattttaatactgtaatttaatataacatttctgctcataaccaataaataatttttatttttactgaattatttccatcctaatattgacttagttcttcaacttaagttgtgtattgtaagaatcatcttcctattattcctcgagtatagttttgttttgtttctccccaaagttcttattctcttatgtccctttcagaaatagaggaatgtacttagtgtcaaacataacgttttccttttttgtttgctttggcttgacttttgccttatttttatcaagaaaacgcttggtagacgggattcaagtgacgattgggagattcctgacggacagatcacagtgggacagagaattggatcagggtcatttgggacagtctacaagggaaagtggcatggtacgtatgtcatacagtgatcttgtcacaacttttgttaaaaagaaaatatcaaagggagtattcactgtttgtatcattaaactgttttgatcagatgtaagagttccccaaaggtttttaacaaaaattatgggaaataaaaattggattcacagcaaccagaagtcctctcattatacttcagtaataaagatggtgatcctccagatgagctagtcaccaagatttttttttataagtctttctgctggtaattttatttgtattataaaccacaagtaaacatataaaaagagaacttaaccaaaggaagaaatgaccagtaaacatataaaaaatgttcagtctcactacttgtgaaagaattaaaaattcaaaaaatagaaatcatcattgcctcttaagtgacttatctttctttgaaaaaataatcaaatggacaataattattttaattgattgtttagagttgtgattgtaaggctgctggtgggaaagtaaattgctatgaattttctggagggcagtttggcaatatgtatatggagccaataattttatttgtagaacaggaacaaacagatgtgtaagtatattcattggagatttaatattaatgaaaaatccccattaaaagaagattggattatactgataacatccatatataattatatagacagtaaaatggtatggtagatctatatttattgatatggaaaagtttctgtggtatattttaaaacctgcatgtatagtatcccatactatgatgctacatatatatatatatcataattttctaaatgaccatcaatattttagtatatatcttttttaggttgtctttttcgtgtgtgtgtgtgtgtgttaatcactcagttgtgtctgactcttggcagtcccatagactgtagtccaccaggctcctctgtccatgggattctccaggcaagaatactggagtgggttgccatttccttttccagaggatcttcccaactcaggggtgaaacctacatatttataaatgttcatactgcgtacttttaagagcctagtaaggaatacaacaggtcttcccatgtggcactagtgataaagaatccaccctgccaatgcaaaagatacaagagccgtgggttcggtctctgggtcaggaggatcccctggaggaggacatggcaacctactctgatattctttcttggagaatctcaaggacagaagagcctggcggactatagtccgtagggtcacaaagagtcagacacggctaaagtgactgagtatacacacagggtatacaagagtaggttaacagtgatcatttttgaatgacatgattatgggagatttttattttattccttaggcttttaaaatgtttaattttttaagttagtttttttgctataaacatttgataatcaggaaaaatcaatgtttaattatattgaaatatacatgcaaataagtgcactttaatgtacaggtagctaaaattttgcaaagtttacacatctggtcaataaacagagcattcccagaactctagaagtccttttcatgtccctcacccccaagagtagccactatccatacctgaacagacatagtaatacagtatgtactcctttgtgtctggccctttttacacaatattgttttaagattcatctatattattgtatgtagttgtaggttattcattctctatatagtgttcattgtgtgactataggcatgactttttactgtgtgaccagcatttgaatagtttccagtttggggcttttataaacgctgctgctatgaatattcttagcacctgtcatttagtgaacatatgtgtccatggtggttggtatatacctaagaaagacttgtggggccagtagtccattctaaaggagatcagttctgggtgttcattggagggactgatgctaaagctgaaactccaatactttggccacctcatgcaaagagttaactcactggaaaagaccctgatgctgggagggattaggggcaggaggagaaggggacgacagaggatgagatggctggatggcatcaccgactcgatagacatgagtttgagtgaactccaggagttggtgatggacagggaggcctggggtgctgcaattcttggggtcgcaaagagttggacacgactgagcgactgaaccgaactgaagtagatattaacacaacagtgtttcaggtggttgtaccaatttatacaccttttggcaatgtgtaagaattttacctgtttcatataaaggtgttttgttttaataatttttctaagtaaaagcaataagtgatccatggatttgaaggaagtgttaaatactctgataaagaagtttgcagttttctctttccgcaaagttccattcagcctgtcatctgcagttttaacattcagttggtgaatgcatctaatttagttttgctaaatagctaggaaaatatcatggatatttaattggttagactaaatttccaaggggaaaatgagataggctggttgtttttgagggaggggggacagggattggtattttaaaatactagtgtcatttttagtttctatccttagagaattaatgccatttaggtagttaaggtataatttatttgcagttttgtaatggtgtggttttaatgctgtggtaacttgtgaaaataccctagagttttttgtatttttaaattttaaagattggaatgacatttggagtggcaattaccttttaggtgatgtggcagtgaaaatgttgaatgtgacagcacccacacctcagcagttacaggccttcaaaaatgaagtaggagtactcaggtaagcttgtgtgaatcatgttttccagagaagttaccttgatcaacagctgctgttagcttcacagatttactcaaaatggacaaaacaaagtctttctgagtttattttgtctttgttttcttttaagtcatatgcaatattatatgtacagctgataaaaatattaatcctaaagtgaattaatggaattacagtattccgatcatgaaaagtggtacttcttcttatgggaatactgctctcaaaattctaaggttatcagaacacccttagagattgtatcaaaccgggaacttgaggaaaatgagcaaactagagtatgtccaggcaaggagaacttagatgcggaggattctggaactataactggggagaaaattgtcaacagaactgagactataggtccataggaggctattatgttcaaaagggtataaacttgctctgttttattctagagagtagaacagagaagccagtgatgaaagttgcaggaaaatgtttttctaagccgaaaatttgactaatactagaactacttcaaagggaagaaagaaaagaagagaggacttcccaggtgtctagtgggtatgattccacacttccactgcaggggcgcaggttccatccctggtgaaggaacttcagattccccggttgtgaaacatgaattccacatgccgcatgatgcggccaaaaaacagaaaaaaaaagagttagtgggaacaggctacagtcttagtgatgaacgtcccataattaaaggtatttaaataatatctagttgcctgtctatgaggtacactaaaaaagacgtttatgaaaaagttaggatgttagactagataattcctaaagtctcatctaaatttatccttctgctgacttgctaaaaaaatacctttttctgacagcatcttattgacaagtagactgctttggccctggttttgtgttttgtttgtttttttaacatttgctaaagtgtatccacatttactatttcctgttatatttctttttacaggaaaacgcgacatgtgaatatcctcctcttcatgggttattcaacaaagccacaactggctattgttacccagtggtgtgagggctccagtttatatcatcatctccacatcattgagaccaaattcgagatgatcaaacttatagatattgcacggcagactgcacagggcatggagtaagttccattctgttaaatctcatgtaaattacttttgaagaccactgaggatgttttaaaggttttagctattattcttttgacttaaattcccagttactctccaacatcatatggacacttctaactaatggctagctttatgatattaagaaatagaatagtctgtctctagtacagtctttaaaacatatatcaaatatttgataatatttatgtggctgtgaatttgtgtttactatactataatttcgctaagcagtgagggatcaaaagataaaaatagtcccccctgcccctgcaaaaataaatccactgaaaagtcattaacagttattgaagtatataaaatgattgttaattatcctttcaagttattttctccatgtgcccctattttctattgcaaaataatcatctgtgaaaaatatagtaaaaataaagtgaaagtctgcagtttgattctttttgaagatttcaggttgattagttcattggattttattttgtaatttaaaagattaaaaaattgctttataaaatttatcataggccaaagtaagaaattgactaccaaggatagattttgcataaagtgcaaataaacagtaaataaatcaaaaggtaaaattaaatatattttaaaagcacttagatgaaaaaatttaagtgagttaaatacaattttgaaggttccatatgtagtttaaaaatatgcgtgtatattaagtcagtttgacattttatagtatacagataactttcacatacatagtcatgacatttaatttttataatgttataaagtagatattttatgtttacagacaaagaaactgaggcttctaaatgacttgtctagacttcacatttaataagcagcagcaaagatgtttaactgaaaatttttggctcccaaccattattctttccccataaccactataccatttttgcattataaaattagaataaaacagtaaaagagtgtacatgtattaatacctaaaactctgactcagggtcatttatagcaaataaggatagaaccaggactccaaacctgatctagctcttaaatcttcccactgtcctaccctctctgtcagaaaactaggcagtatatttgtaatttagattgtttataagtctgtattcagctaaagtccttattgcagcaacttatttctttattcagtaacattcccacttttccagtagactaaaacagccccacctctgactgtgaatctattcaaatctgaaaagttatattaaagtcttgcaaagagtcaactgtggccacaatggtaaacattgaaagagaaacaaatcttgttctgcttctaccccaccagtctctttgctgcttctttagcaggccaagtatgctctttgctcagggcgtttgtacttgttattttctttttaggataagtactcctgccaccaagtattcatagagcttctcccttatgtctctgttccaatgttgccttttcaaggaagccttcaaatgatcaccttatataactaaaacattcctacaccactctatcaccctatgccccacgcctgtttttgttaacacccaactccatataacgtttgtttattgtctgtcatccccactagaatacaagctatacgagagcaggggtttaatgtcgtgctccttgttttatctctaatgcctgaaacaaggcctgacctgtgatagatacatatgacaaaaattttaaaatgaaaccatgattacacacaacagcatattattgataggtttaccgtccagaagagagagcagccacatccttgtcgtatcaaaagtgggaaatgtcaagaaaaggaaaaacagtcaaagacgtaatcaaagattaacacagaggaaaaggcttttgctatacacagaggcagcagagaatagtattaaatattgttttagaaacagtggctgggcagtaaagtgcatgttgattaaggtaagaagtggcggtagagaaaaaccctgtcaaattggaattgttctgtggtctgggaaatagttaagaggcggtattttcccattactttacagtttgggatctgtaagtataaacctttacagtctgtgtgtttactctaaaatactttgtttacattttgaagtaactcttaactatatgatgcgtatatctggctgtgaatgtaaatcatcccattagtttatcctttatcttaatagctgaaaaatattaattataaaatataagccttctaacattatattttttattgccagcttaaatttaaccaaagaaggtacagttcctttttttcattttggttcttataagacaatatatgcaactggttaaatgttctaacatatctttagttactgaaggctttggcagattgaaagtcctcttattaaagtggctatgtggctttcaggttaaggtgacccatttttgtttccttgagatgccactaaaactataataatgaaaattgtctttaagcatgaacatataatgatggagaggaaaaaaagaatagcagtaatattttagaagctagaaaagcagatgaagaagtgataatagatgtagtgcacccaaaaaaactaaattattaactgggtgtggaaaaatggaagccaacctgatttgtaccacagaatcctcaagtctcaagaactgggagtgtgaattatctctggaggaggaaaagtacataaatgaaaaggcctatctgaaatgtttctctggatcccttctcatgctctgtgccactgggtggacaccccattcctaccctggcaggacactggaaacatgttctctagagaggagagaaagtttctggactcaagacacagggaaaatggggtgcagagttgggtgactgcctactaagtgatggctggagagttccctagtattctcttttcatttgtttcccagaaggctggcagccaaaccttccccttcaggcaggagattggaagactcttggctggtggtagattcctccagccaagagtcgagacacaaagttagtgatattaggaattccatctagatgggagtacatgggagttcagaaccagaattccatttgtattctccaagcttttagactgtcttttagtctcagtctgggtaaagacaaattatctctcaactaccagacatcagagggacagtctcttgggccagtgacagagaacaaatgggggaaaggagactaggaataaacacacacagttcaaggaaaagggctaacctcttcccctaagcccccgcaaaaatactcctatcagtttcctcagagataaaagattttctgtgaaataaggacagatgctttataaggaacattcatataacaatgcaaaaaatgttaaaatgctgatatttatagtcaactggaaattacgttccatccaattatttaaactttcagatgtcaggtcccttttccattgtccttcaccatcatttcatcaagtacagaacaagttagatgtagctgaccagtagatctgtagactatttaaatagttgcttagtaatggcctttacacagcactcatttcaaactagtctgcccctgaatgatttccggagactgttcaaaatgatgttttctgactactttccaaaactgattctaaagtaccaggatgtaaacagaataagagcatactgtttcactattaaagtactggcgttgcagtcattctaggtaaaacctttaggaattaggaagattgaattattgggattttcaattgtgtctcctttattggattacaatatataagccaacagtagatgagtgacatttttcctgtgtgactgtcttctctcttcagcaaaagatcatttctgattcctaggtttactttaagagagcagagctgttctagtggcagataattaaattcattcttaggaatcaggattcatatagtatatgtttatcatcttcccacctgacagtcattgattctgccaaagggccaaggtatttaaagaataacattacaaagaaattccaggaattgtcggtctgttgtgctatttcttttcagggcttttcatttcagtctaatatttattgtataattttaaatgtagcattattagaaaatttactaagtgtttactcagggaggcacacagaaaaagttgcaatctattgttcacacaggagtgatacattctgattgtaaggtgattaaaaataatttgaggatgctaatgctaagtcccttcagtcgtgtccgactctttgtgaccccatagacggcagcccaccaggctcccccgtccccgggattctccaggcaagaacgctggagtgggttgccatttccttctccaatgcgtgaaagtgaaaagtgaaagtgaagtcactcagtcgtatccgactcttagcgaccccatggactgcagcccaccaggctcctccatccatgggattttccaggcaagagtactggaggggggtgccattgccttctccaatttgaggataaactcttacaatttacttaaaaaacaataatgaagggtatgcttctttttactcataggtaagcctagttaaaagaaagatagaaggatgaattgaagctgagaagatggtgaacatgtattaattactgaaaataattctggttgatcaaagaatatttaattataaataaacattattttctggcagataaaaacagtaattgagaggaggatgctgataatcacaaaaaatgcagattaaaaaaagtactattttttacctactagaattgctaaaatgcccaaattgtggcaagattaagtattgataaagattagggggattgcttactgggacactcctgatgcagccaaccaccctggggataacttggaaggatctattaaagtgtttggtctgcccccaagaaacaaccagcttttgttccaagagaggtatattgaaggagatgtactacaggaaaatatctactagtgaaaatttggaaacataaatgttcatcaatagaggactgcataactaaagtattggcacatatgtgcaggaaaagaatatataatacaaatggataatatatgtttcaacatcacctttaaagtatgtaaagtgagaaaagcgagctgcagcatgagaccacttaaaattttaaaaacaaaacattacatatatttttaaatcttacgtatatgtatgtagaaatattaaacaaaagcttagaaggtgcacggcaagctcaatcagtagtagttgtctccaggatggcaaaaagagtcttaagatggggatagcttatcaaggacagagagactttagttttacctacgaaaaattcttgtggtttctgtctttttatttaaaagattctacagttgtgttttattttcacaactttcttacaagtgtaatttttttaaaaacaggaggcaaatgtgtaaaaatttaaaagcgttaagtgtagtgaggaaaagtggtttctacagttagcctttgttgcagtttttcttaatttcaaaatataaagtattataaggaaatacataatcactatagaaaatttagaaaacgtaagcataaataagcaccagtacggcttccctggtggctcaggttaaagcgtctgcctggaatccaggagacccaggttcgatccctgggtcgggaagatcccctggaaaaggaaatggcaacgcactccagtactcttgcctggagaatcccatgcaggaaggagcctggtaggctacagttcatgggatcacaaagagtcggacaccactgagtgacttcacttactctaatgagagagaattactgttaatgttcggatgtatagtgttgtgtatcttttcaaaattctgtattttcatactatatacagtcgtttgttgttttaaatacagaatcacacttttacttttttttacttgctcttattttagacgtctttaccgatcaataaatattatgttctaactccatctctgctactactaataactcactctttttttttataccaagtatgttttgtgggattttttatatacagtgatacatatagcagttacatatttgttccaagcgctgttcctgtgtactttatatatactatctcatttaatccttagcaaccctgttgttcagtcgcaaagtcgtgcctaactctttgcaaccccatagactgcagcatgccaggcttccctgcccttcactatctccctgagtttgctcaaactcatgtctgttgagtcagtgatgccatccaaccatctcatcctttgctacccccttctccttctgccctcagtctttcccagcatcagggtcttttccaccctgcaggtagatactgttattatcctgtatttatttactggtggagaaactacagtttaaagggccaggtgacttgccgcaagcactttggctccagagtgtatttccttgacctcttcactgttctgcttcttcagtttagttctttcaccatataaatgggccctgaatgctatgcagccatcatacttccactccctgcgtttttactcttcctctctcgtagaccctgtcatatttcttctatcttcagtcctccaatatctcttctctaagaactgtcagctgataaactcgcttgccattttatattacgtattggaaacacccaccacaatatcttcctacctacttaacattcatacttaattttcctgtctcgtcgttaagactgaaagccagtctttccattttgtacatgcataccatcccctttctcctacagactgacatcttttgaggagcactctcctgttcaacatcagattttccttttctactggattttcttgtgttttaaaacatttcttatggaagaatattgataattgttaaacctaggtgcaagtcacaggatattatgctgttttcatttttctgtgcataaaagtttttgtaataagttgtgggagtccttttcttgaccccacttccctctcaagctatcacttcattcctcttctttcttctatagtaaaacttctcaactgagtgtccttactcactctataaattcttccctccccgtttttcttggatcccactccagtcaggcttttgcccctgaaacgtcactgaaatatctcttaataagatagttaccatgttgctagatccagtggttaaatactcagtcctcaaccatcagaagtatataatgcagttgatcacactgttcttcatgaaatctcttcttaatcccttaaactctaccacctgggagccttttagaaaagctgaattttaaacaccacctcatatctgctgaattgaagtctgcattttaacaagatccctaagtaattctaatcattaatcattctaaagtttgagaagcattactttttattctcctgatttcccttctccttactatctgttccttctcagctagttcttcaactccttaacctctctaaatattgaagtagtcctttggtaatgtcatcaagtttcatgacttaaaataccatttaattttcatttctatggcagtctccagctaattcatatactgtgaactccagactgtcatatctaactgtgcttaacatctcttgattgtccagtgacatctcagatgtaatatatctgattctgaggtcctgatctttttcctcaagcctgcccttctgcagtcttttcatcgcagtgactggcagctctcttcttaggctgcttgtatctgacatcttgttcctggtctttgatgtctgtctttttcttacaccatactaccaatctattaatcagctccagttatctttatctttaaagtatatctaggatcttactctaatggcacaaagagaagaattaaagagtctcttgatgagggtgaaagaagagagtgaaaaagcttaaaactcaacataaaaagagaacagtaactaagatcatggcatctggtcccatcactccatggcaagtagatggggaaacaatggaaacagtgacagactttatttccttgggctccaaaatcactgtggactgtgactgcagccatgaaatttaaaagatgttccttggaaggaaagctatgacagacctagacagtatattaaaaagcaaagacatcactttgctgacagacatctgtataatcaaagctgtggtttttccagtagtcatgtatggatgtgagaactggaccataaagaaggctgagcactgaagaattgatgcctttgagttgtggtgctggagaagactctgaaagtcctttgaactgcaaggaaaccaaatcagtcaatcctaaaggaaatcaaccctaaatattcattgaaaggactgatgctgaagctccaatacttgttcacctgatgcaaagagctgactcattggtaaagaccttgatgctgggaaatactgaaggcaggaggagaggggttgacaggatgaggtggttagatagcatcaccgactcaatggacatgaatctgagcaaactccaggagatggtaaagggcaaagaagcctggcgtgctgcagtccatccatgaggttataaagagtcagacacaacttagcgactgaatcgcagcaagaatctcacagcctctcatcacctattctgctgttaccctgattcaggccacagttactcttgcctgggtgagtgccttacttccacccttacccacctttattatattctcaacttagtagccagagtagtcctttgaagacttcagtgagatcatgttgctcttctgctcctccagtgtcttcacatttcatacagaaaggaagccagagtacttacaatagttcttagaatgtcaccaccacctccctccctcccccactgcctatttttactacctctctcaactcatttactactcttctgcctcttgctttcccatccaagccaggttgccgttgctattcatagaacgcaggaagcacacagctgccgtggggttttgcccttgctcgtccctctgcctgctgtgttcttatcccatatctgtatgactctctccctctcctcctttgaatctttactcaagctgtcctttgaaagggacttcccttatggctcagacggtaaaagaggaagacaatgcgagagacctgggttcgatccctggatcgagaagatctcctggagaaggaaatggcaacccactccagtactcttgcctggaaaattccatggatggaggagcctggtaagctacagtccatggggtcgcgaagagtcggacacgactgagcgacttcactgtcaatgtcaatgtcctttgaaaagagaccttccctggcctgaaattacaaccccctgaaactcagcgttttctgtctcccacctattttttggcatcttttttatatcttttgtactacagtgcaagcccctttagggtagggattttctgcttaatttccaagacgtagaacagttgttgcatagcacagagtgtgctttaaataaatatgtgttaaataaatgaaagaaagaacctaaaaaggtaaacattatctccgttttacacgttagaaatccagagcttcaggaattatgtcatgtacccaaggttatacggctagtaagtggatatacagttggatctcagagccagatctgcacattcacaacgcatgtcctttcctctgcgcctttctggtcacggcacttagatcctctgggctctggtttaccatcagcgtaagtggccttattgaccttttgcttgcctcacaaagaaacgcaaaggttataaaatcaaatgatgtaaaaatatcctgagaacttgaaaatgctttatgtgtacaagagggtgatagtaatcctttggttttttaatagaagttttacaatttttgcttttagttttagttcttccacctacttcaaattaggatgaagtaaggattgaagattttttttttccttatgtggatatccaattgttccagcaacagtggttgaagtacctatcatttcccacatttaactgtcttgctcttataaataaacaaataccatacttgtgaatgtatgtatttgagcttatgaatgctactctaagagtagcatatttttgctcttccatcaatgtcatggtagtccgtgtttacagtacactctcacgtggtctcttcaggccagtggtgcacttaaattataatgcaagcattttccaaggagatattataccctctctaatgtaagtcccagccaggaaatggagcatgcagataccatattcatggactagaaaactcagtattattaagatgtctatttttttccaaattgatctatagaatctataggtttagtacagccccagtctcagcaggattttggtataaattcacaagctgatcctaaaacatatatggaaatacagtagcacgaatagtcagttttagtcagtcagacagttttgaaaaagaacaaagttaaaggacatttgatgtgagattcaaaactttctataagctgccacagtaatcaagacagtgtaattattaatgatagatgtgtgactcaacaaaacaggaaagaaagtctagaaatatatctattatgtctgtgatcagtagttttttttttttttaaacgccaagatgccagggcaattcatggagaaaggatagtcctttcaaacagtgttactggagattgattctcagccccctcggaggaggtttgtcttacaacttcaccatcaacagtcatcttctcttctagaattcctctctgagaattctggcaggattcagaatccccctaccttttggaacccacctccttatcctctcccagagtccttttcctcttaaagcccccttccctagaatctagctttcaccaaaacttccttcctttcagtctcctccttcccaaattctcagaggcccactcccaaatccccctcatcagagctctcacaccccctctttgcctgaatctccctccactcggggccccctctttcccctacccccgcctactctccccagaatcttcctctcctcagagtccacaacccctgcatccccctccttcagaagctccctctccccaacccacttttcccataactggccccctagagcccattttcacaaaatcttcatcctgggacttctctggtgactaagcctcctcactccccatgcaagggggcctgtgttccatccctggtcagggaattagatcctgcatgccactaccaaagaagacgcgtgccacagctcatgcacaaggaagagcaaagatcccatgtaactaagacctggcacggccaaacaaataaacactttaaaacaaaatgttaccggaacaactgtatatccaaataggataaacaactagcccttttctggcacaagacatgaatattcattcaaaatggatcaaaggcctaagactaaaagctgaacatctaaaacctctagaagaaacaaaggagaaaatcattgtagcctaaagtttggtaaagatttctcatgacacaaaaattaagaaccataaaagaaaaaattaacaaattagacttcatcagaatttaaaacatttgcttttcaaaagacactgttaagaaaatgaaaagacaagccacagacttgaagataatgtttgcaggacacattatccgttaaaacaattatatccaaagcatatgaagaactcttacaatttggttataatacaaactacccaatgaacaaatgggcaaaagattagagtactttattaaagaagatgaaagaatggcaaataagcacacgcaaagatcctcaacatgttagacattaaagatagggtactactacacacctgctagaatgcttataatcagagccaacaataccagtatttgcaaggatgcagagtgaccatgttgctggcaaggatcttaaatggtgcaaccactttggcaggttcttttcaaattaaaattaaccatatgagcaattctaatctcactgacttcccagaagaaatgaaaacaagtcagcaacaaagactcatatatgaatgtttacatgaatgtttatagatagtatcttattcgtaattgtcaaaaaaaacaacaacccaaatgtctaacaactaactggttaagttatggtatgtctatccactgtaatcctgtatgcagccagggtgtgagtctccaaatcatgctgagcaagagaagccaaatgattttgtttatgtgaaattctaggaaaggtaaagctaattgctagtaatagaaatcattatcaatggttgcctgagcctagggaggtaccgttaattgtagtaatgtatgaagaaactttaggggtgatgaatattcttcaccttgattatggttggtctttagacaagtatacttatgtgtctgccaaaaactctttaaattgtacatagtaaatgggtacattttgtgttgtatattggttacacttctccgtaaattagacttttaaagtgagagaaactgaaaaatctaagtaaaaattgaatttaggccactgtagagcacaaatgaaaaatgggtgatctccacttactagggactttcctcattttaatggtaaatgattactaactacataagagtggcagaatggcattccctgaagtcttgctcaccttccacactgattatgagggatgaggaaaacatcaaagtagaatggagactgggatttgaaatactatttggataaaataacaccttgtcaccaccatcgcactttccagtccaatcaactgctaacaattctctgttggtgtcagagagattcgtcttgctgtgtaaagactgatgaacttatttcaaattgtgtaccattagatgaaagaggatgggaatgctaatgtgtgtgtaggtcagttgcttgactttggaaatagctgaaaatataagaaaacagcagcaaatgagtgagagacacttgaggcttttataaatagactagactgataatttgggcagatggtgtaggcacagtatttgaatctcagcaaagtatttgactaaaatctctcatgatattcttgaggataaaatagagatgtgtaacacacatgaagaatttaactaggttcataattgtataattatcatacctgaagctcttatgctaggagagttttgtccttactctcctcttgaatatgactagcgcatattcacacattacttagatgaaggcgttagcatgctgatagactgattttttggcaccccactccagtactcttgcctggaaaatcccatggagggaggagcctggtaggctgcagtccatggggtcgctaagagtcagacacgattgagcgacttcactgtcacttttcactttcatgcattggagaaggaaatggcaacccactccagtgttcttgcctggagaatcccgaggacgggggagcctggtgggctgccgtctatggggttgcacagagttggacacaactgaagcgacttagcagcagcagcaaactgattttttaagtgaaaactagaactttaataagctacaattacaggccatgtctcaggactcccctggtgactcagatagtaaagaatctgcctgcgatgccagagacctggattcagtcactgagttggctagatcccctggaggagggcatagcaacccactccagtattcttgtggagaatccccatggacagaggagcttggcagatatacgtccataagatcacaaagagtcagacacgactgagcaactaagcacacataggccatgtgtgcaaaatatgaaatcttattcaagtccaaaaaagagaagtacacaaattttggataagggaaattgttttgtaggagccatgcaagaacaacaactctctatagttgaatataattttaataggagtcagtaagagtgactgtagctgccataataacagtggctgatttaataaacattttttcccaccataaggaagatgaaaggaatttgggttttgttttgctttttctgtttttttgagattccaaaagtcagtgacatcctgcagtatttgtctttctctgacctgtttcacttagcataatgagctcaagatccatccatgttgtcataaacggctggatatcctcattttttatggctgaatactattgctctgtgtatgtgttaacattttctttatccattgatggacacttaagttgtttccatgtcttggttgctgtgaataatactgcagtgaacgtgagggtgcaggtgtcttgagatcctgagttaaatttttttgacatatataccccaaagtgggattgttagatcatatggtaattctgcgtctaattttttgtggaacctccattctgttttccatagcagctgtaccaatttatagtcccaccaacagtacataaggattccttttatctactcctcgccaacacttgtcatttcttacctttttgataatagccattctaacagatatgacatgatattttgtcgtggttttggtttgcatttgcctggtaattagtgatgttgaacaccttttcatgtgtgtgcctgttggcacctctgtatatcttctttgggaaatgtctattttgaaaacttgattgattttttggttactgagatgtgagttctttttattttttatcccctatagatgcatgatttgcagatactttctcccctttggtaggttgctttttcatcttggtgacggtttcccatgttgtgcagaagctttgtagtttgatgtcagcgcatcatagtgtgatcttaaaagaatgctgaaaaattgaatcttgcataagaccttgaaagaaacaacatagagaacaaattttactagctgatgtgccagtttcttaaggttaaattgattctgtaggtggatacttttcttcagggaaggagactcctatagaaacctatcaagagcatgatattcatttagtttataacatgttttttctttcctactacttttatggacttccttggtggctcagatggtaaagaatctgcctgcaatgggggagacctgagtttgatcactgggctgggaagatcccctggaggagggcatggcaacctactccagtattcttgcctggagaattccatggacagaggagcctacagtccatggggtcacaaagagtcagacatgactgagtgactaagcactacttttataaatttatagcatctttgaaaggttagaaggagttccagtgtaactgtcctacataatggatagacttttgtatcatctatagtaaagtcagtttattcttgttcccttccttaccctcaactagttatgtgaggtgtggcatcttacgttgtaactggttgatgcttaaggaaatcacggtttagggtcagtctttatctggaatattatgtagggattgagctttgatactcatcccttttttccagctgagaagtttgagtctctcctctttccaaccttccattatatagaccaggatttctgctcttttgctgcttttgttacagaattattgcagaaagagggtttattaaatgagatacaagttagtagagcaatttctaaatgataaaggattccacaaggataaagtagtatttaagttgcagctgatgcaactttggcctgtaatagatttatgccgtttacgattatatatcaccagctcagccgttatatctatatcttcttaattatctagtattttccggtcagaaattttctctcttcaaccctctagttacatttctatctacattattcttggtgtatttctttgtatcaaatttgttgaaaagattgatactgtccatcaagaatacctgtgtcttcccatcttgtaacttcatcatgcctctctattttcatatgtaccacccatttgttgttgttgtctttaatgtcaaaggagccaggaccttttctgtgtactaaatactaataagctaactgaagtcccaaactccaccaccagtatctatctgcttttctttctaatgaggataaggtctccccatcttggaacagcttttgattgactcatttttctccttttgaacctttctatgtcactacagaacttttcaagcatatgaggcctatactgataactgttttctttcgatgcaagagtgagtgtgatgtagcctatcaaactctcagcctaaaaaatcatgacaacaagataatttcagattgtgataaatgctgtgaaggaaataaacagaataatgtaagagtaattggaggagaaggagttggctttgtaaaagcagtaattttagataaaaattttgtctgagaaaaaattttaaaatcttgatctctagatgaggaaattgaagatgagaaagcacaaataattaagttaattatttccaaatgttttattttaaagtgttcattatataattttgattatatcatttaaattttaaagtcttactttaaggcaaaatttatttcctaatagtcatcattagatttcagaagtctcatatatctgtttttcctacagttaaatgaagaaaaataaccttcactaggacatgatgtttatctcattgtcgttgattcagtgtatatgtattaaatgtttaccacatggcaggcatgctactaggcactggggataaacagaaataaaccagacacagctctttccctcaataaactcaactgaggcagtttttaggggtaacagattatttaaatttatcatttactttgaaatagattcactgtgtccattacagtagaaagttcctcactagttttaagaacgtattttaagaacatataatacaacatttaaaagttgttttattttatcaaatggaatttatattccgaatagaaagtgaacataggtgaaaaaaaaaacatgaatcaaactgttacagtaataactgaacaggggaaagatcacttcatttatggttgagtcttgggagaacgtcacttaggagtcaaaatgtatattcagtgttaaggaataagtctcattcagtggagaatagaatgaaagctaatttggtgtgggaggggggatcattgatcacagagatgggattaaacaccaagatatacctaaaggacctggataaataggcgtggctggaggagaaggtttgtattggtgaatagtaaaagataaagcaaagtcattcaatagaaaaaaagattttgattgtaccataatagtaatgtgttcctaaaatcttcagttcacttgcagtctattgtactgttgcttctataaagggattatcacaatgtgcagtttgcagttgtgtcatgattctaaataaatctttgtttacacccctaaatgtgttctatagatactgaggcagagtcgttagccctcctcaggttaaaatgatgttttgtttttcagttacttacacgccaagtcaatcatccacagagacctcaagagtaatagtatccttcctgaacttgtctgcgaagtttgaaaacatcctgaccttttctcctgcattttatcttcacattatgtaaaaccagttttcacgctgagttcaacaatacactggaaagggaatcaataaatgggtttgcacaagagggtagtagtacacgatactacaacctgcttttggtttttgaacagctaaccattgcaaaaaagaaatctattaagtccttatgatggtaggactgtgattgcttgtttatatcctgtaagcactataacatgcatagttttgtagctgtctactagcttctttgagtgccctgaccttgttcagtggtcgttgagatgtaactgatggctctacattatataacaatgaggtgaggcaaacataatgtttcttcttcctccataagcccagattcagatccgatctgccaggtgcctcagtgctagtgacgagctttatagccttcctagcagtgccagaaggatatttgggcctcttttactaaaatccgatggggaagtctcaaggtctcccacaaacttaggaaaacagcttacctcatcttaccatgtttgaggcaccagaaatcctaaaagcaggtcatacagttcaaataacactatttttaaagcatacttattaactttaaaaggaaatgtgaagtactatacttccttttaaagaatatcataataaagaattgtggaagttatatctcatacctaaaatcttcataatgcttgctttgataggaaaatgagacctgttgttttcctttacttactacacctcagatatttttcttcatgaagacctcacagtaaaaataggtgattttggtctagccacagtgaaatctcgatggagtgggtcccatcagtttgaacagttgtctggatccattttgtggatggtaagaattgaggctatttctccattaattaaatttttggcccctgagatgctgttattagaaagtcattgaagatttcaactgtagtgttctcatagttctcagtatacacaaaaaccaatgttgatcttattttgttataaatagattttaattttatgtttaggaagaatattgtggaaccagcttcagtatatcttaaacaaaagaatgtatcttttataagcattgcttaagttttattcagaattgtctctctaaaatattttgtgtttagaatgttctgtgtatgctgtttcaaaaaaaaacaagtatgcaatttaaaagtaggtgtgatctgcagccattattaaggtttcaataaaagaactactccttttaagaataagagactgtttcacaatcttttttaaacctaaattggaaagttactttctttagactagaaagaactgtataattatgggcagctgggaaaagaaaaagaaaaatgaaaggtttttaacactgtcagccttgtgtgccctgcatagctccttgttctttctttcttcctatttctgctttgtggaaaagaagagagaaaaattataagaagagggaactaaaattttgttcagttgctttcagcatgctgtgaaaagggcagtcatagggcttttcttaagccagctcttctcaggagggtccttaagaccctttaaggtttcccaaggtcgtcctatgtgagagtagctttttcttcatactgttcaacacatcacaacagattgaatgcataagtgaatatgtgaccatagctggctgctgttaaaccagtcaaaaaggactacagggatttccctggcagtccagtggttaaggctccatgcttctactccaggagtcacaggttcagtccctggtgggggaaccaagatcctgcatgccttgtggcatggcaagggaaaaaaattgcagtattctcacaaagctttgtttttgaaaatctagctttcattaaaaaaaaagtaatttgtcttaacagctaatggttgttttataatttaataaatattttaacagttcctcagttaagttttaatttgctcaatatccgtaggtataatccacataaacagacgcttcttggggttctccataatttttaagactgaaaaatcctgagaccaaaaagtttgagaacctgtgctccaagttgaatacaggatgttccaaagctgttagtgcagttttaagttttaaataactgaatctgcagtaaaactttgggatacctgttggaaaaagcaaaactgcaagggctttcaaagccacatttgcctgaattccctgaacttatctgtagcagttctaagaagaggattctgaattagtcatgataagcctggggttaaatttggctatgatttcttataataactggcattagagtaagtggcaaggtagaagggagttggcattggacttggagtccggaggtctgtactctcgtacttttgactcttaacctgcctgtttcttgacctcctccaagtctttccatctttaacactgagttgaactaatggattttgaatgccttttctgggatttagtaattagagctaggtatatttttctttagtatgtttgttttaatatataattataagcaaactaatcattgtaatctggatctcagacacctttaaggcatataccttgaaacaaagataacagtgtatcctgggagagggtgaaattgcaaaatctacaattgtaaagaaacagttgatacatgttttaaaggtatgtttattttaactagtgtgggaaagttaggctcagtcaagtctccaggtttgtccttttccagaaaccttagattatacagtttatagactattatacattgttttatattttcttttaatttcttgtttgttaatacatgggttcatcctttattccaccaagctgagttttaagacgaaagattagtcagtagtacacttaattgttgagcaaaatccttttgagttgatcctgccttcataaacaagaacatccatagactaggagagaagaatttggtcagaaccaaaggttaggtaagtccctgaattatttacagtggtattctcaatctttatatcttaaataagaaaaccttttgtgaaaatctttatgttactaaattaattgaggataaatcatgcatttcttataaacagatcacatatgacttttcatcaaaccatctaccaacagcagtaaagtaaaactaaatttcaagaaggcagttcttcaactgttcctcacagaaattgcatcctggctttgaaaattatgtccatatcataaccagcctcttaataatctggcttgttcattacatcacagttgtgtggggtttattttgcactgtactaccaagaacagttatcaagaaaatacatgacaaaaccaagtagatgtaaccttcaccatacccccaccccaccccatccttgactcgcatctgggtctcccatacatctttcccctggtgtttcagaggttaaagcatttgcctggaatgcaggagacccaggttcgatccctgggtcgggaagatcccctggagaaggaaatggcaacccactccagtactcttgcctggagaatcccatgaagggagaatcccatggaggaggagcctggtaggctacagtccatggggtcgcagagtcggacacgactgagcaacttcacttcacttctcaacgttggtgggcattaaagtcatctggggagctataaaaactagcagttgaagctgttccatccctagactctgatggtgtattactgagctggatgttcagaggtgaaaggctgcataggtgattctgttttgcaggtaagactgaagaatgctatcactccttgtaagatagtctgttctgccttaccctgaccactaactgggaatcttgttccagctctttgggccatttttgcagctcgtcctggttttggtatcagactcatgttttcacaaaatcttgttaccctgtttttctaatttcttcccagtgaaacagtccagaagatgcaaggtgaaggaactctttaaagccaatatttaatcagccatctattgtattacatgtaaatggctaataaagaatctagttgtagactatagtaactgaaatgtgtaaaaatatagcaagtatgattaggtctgtatctttgctcaagaagcagcagccaaaagaatctttataccattttctactaaatctacctactgtctgttggttttattaataaagcatccatggcataattatactgcttttggagacaggaaaggcatttgaatgtatcagtcttgaaattttaccatgattgtctaaggtgtgctgagatgaggagattcatttgtaccaatgggaaaacttaaattctcaggtgattaccatagtacttatgctacttccaaatatctcataatgacaggtctagggtttctttcctgagtcggtaatggaaagtgggaactcctcttaataggaaaagtaatgggaaaaattcaaatggcagtaatggtattttgtgtagaaagagggcagctgttaaaattttttaaatcttaataatgtatatggaatctcagtactgcttctctcagagtttacagagcatttatttttttgtttatctttgataatcagttttctttctttggccataaataagagaattgattacatattttccataggttatttaatgataaaaacattgttctgagaattatagtagtttggttttcagtcattatttggttgatgtgaataataaacaagaatatttttctttttatgttctaccaggcaccagaagtaatcagaatgcaagataaaaacccatatagctttcagtcagatgtatatgcatttgggattgttctgtatgaattgatgaccggacagttaccttattcaaatatcaacaacagggaccaggtaaatattcaccatttcttggggttcattttattattcgtcgagaggctccatttcattgtagcaaagaagtcttggatcctgggtaagcatgaaggatagaactcttgatcttgggtccaagtttagaaccttttgttcattacttttgatagtaatggcagcatgtaagacctttgcttgaaataccatacttcagggttgtagtgggatgcacctcttgctctcctgactagaaacagtgctggatctggctcctgcctcgtgaccgcggcacattactgtagcatctgggcttaggccttctgctctgtcgcagactgttgcagtcaggtctgagcaggcactcggctgtgaacttcttgataccaagtccttttaaaattgctgagatttctccctattttttggatttttaaagctagataaatgaaaggactgttatatcatggtttcatttttctgtgataagaattcaaataggagggaattttttacttctctcttcttaagctcctgctctctcttccttgtcttctaaagtgtcagcatagcctccgttcagctctttgtcattttgatcccagccatgttaaattcacctaggcttttaacactggccaagaaaaataaattttctttactgaaattacctcatatacctcaacattttaaaagagtgtgtgtgtgtgggtgtgtgtgtggagagagattgcagcagttacactgttaatatattagagaacaatagttgaccatataaattgggattaaaatagtatttatacatcatactgtgatttgcatgtgaatcaccgggataatttgttttaaaaatgaagatgctggtgcagatgctgattcagtggggtggggtccaggcatcagcattttaatgggtttgctgggtgtttctaatacacacggagagtcaccagtgtaaaaaatctttttaaaagcatgaatgttgtatgtgtttgatcataacctcccaacctaatgaaatgatagtttttaatgtataatgctttctttagtagttttttggtcagcaattcaactgtcagtctttttggtaacactgaagctttctaaagatactgggtagctttctcactaagaatttttaactatcatgtaatatcagagaagtaatctaagttgtcatatgcttgtgtgtacttactgaatcaccatacgaccctaactcaacaatggccttgattctctatcttgaggattttttaaattggctacatttccacctaagtcggtctaaaactaaaatttttaaattgttgtttggtctttctaagtacttcatagctttatttaaaatgttgaattatagctctaagtgttaaaaagaaatctatgacctggcttttgatgacctgattcttttaagcctccatgaagcttagattcagagtgggctaaaatagaagctaaagagcataattgaaacattgcacttactgtccttgtgacagatcctagatcactgagatgattgatttgatgatggcattctggggagcaagattgcctctaatttaccagcttcgtgtgctctgcctcttacagtcttattaacagggtatccagcgtaataccctgtgccatgttcagttttcctagccatactgttcttctagatgaagtatgagggaattttagtttattgtcagttgatttatcatagagacaaaaaataataaaaaaaattatgaacctaaggtctggatgaaatccatttgtcagtgagtaagtttgttttaataaaataataaagttatattatggaaataagtagcagtgtctccaaaatatggaaaaagcatcccggagttctgcactcatccacttcttggcattttaggtgctttgtcctccatgggagtgtaataaatgctgtgcaagggcttacttcccatgagagaagtgagtgaccaacagaagggtaaggcctttactagttaattctttctggtagtatagttagagccttctggaatttgccagcctgaaaccaagtgtttgatgaagagaaaggatatgaaagaactgtgttctcttcccgccatccccattctacttcattacttcctagtctgttcttttagtggcgcttttcatggaactccctcttactagtcatcctcagtgaagtaaccccaggtagtgctcatccatctccttgatttgatttttctttctgtctttctcatactttaatttccatggctctcagattggatttctgtttgaaaatctaggagtaatctttattttttccatgggagatggtacagctgcttctttactgtgtaatataggcccatccccccatattctcacccctcagaagtctgaggtggcaggttttgcctgtaaattcaagataggactggtcaaacagcctgaagtgatggcagatgttggactcacaacctgcatgacctggccactgtacctctctaggtatctggggttttttttccaattactaaaaataagagattgaactaaagaagtccttaaagttaacaaagatcggattctttcctaaacaggcctcttaactccttgaggaatgaccatccctatatgactttgctgagtagcatgcctttttatttcacttacccgagtgccaaaagtctgagaaattgcttggtcctttcccctctctttatccttctgttttgctgtctagtcaccctattcttacctcttgtagtgtagcttcgctactaaattggggttgataatgtgctcagttaagctaggtatagtgacttttttttctcttgaagcagaagtgctgtgtcatcttagaagaaaacaacataatgtttatatttcacatgaattccagttattattgctgtataaccaaccacctaaaatgtagtgacttaaatgataaatctgcagtgtgggtttctcagtgtggaaggtttatctatttcacgtggtattggctgtggtcagttcactggctggtgaagtatctacttccaaaatagcttatttgcatacatgagaaggtatgaccagttaaccagttagctgtcagccagaagcttagtcatggccaagggctggggcctcagttcttctcaacataggtctttctgtgaggactttctcacagtatggggaaaccatatgttaggttaggaaaaaaattcactggagaaagaaaaatacaaatattcaatagtttaaaggcaaaaaaagagccatgtaaaacttgcagaacacaagtatggtggctgggttctaagctgcaagatctaaaggagacaggaagtgacaattaccagggaatgataacaagtatattcttgttgttgttgttcagttgctaaatcatgtccaactcttttgtgaccccatggactatagcctgccagtctcctctgtccatgggatttcccaggcaaggatactggagtgggttgccatctccttctccaggggatcttcacgacccagagatcaaacctaagtctcctgaaatggcaggtggactctctaccactgagtctccagggaagccaataagttaatcaacatgcaaactattttaattaaaaaatttgtgatacctactgtgtgggatttagagtgatacaaagatgagtaaaacataggctgtgctctcaggggagttcacagttctattgaggcagtgcaggaagtgatgttgaggatgagcagatgtgtgctccaacaaaacaggagtgaatgggagggcagggataccaggagtgcgagtatagacgtgtagactgaggatgaaagtaaccagtcccagagtctcaaaccaagctgttgattctgtagtataagtgccagtttaatttcctatccatgaattacatccaggaaagaccttcccttaaaagtttaaatcattgcaaagaatgtaattttcagtgtattatattgacatttccaaaaaatgcaattatataacttttaaatgtaccaatttaagtcatactttatttcgatacttaccatcattacttgtttaaaaaatataaaacctcttcattaatttttataagttttggaacttcatggccatccagtggttaaaactctgtgctcccactgcaggggacacaggttctatccctggttggggaactaaggtctgcacaatgcagccaaaatttaaaaatttctgcaagttttacatggctctttttttgcctttaaactattgaatatttgtatttttctttctccaatgaatttttttcctaacctaacatatttttatgctttaaaacctcttattgatcactcaaattatatctctgcaacaaaaaatacggattttaatttagagttttaaaaaaaaagttgccagtgaccttaagctctgttaactttttaaattccaaattatctattaacaattattaatatatacctgatgaaaataacatacgggttttgataaatagaaacaggtaaaattttattggaaatgtgtattttaatgaacaacatgggattttattttctcttcatccatatatttgtgaaaaataagacttgctagaataagcagggacttagcatcagtcctttttctagttttatttttaaagaagtgctgagaaatattgttcaaataaattaaatattaataagagtatgggaaagtcagaagttttgttataactgtatgcagagctcagcagaccaccctcaggttcagtaactcattaagtcttacagaactcactggaagttgttaatactcacatgatggtttattaaaacaaagggatacaggttaaaatgagccacaggaagaggcacatagggcagaatccaggagagtgtcacatggagcttccagttgtcctcttccaatgcagttgtggccagtactaagttctggcagccacatgtgacagcgtgcagaaggtattgccagcgaaggaaacttgctagagtcttggaggccagagttattctcaggcctcagtcacatagatactgttggccaccttagttttagcccctgcagaggtcaaactgataccatataacttaaagccctctctgctgctgctactgctaagtctcttcagtcgtgtccaactctgtgtgaccccatagacagcagcccaccaggctcctccatccctgggattctccaggcaagaatactggagtgggttgccaaagttctctcagtaaatcacaatgatagaataagactgtctgacatgatcttagactcccaggtaaacaaaggcactcttatcaggcagaacattccagagctcagggattaccttccaggtggtgctggtgcttagaggggatcttcccaacccagggactgaaccaaggtcttctaagagccagccctccctgtgggcgagattaattctttaccacaactgggtccctggttatttgagctctttctgtggtcatagtttagctgccaagttgtgtccagttcttgcagtcccatggactctcgtgtgccaggcttctctgtccatggcatttcccaggcagggacactggagtggattgccatttccttcttcaaaatatataaatatatgcatagaaatactatagttttattaaactaaaagtcatagcaagttatttatttggagaagagtcattaaaattgaaaattctatctttataaaaccaattatatttcactaaaatactctaaaagttgaatttaattttcaaaagaaaacataagaaaatatgtatctgttctacaagttgatcacataaaaccatcttaaactatttcacaagtccccaaaataacaagacttgtcaactttcacacagattatattatttgacctacttattgcttctattgaatttcttctttgctttattaaaaaacagaatttaattaatgtcagtaaagacaaagccatggctaacaaacacataaaaaatgctccgcatcactcattatcagagaaatgcaaatcaaaaccacaatgaggtaccatctcacaccagtcagaatggccgctgtcaaaaagcctacaaacaataaatgctggagagggtgtggagaaaagggaaccctcttacactattggtgggaatgcaaactagtacagcccctatggagaacagaatggtgattccttaaaaacctggaaatagaactgccgtatgacccagcaatcccactgctgggcatgcacaccaaggaaaccagaattgaaagagtcgcatgtaccccagtgttcatcacagcactgtttacaatagccaggacatggaagcaacttagatgtctggcagacaaatggataacgaacttgtaatacatatgcacaatggaatattactcagtggttaaaaagaatgcatttgagtcagttctcatgaggtgggtgaaactggagcctactatacagagtgaagtaagtcagaaagaggaacatcaatatagtatattaatgcatatatatagaatttagaaagatggtaatgatgaccttatatgcaagatggcaaaagagacacagatataaagaacagacttttggactctgtgggagaaggcaaggatgggatgatttgagagaagagcgttgaaatgtgtattaccatatgtaaaatagatgaccagtgcaagttcaattcatggagcagggcactcaaagccagtgcactgggataacccaaaggggtggggtggggagggaggtgagagggggttcaggatggtggtacacaagtacaccatgcgtggctggttcgtgtcaatgtatggcaaaaaccaccacaatattctaaagtaattagcctccaattaaaatcaattaattttttttaagtctgtgcaaggaaaagagacaaagccatggatcagaagcacatggccataactgaagattttatgaactctcacgaggaaaaaatttgctctttgaacagtaagaaggaactctataaaatgtaactgagaactgttcaacaggttgaaagaggccattggaactgacaaaatgtttcttaaacataaatgatcaaacaatgaaactacataatatctcctctggctgaaacagtcaagaagtttaaagtgcttaagttaaaaataaaatcctagtaaacagtgaggacttactgtgtaacatacggaatatcttacgataacctgtaatggaaaagaatatatataactgaatcactttgctgtaaactagaatctgacacggagaaggcaatggcaatccactccagtactcttgcctggaaaatcccatggatggcggagcctggtaggctgcagtccatggggttgcgaagagttggacacgactgagcgacttcacattcacttttcactttcatgcactggagaaggaaatggcaacccactccaggaacggagcctggagaacggagaatcccaggaatgggagcctggtggacagccgtctacagggtcgcacagagtcagacacgactgaagcgccttagcagcagcagcagaatctgacacaacactgtaaatcactacactttctattgcataccaaaaattatttaataacttgttgttaaaaaactattttaataattagctggcaattcagttgattttgctgaaaacaaagaattggaaaccagttgtcttacaaagcgctttgctacccattcattagagtccagttagatagcagtatttgaaagtgtccctttggtaccctgagcagttttacaccttggcgcagtgtgatatatgcaatatattgtgattgcaatatgtcacacaatgcagtgtcatttatgcaatacattgtgatatgcaatatatttaaattgcatatgtgtaaaagatatgcctgttatgaagtgggagaagagcagttacaacagagaagatgggaaaggaggtaagcaaaattaaactaacttcactttggtggtgctcgggcaaatcagcgtgtagttaaataagggttagtacagcaccaaaccagacataacataaagtaggatatcaaacttgactgttcctaaaattcatcaattctgccctgaaaccaaggatctctgactgcctctttccaccttaggctctgttgtttttcagtagctaagtcatgtccccatggactgtagcactccaggctcccctgtccttcaccatctcccagagtttgctcaaattcacgtccaatgagtcttgtcatactatctaaccatctcctctgctgtcctcttctccttttgccttcagtctttccagcatcagggtctgagcatccagtctacccctattgaacctgttccctctaagatcaaaatccctctcttctccctaagacttaagactgctaacatctgtctttacccactttcaaaagaactgcaagtcagaaaattagaaaagaaagaaatcagaaaaattacaaatctctgcacacagggaagataaacctttttactttgttaaacagaagatgttagttcataattcaccttctaacctctggaggagactctgattctcagacttacttaactcaatgccccattagagtttcctcaacaaaagagttcaaagttcagatgccagaacaactgcttaacagattaactttggttaaccaaaggttaactcttggttgaatggaagaggtacaatctgatctgtgtttcagaatggttacccaatcagtgggaaaatggactggataaggaaagactgaaagcgtgggaagcacttaggagacctttgcagtactcacgggatcatgaagatttcagcttgcagcacattaagtattgattccccatgaagtgaagtcactcagtcgtgtccgactctttgtgaccccatggactgtagcctaccagacgactctgtccatgggattttccaggcaagaatactagagtggattgccatttcccataatctatgatatagaagactctgaatactagtggcattgtgctttttaattttttatataagtgtaatgtacatacagaaaagtccatgtcttacgtgcacagcttgttgaattttcagtgttttcacttatttacaagattatatgatttgccttttttttttcctccccagataatttttatggtgggacgaggatatctgtctccagatctcagtaaggtacggagtaactgtccaaaagccatgaagagattaatggcagagtgcctaaaaaagaaaagagatgaaagaccactctttccccaagtaaggaaaagctttatgttacctaaaaggacagactgataattctaatgcagatttttaagtacttttttggagcacagtttgtatttcacagatttggattacttgtgattatgtgcagactcatataagtaaacacattattattaaaggtgatttataaaggttgaacctagtaacttaggatcccaatacaaaatattcagaaagcttttgcttttgtctagcagttctcaaacgttttgatctcagaaccattttctacacttaaaaattattgaagacccccaaagactttttgtttttgtaggtagtaattcccattttagaaattaaaactaaggttttaaatatttgtttataaatttacttaaacatagtaaaaccattacatgttatataatgttttatgaaaaaatgtattttccaaacaaaaaaaaattagagaaaagtgacatttgttttatactttctcacaaattgctgcaaaaagaagacagctggattctctgctttgcattcattatgttgtaatatcttacattatatagcctctgaaaactccacttataaagtaatgacagtaaaaaaggcaaataatatcttagtgttagtgcaaaaatagttttctacagactacactttgtgtactgctacttttattcttcttgacaataattgcaagcatccttctaatattaggttatttgaagaggtatttttacctggggcaaaaagagacggcagctcttggtgttgtctgccattctctaactcttggaaactttccacagattctttacaagttgaaaggctaatagacttaagttaataatttttcataagcctcatgaactggaactaagtacctgaacaagcttagaaagtttagctgtagtaggtatggtcataaaaattcagtgttttataatacctcagaaattcatcatacgcaatataaatctgtttcagttaaattcattggaaaaggaaatgggctgccgtctatggggtcacacagagttggacacgactgaagcgacttagcagcagcagcagttaaattcatcatacgctgtataaatgtttcagcaagtcggtccagatttcacgtggaaagtgctgacttccataactcagctacgagaattactgacttggtcttttgtgaatcttatgcctttgagtacccagtcctagctaagtttcttggaagtcagtgttacagaaatatgtgagtcttttattccaactaaagaattaaagatagaatttatgcttttaaccagtctctcttgtcccagagcagggagggaaggctgaagggctgggtgggtagatttgttttacaaactggaattctacattgctattcctttgagggagagttggggtttttttaaacccaggaaaaccactggcttatgactgtcgaagtaaacaaccagtattgttacaggtctctgcaccgtgttctcgttttcacatcccaggtgctaggcccccctgtttaacgtggttgatgtacattaataatgcagattatatccttaggctcacttttcagatggtattaaaagggacaaaatggtcatgtttctaaacataaataatattttactcttttcatggtattaggaaatgaagtccatatatgaattccagattattaaacactgccactttaagtacttttttcacattttcattataggctctctgttcccgccatacacaaatttcagatggccaaaggtttacatgtaaaaaacaaaattataacaagtgatttttacaaccttaaggtaggaaaggctctcctaagcaggagacaaaattcagaagttatcagggaaaagattagcaggtatgactacattaaacattttacatctctatatagtaaaaacaatattgaaagataaacgctgaggaaaaaaattgtagcatgtataataaagagtgattatgttatacagatccataagtaaaggtagacaatagaaaacaaacaaaaaatatgcactggtgattcacaaaaaaaatacaaatggtgagtgaacttggcacaagatgttaagaattcagtgataatcagtaaaatacaaagtcacaactgtgaaatacatttttatttttgtctctcagattaacaatatattcagcattgggaacaatgttgggaagtgaggaagagcttttcttttaaattttgttggtaggaatataaattggtttggccttttgaaaggacttggtagactccataaacttaaaacacatacaccttttgctctggtaattccactccaagaaatctactctgtatgctacaaaatctgcttccaagtatccagatagatactagactgttaactgtaataggaagaattaaagacataaagatcaaggtgtctgtgtagatggcttggttatcagtgaggggaaaagaaagtaatgccgaaaaatgtgtagtgtgataccattttaaatggtgatgagggtggggctgggctctgttttcatatgtgcatgtttatgcataggaaaggtccagaagaaagtatagactctttaacagtggttacccctggaaggtacgatttatacttttctgtattatttgaatttgtatttgtgtgttataattttaaaatttttgtaacaacgcttacttctttgccttcttatactaatcattatacagatttcgtttaactttaaaaaaattttggtggctcagaaaaataataattagtatataatgtatagaatactactgtatagtatataatcatagtaataatcattgtggctgctaaaattttattgagtactttctatatgccaggcattgtgccaagctcttcatatgtatgtttcatgtgttaccatgctgtgtgccttcaggagtcgtaacctgtttctttgtaccttaaaaatgtgctgaatttctacattttgtttattagtgtctatttgtagagttttcttgtcttgttttttactcatgggtcatcatctgtcacttctcactcctatggcactaaggtcattggggccctatttttaattatatgtgtgaaagatacttcccaatactaaatttctttaaagaatgagttgctctgatggttctgtttatgaagtcatatagtgctttagttatttatgctccatcttcttcccaaaagggacttgcggtctgtgagaaataggtatatagttgatcttaaattttttattgtttactattccaaggctggcaaatgatctaaaattataagatgtaaataaaaactaactatgggtttcttttctcattcagtttatagagattaaaagatctaatagttaggtaattttctcttcttttaaaggaaaagtatgtttctctagtacattccaggcatttgggattacagtaaaaacaatgtaagatttcatacactttcttataaagtataatggggctcttaaagattaacaccatctacattttcattctttttttccttttttttctttttttagattctcgcctctattgagctgctggcccgctcattgccaaaaattcaccgcagtgcatcagaaccctccttgaatcgggctggcttccaaacagaggattttagtctatatgcttgtgcttctccaaaaacacccattcaggcagggggatatggtacgtttcctgttcactgaaacagagtgagtgagtgacagcgtgtaggagggtagggacaaaagaaagtgaacatatgtttgcttatgtatttgttaaattgaatagtattttctttttctttaaaggtgagcaaaagaacatgtatgtttttaaagtctggatatagttttcttcccagtgtaaaatccgttgttagcattagattttcaacaccgaattttttttttaaattcacagacattgctgaaaatttactgttccttttccagaggcttcacttcccattccaagtttgttttgtttacttggttagtctaatcattaaacgttagttaaactttcctcacctaccttttgctgttagctctcccgcatccattaggggctccaagaatagcactatctgtgtgtgtgtgttggcaggtgggaagctgatggtaagttaggctgtgttagtaaaggtaaactgaccaggtctaattaggagtcactagaattgaataagcttatttttattaatattcttcttataactatttctttttgtaataatttaggaaatataattgttctttattcccttacagcagtataaattatcagtgcaggtaaccaaagatattactgaggagtggcatgtttgacatgagtgacatggttaaactttgggtttttagttaatatttctttatatattaaggatgtcttatacattatagaagtcaaatttgctgacaaaagtattgcctcctcttcctcccaaaaagcacagcagaattttctgggaacttgagggattgtttgttttcttttggataactgtggttgccaaacaaccaagtacttggttttcttaaaattattattgctttagattatactcacctctcatgatgcctgttagcaatcacttcatccatgtgttttgtaaaatatctttcctccttatagtctttgcccaacaagagtccacttgttatgaacgaatgctattttctgattccccagtataattagtatgtttagtgctttctaggacttccactttcttgtattaaaaaaaataactaatgtggcagtcagtatactcttactgtgaatcatagtctttactgggaatcaaagtgaaagaagcagcattgctgttttgacttcagtcagcctagggaccaaagcctcttaaaaacaccttcatttactcagtttggatttgtgatgattttcattatagctgacagttcaaggttattcagtggcacacggatagcatctgcataaatgcctttcttcttgaaaataaaggagaaaattgggaagactttacactaatgatagtttagtctttaagtaccacagataacacacactgtaaataaaattttgaaatattttctttaagtaagttagacttcatccagggaaatcactcactgataggtttgacataatttttgcccatcatttgggtagcttaagataaacaataacattcatgcttttaaaaatctattcataacttttagtttaggaaaagaacatttcttatattttaaaaaatgagaataagaaaatcataaaagaatgtgacttattcaaaaacatcaaaattcatgatctctaaattttccaatgacactaaagatacggttattagtaactattaggctggggtttatttatttgtgaattgacagcaagcatgtagctagcaaagtttttacaaaattgacttcagtctgtggaacgttcaaacgtttgggccagagtcacatgatctttctgttgatagcgctctgttatagtttcccagcatagtttcttcacgtttatcttcttgtctttattcaccctctttttccctctaacgctacccctacaccaacaacacccagccagcgctccacctctgctctgactcttttccttcctctttaccagtctcttttgccagagggcattgctaaactcttagaactgctcagaaaacttattataccaccccattgacatttgaacatgccttcacagggttacatggtaattctcttcttcccaaattgggcccactggaaatgttattggaagaacattagaaatgtagcaggtgaaatacttaaataacatggatacggagaatgaaacatggtagttttcctttctgttgttgctgtttgtttgatactgagttttagatgtgtttgttctccaaacaagaaaaacattttcctaaccatgcatagcgttaatctttttggctaaggaattgaaacagaaggaccaactttgatgctcttgcgactgacagcttctttcctaaaacctgtacccttgaatattttcattacagttgatttccttcagaaggcagcctttttataaaatattttacattttaaaggtttactagtcagtgataaggaatgaggtttgtctttttgattttaagtaatttagggatcacagcatttaaataaaatacttcaggttttttgtttttttttttcagatattactgtattgttgtaccagccatttaaatcctaagcaagtagttaaactcattctctctaaagtagtgactgtttaacacagtagcttatatggccttcctgccaaatggatcagtctaaatgtaaggaaatcatctaccctttttttaaagtattatgaaaatacttcatgacaaaaacattttgtcggttatagtcttattcgagaagtattgagcatttctaaaataccttttctgtgatgatttctctaagaattttaaaaagttcagtgtgtcagtgccagaatgttcctcattttttttaaactgcctgaaaggtcaccagaaagaaagaatgggacttactcttgtttcaaatgactgcccttctacatctaaaacagggatttatttttgtacaaaagaacattaggtttttcctagactattttatatttaagaaatttttatcaaattatatgtctaacagtcactgaagtacatttaactctggaattaagagtgattatttagtaatatcttaaaactagttaataaagtccatagctttcaaacaaacaaatacttgatatttgaggttgaggtgtctgaaatcttggggtctttccaagtgttttctgcctttttcctaaataaaatcaaatggaaaatagagcttaggttattctcaaccagaaaggaggtttttaaaaaattttattttgacctctgactgatttttggttaataattaaattaatatactgagattttttttaaaaagtcagaatatctagatgtttcattttgaataacttcacagaagcagatttggctcttacatcaaataaaaatagagtagaagttgggatttatagatttcctgatatacaagaaggaataagcaagaaaaaaggtttgttttcccaaaatcatatctattgtcttttacctctgtcttttcttaaattgtctgtgatttcagaggcacgtagagttttagttattgatacctaaactatgagggtttttttttttttttttatattttggttttttggccaagaggcatatgggatcttagcttgagaaagcaacaattttcttgatgtcattttgggtgagggcacatattgctgtgaatagcatgctgatagccaccagggaccaaactcgcacccgctgcattgaaaggtgaagtcttaaacactggactaccagagaaattcctacactatgagttctttctgtcatcccctccccacaccctctaccccaacctaaactctgatgatgaaatcaacaactattccattagaagcagtagattctggtagcatgatctttagtttgttagtaagattttgtgctttgcgggattatgtcgttttaaggctgatatttaagtttgtcaagtagaatgctgttcaaattgtaataatgagtaggaaacacctgaagttttttttttttaagttatttttaacatggtatatacaattgagcttagagtttatcattttctgatattctcttaatagatgaattctagccattttttataaagatttctgttaagcaaatcctgttttcacattggcttcctttaaggagttttagattctgctggatatggtgactgctcataagactgttgaaaattacttttaagaaatgtattagaatagttctgaaaaaaaatagcaaccttaaaaccataagcaaaagtagtagtaaggatgtataatagcctcctatggttgtactttaaatgttttgctctccaaggttttagtaatatggctttttttctaatcagtgccaaactcctccagttcttttaactttaaatatgaggtaataaatcttttacccttccttgatcttttgacttacaataccttggtcaattgtttgttaaaaggaatccttaaatggaaagagacaatatcagtgtctgcagttctggttagtagttttattcagaatggaaaaacagattatgcattattgaaaattgttcaggggtatgttcattgttaagaccttggactttggagtcagtgcctagctatgcattccaggcctgccattttctggctgtgaaattttggacaagttacttaaccactttaaaccccagctttaagaagtaaattaaccccagtaaattaagaagtaatagcatccgcttcatagagttgttatgaggctcagatgcagtgcaaatgtgtataaagtatgcagggagtcacctggtatactataatagacactagaatagttgctaatatcatcagcataccatctgaggattctgtcagccaatcattagcaatctgttgtttgttgggacatgccagtgttctccagctgaaatcagtagcaatctaaaaatggatagattattcctcatttaaatagtgtattcatataagtgattgcttggatccttatcagaagttgctgttactgaaaaatgatgttaaggctgactaagttgtgatagttgtcagttactaaccagctccctgaaatgaataagaggaacctatttctatttcctagtagaaggtatggacaaaatagtaggtgaaaaacaatgtcttgaagcccccaaattcagtaagcttaaaagacctcaaacggtctttgcagtttaaaatttgtatgctgagactgatgttcattgacatgtgcctatatgtaattttttgatagtttaaaaggtgaaatgaactacagatgggagaggtctaaattttctttccttcagtcaaatgtgtaatgtggacatattatttgacctgtgaattttatcttttacaaaaggagattaattcctgcttcttccttcctgatagttgcattataatcatgaaaatgagttgataatttggggggaaagtattctacaaatcaactttattgttttaccattggtttctaagaaattttgttcatttgaactgtttatagcttgattagaatcatagcatgtaaaacccaactgggggattatctgcagacttaatgtagtattgtgtcagttgtcttctttcatgatttcaaccatttttgcttttgtcattgctagatctgtagtatacagctagtcacctttcagcgaggtttcagcaaggcttttctgcatctctaggttatttgagatcacttttttaaaattagctcttgtcctccctctacaggagaatttgcagccttcaagtagccacaccatcatgacagcatctactcttatttcttaagtcttgtgttcgtacagtttgttaacatcaaaacacagttctgttcctcaactctttaaagataaaaattttcagtgcataagctggtatggaacagaaggaaatttcccatccaacaaaagagggaagaatgttttaggaaccagaattctctgctgccagtgtttcttcttcaacacaaataccacaagtctgcccactcccaggaagaaagaggagagaccctgagttctgaccttttgatggtcaggcatgatggaaagaaactgctgctacagcttgggagatttgctctgggaagtctgccagtcaactttgcccttctaaccaccagaccagtatgtggctgatcatctgatggggcagttgcaatcaccaagcctcgttctctttcctgttctgggattgtgttgtggaaccctttcccctagccgccactgggtcatttctgagggatggaaca

SEQ ID NO: 57 - DNA, 38838 bp, Hippotragus equinus
  source 1..38838: mol_type = genomic DNA
caagccagacagaataaaggcagcacggcatttggcttttgaactgagttcaaggcaattaaagtcatggactaaggagggaaggagggggttcagaaataccagtataataagtagtatgactggagcgctccgtcaattaactcaattagacaaagcctgttttaaccggggaaggcggcgagaagcgctcccctcattaaatctggctattagaggagcttctgatggaatgaaatttgttttagcggtttgcatcacataaagtcgtctctgtgtgtgcatgtacacacgagcacacatgtgggctctgtaatttttgtgggtctttttttcaagaggagaggaatagaaggcagatccaaaatataccccctaaaacgaaaatttcccccaaatcaaaaagcgggtgaatgcccaagagtggaagaccaggagaaagctggagagaagcaaggagtggaaggcgagagagagagagttctcccggttctaaagccatgagcccccttgggtgggggcttctgctcggctgtctgggctgtgcgctcccgtctggggcctgggcgcagtttccccgggtctgcatgacggtgggcagcctgcgggccaaggaatgctgcccgccgctgggcgccgaccccgccaatgtctgcggctcccaggagggccggggccagtgcgcggaggtgcagaccgacaccaggccctggagcggtccttacgtcctgcgcaaccaggacgaccgcgagcgatggccccggaagttcttcgaccggacctgcaggtgcacaggtgagcaggccggcggatgtgcgcatgcgcccagttgggtggggctggcccgctgagggaggaaccccttccaaggcagagatgctcagcctaggctttgaaaggcaacccaagttggtccattggcattgaataaggctgatgtctgggtatattctgcacaccctttagtagatctagttatgagaactaaataaatattctgtgggacacgctggttctatgaacgagtgccagcacaccatggacttgtctgttggcgagggaagccagagagccccagagtcagctttgaaactcagagcaagtcctttcaagatggattcagtgccctctccttctgagatgggtttgcacttgttgaagagggagggcgggtgattcttggcatcggtaagacagatgtcggggggtggggtaggtgttctgaagttcgagtctcagcatttctgacgatctgaacaggtctcaagcaggatatatcttgctcgtgaaggttatgactggcttgtaactctgccatccttggtgagatggacggacaaagctgaagaagggaggctagttttagataacaatggcttttttcactcctgtctgggtgtgatttgagcatttcagaatttatgcagtatccctctttcagaccttggtctctcttattacctgtttttttttttttttttgaaatctctgtgcacttcttacttctcccgctcttcggagccttctcaaatcctctttagtggggctccccttcagtgttcagcaaacatgcacagcagtgataacactcaaaggctggcagggcatgtgaaacacacacacacaaacataagcagcaactttagcaaagcccttggaaactgttccacagtgtccagctgcctaagaggttttccttttaaattatgtttttattgatgttatgtgatactagaacataggagaatatagataactgagctatgtaaggacatagaaaggtaaactaagagaatgtacaaagagctgtgatgttgatgtaagaatgagatcagatttctaactgaaaattctgaagctattttttaaatatagaatggagaagcaaggccctttgtatagcacagggaactatattcaatattgtataataagccataatggaaaaggaaaaaaatctggctttattatcattcttttgtagtcatattgttaattctctaattcaaaggatttgttagttttgtcttggggtattaattgtgacaaaatgtttgtaatagcatgttgaatgtatactattcatttttttctaatctaattgagcacttgcttctgtagacattatctcatagattctcattgtttttctgtctaatgagatgcagcaggtttcatattacttgtgggattggaaaccacactacacagtgacttctttgttggtgactaaaaaattcttctagaaagcttatttccaggtcagtcaatgatagagtgccacaagttagaaacttgggaatctccattttatggaatcctggcagcagaagacatcaggaactcaggtataaccattaactctccttattgctgcccatgcctgggcttcccaggtggtacagcggtgaagaatccaccttccaatgcaggaggcccaggtttaatccctgggtcaggaagatcccctggagaaggaaatggcaacccactccagtattcttgcctgggaaaaccatagacagaggagcctggtaggctacagtccatggggtcccaaggggtcggtcagaactgagcaactgagtacatgcacacacgtcactatctgacctgactaggaagttttttaaattttttaaagtgagatggaaggaatcaggggtggcagaatagaagagataattgcagtctccttgtcccaagggagtacttacaaatattccctctagaagtggcagtaacttagggtcacagtgacctactttcaaaatgttctcaggaggatgtgtgtgctcaatcgctcattcgtgtccaactctttgctaccccatggactgtaggagccaccaggctcctctgtccatggaattttccaggcaagaatactggagtgggttgccatttcctacttcaggggaatcttcttgacccagggattgaatccgtgtctcctgcaatgacaggcggattctttaccactgtgccacctgagcttcttaggcaaacatacctaagaaggcagtgggccagaaacagggcctgacctgtaagtccagaaggacatctcatatctgtagaccaatcaaaggaagcagggtgtatagtctccttctccagccatagtcaagaccaggactgtctcttagaaccccttgtctccctcctccaggatttgatctgtctagactcattcaggaccatagctctttccatcccagctttggattgactccacttatgttggctagatggtctttttctttgagcctcaggacaccagactaagtccttagtgattgggctggacaggtatttcgtatatccaataatcactgtgatgtgtcatatgccccaaagcaagacacacgttttttcagtttattctccctaaagagtgaattgcttgctttcttaggctaatttcttcatgatttaggaggcagtcttcagaagttaaacctgatcttcagtgcccaaagtacacccctcaccaccactgtaacctcaaaattctttggcaagtagattcttctagtgtcacctcaaatttattaatgaaatgtagattagcaacaagactgttgatgaccttggaattttgttaattccatggaaagataaacacaccattcatctttaatggacattgagattgtttcttcatcttgggcattgggaataatgctgaaatcaacacaggaatctcaatatctttgtgagatcctgatttacattcttttggataaatactcagaaattggattgctggattgtatggtcgttttatttttaatttttgaagaaccttcatactattttccacagcagctgcatcattttgcatttccatcagtagtgtgcaaggattccaatttctttgcatcctagtcagatggtatttgcaatttaatgctattcagccctagaaaagaaggaaattcggcagtatgcaacaacatgaatgaaccttgaggacattgtgctaagataagtcagccagagaaagacaaatattggataattctatgtacgtgaggcatctgaaatagtcaaattcatataatcaaagaacagaatggtagtcaccaggagctgggagggaggggaaataaagatttagtaatcagaggccataaagtttcagttaatcaagacgaataagatctagagttctgcacaacgctgtacgtagagtcaacagtaatgttttaaaacaattaaacacgtgttaagagggtagatctcacgtaaagtattcttagcataataataataataaaaaaaacacccatagtccccacgatcttgaagttggtaaaggattttagctcaataaaaataaataaatgcaaactcagatggggaaaaaaaccccctacattatgtgctcaaattctctagagagaacttttgtattctctgtgggaataatttcaagctgaaaaattattgaacttaattttcaagaagagcttaatttcaggagatcttggcatcagcgattcaccttccaaatcgcacctgccaattggcattcctgagaaaagactagttgcagctgtgtctttagacttttgaaaaacacgtgcaccaaatggtttctgaacaattgtctgagaacttcttgtcgtacaactaagtgcctccatcttccaatctctaaaatggggataatgatgaaaccacacttgtaaaattcttttgagctctgtagatgaaaggcctcatgtgagtgtaaagtattgttattaatataatagaatctctaattaaaaggaataggctatttagagctccttgtaaattcactaatccgtggtctttaaacttatttagtctaataacctttggaggttgagctgatgtggttcatgtgggaacatgcaccatttcgttgttctcattctttttccatttttatcctggtcctaggtaggtataagactttgtctttttaaatttcatttttgctcaaggacatactaaataacagatagactgatatctagggatcttttactttttctctctccactccccagtgagataatgcaatccttcctaaagggtctcctttttttttttttcaactgttgctattggtggattaatggagaaactcaactcattaaattaatgtgagggactgctaggaaatctaagttaaagaaataaacattttgtgtggtaaggttttatgttactgcatttttcagttgtcttcaatattttaacaaattttttagaccaggtttagaagcacaaatatgaaagagagctgactgcagagctgtggggtgtgttttctctgagacatgctgggaaagggatttttaaaaagtcgaatacatttctaggtagtaggtgagctcaaatccacacaaacgctttcttattagcatttctgcattgcttttcgggggcaactttggctttgtgagaagagatggctttgttcaacacaactgtgaaccatctctaatcttctgagtcagaatgaatcatttcatcttctgtcatccacggtgctcagttaattcttgttttcacatttcccatcgttaggctggtgttgatatttcatcacactcatgttcctcataccactagatgaaggcaccgagcctgatttatatttatatcctctagcacttaatgccttttattcagttattcatgactccttcatcaaccacctaaccaatgtttatttagcacgaattatgttaggtccttcagatattaaggggaaaaccccaacgcgatttttgatagtccaaatgtgctggttgagtaagacaggtatgaagacaaatacttaaagactatgagatttgatcagtgataacttgtaaaactagtaatgatgatgcttcatatataacttactatgtgccagtactgctctatgttaccatgattgcttcctgtaagaaccctttattccaataggacaggttttgagaggtcaagtccatagtaatcaagtgtggcagttgtatgactgtacataaatatgtgggtgcacagagaagggactgtttaattttgacctttctttaggtaataggtgctaataaattatttgttgagagaatgagggagatagttattggtgatttagtttctagcaaccataaagaatattggtagagaaaatgcagagatcttaaaactcatggcctaggtcacaaattactcagttttaataatgagataccaaaattcaaagacaaattttattcctttaaatctaaaaatgtattgaatttagtatttcaaaatttgtgcatgctatttcttagcatttagaaggaagcagttgctctcctgttgtagagttgtaactgtattttcacctctgatcatctggccttagggaaacaactggaagtttgggtatttagtattcttcacatgcattttgttcaatcacttcttaaaaaatactctgctcctatgctgctgctgtcatttcagtcatgtccaactctttgcaaccccatggacggtggtctttcaggctcctctgtccatggggattctctaggcaagaatactggagtgggttgtcatgccctcctccaggggatcttcccgacccaggtatagaacctgcgtctcttatgtctcctgcattggcaggcaggtgttttaccactggcaccacctgggaagtccactctgttccattagaaactgcgaaagtggagggatgtatttcaattaagatgttttaaaaatagatattatgcagttatagtaggcaccccaagggaaaatagatagactccaagctccatgaagactgaagtaccttgcataacatctgatactgtagtagccattgaataagtattgattaaataatttatatttaatagcttcacctaagtgatcaacacaaattttaatgtttaatgtaaactgttcaaaaacttgattttcagtcttgggactagtagaatttttcctttgaactattagtttaaaattagtttttcatttggtgttgaaacaggaaaatgcaaataaagctaagtaagggtaggtaaggggcttcccgggtggcgccagtgttaaaggacccacctgccaatgcaggaaacataagaactgtgggttctatccctggcttgggaagatcccctggaggagggcatggcaacccactgcagtattcttgcctgaagaatcccatggacagaggagcctggtgggctacagttcatagagtcgcaaagagtaggacatgactgaagcgactcagcaggcacgcacacaagggtaggtaaaatattttgtatattacaaagagcatcggactaccccccctcaaattcttcctacttatgatatttttaaggacatttcttttaaccatcgaaaaatagcagacagtatttttttatacaggacacacgctcattttgttttcacgctgttgaaaaattttcttttcctttagagatccaaataaccctcttttttatatttttatttatttatttggctgcgttgggtcttagttgtgactcttcactgtgtcatgtgggatctttctttgtggcagtgcggactctctagttatgctaccggagaagtcaatggcaccccactccagtactcttgcctggaaaatcccatggacagaggagcctggtaggctgtagtccatggggtcatgaagagtcgggcaagactgagcaacttcactttcacttttcactttcatgcattggagaaggaaatggcaatccactccagtgttcttgtctggagaatcccagggacgggggagcctggtgggctgctgtctatggggtcgcacagagttggacacgactgaagcgacttagcagcagcacttatgctacacgggcttagttgctccttggcatgtgggatcctagttccccaaatagggattggacctgtgtcccctgcatagcaaggagggttctgggccctaaccctctctttaccatggtcatagtatgttttacttacatctattttggtacttgcaatttatcaaaatcacttgcagggcctgcttttccttctgattcacaaggacagggagagaaaggaagaagaaaattgagaattattgaatccatctgctacatgctttttatatcctttttttaaatttaaaaattttaaatttcaactttattgacatataaatggcaaataaaattgtaagatatttaaagcatccattgtgatgatttggctttttgctcctttcattcattaaatgaagattcattcgtccaaggcccgcataggcctaggcagcaggataattgccttctaggtgcctgtagctgagccagtagatgtctacaatcgccacaattaattcaatgaaaaaagaagtaggaggtgtcatgggagcacagctggggggtcatctgaccctgatgtgtgggatcagggatgtccttgtagagagctcattgtgcagcttaaaggaggaatagttaaaccaggtgaagaggaaggtaggaagactgtgagggaaaagtgttcaaaacagaaggaagagcaagtaaaaagatctgggagcaagaggaggagaagacagggaggtgatacattaaatgtttcccacaacccctaggagataagttattgttctcttttgtttcaacacacaaacaatatttaagtgtttactctctaactgatcactacctatggaatgaggtgctggtcataccaaatgcaatgaaagtgaaagtcaaagtgtagttacttagtcatgtctgactctttgtgaccccatagactgtagcccaccaggctcctctgtccatggggattctccaggcaagaatattggagtgggtagccattcccttctccagggaatcttcccgacccagggattgaactgtggtttccggcattgcaggcagattctttactgtctgagccaccagggaagcccaaatgcaataatcaaggctaaacagggaaaagtcacgctaaaataatttcaattttagatgctaaacaaaaagaggcccggagcttggtatgactagtacttggtccctgggatgatgaaatggaggagcagtttgtgcagagatgggcaaccctgcagtgatttgcactttctgacactagagccactaattcacctttatgacctgccagcctccattgattttgtcttaattctgtctcctttgtaacataaaccagctttttaaatgttggatttcacctaaattcctggaaatcagtttatttattttcattccccctttagcttggtgtatattttcttccttctgtagatcgataaccttctgcatgtgcttcagggcagaggggcccagcagtgatgacatttgaggtcgcagctccgccccgggaagggacacctgacgtgatccatgagtggaacggatggcagtacttgtcttagtctcccggggcttccataacaaagggtcgtagactgggtggcacacagaagctcattctctcaccgttctggaggcctgacagcccagatcaaggtgtcagcagggtgtgcgtcttgaggtctctcttcttggcttgctgtgtcctgacacccttctctgtgtccaaatttccttctcttatgaggacaccagtcatgttggatcaaccacaaccccttccctgccccaccacagtgtcttcattttaacttactttttaaaaagaccctatctccaaaaattgccaccgaagtgctagggcttaggacttcagcatatgaatttggtggggattcaattcagctcataaccccatggaattcttttcatgtcctgtttctttgctgggaatatttctagaaactctctggtgttcagtccccttggagagacaaacatttcaagcagagcgcaaggaaaggcaactgaccttctcttctgttctactccagatacttcttccaagctacataagcttacttcttcttccatctttcccttaatttctcaaatgcactaggaaacttcgccggctataactgtggagactgcaggtttggctggaccggccccaaatgcgatcagaagaaaccattggttgtccggcgagatgtccattctttgacccctcaagagagggagcaattcttgggcgccttagacctcgcaaagtacactccgcaccctgactacgtgatcaccacgcaacactggctgggcctcctggggcccaatgggacccaaccacagatcgccaactgcagcatttacgatttctttgtgtggctccattactattccgtcagagatacattattaggtgagctttcccccctttaccttaaggaatactaggcgcgccctaggtggttcagtggtaaggaatctgcctgccaatgcgggagccacaggagactcaggcgttctgaaatcgtgctctatttgtaattatcctcacttttgaggctcctcgttggggttagggtgagtgaagacaaagagctcactttgaatagtaagattctcatttggaatctgtccttgtgtttgggcttccctgatggctcagcagtaaagaatccgcttgtaatgcaggagacttgggttccatccctgggttgggaagatcccctggggagaggatggcaacccactccagtatgcttgcctggagaatttcgtggacaagggagcctggtgggttacagtccatagcgtcacaaagagtcagatgagcacagcacagccctgtgtttactgctcattccccctcctcattttgttttgagaactttaaactttgttctgcattcaaacatttacaaagggctgcctagccaacagcagcgacagcagtttttcccctcagtgtgggtctttttaaaacttgcctcacaggtaagcatctgtctttctgtatcgacagatacagaggctcttctggctataaacctttatagttttcctgtcatcactctgaagaatttttgctttatgagagggtagtctctcaagaggaaaagaaaactatagtttctggtcgcatctaggaattaaatttatattcatgtctgttcatctctctgaagttattatggggactttgaaaaagaactaaagttagctcaagtttctacataaccatcaaaagctgttatgagatggagaagaaggattggaaaggcagtaaggaggtcattaaatcgcccaaagcttttcactaaaattggcagttccagaggccagccaaattggtttgaatgtatttttcctctcttctggtctcggcaaccatgcttgtcagctaatagttgtaactgattgatggctgaggcaaaacccgtgaaagttccttttggttccaaatgctgaattcagactaagtgtagttgaagttgctttgttattcattaatccctccctataaatgcaggcatttgtaaggaataggttagaaaaagtctttaaaaaatatatttcatttagatcttaatgatctgttctttgggatactcttattttatcttcctgaagcactgcttctaaattaaatttataacaggagctcttaagataacctgagtttctccgaatctctgctgaccatcagactttcgagagatgaaggagaatttatcctgaaagtgctatttgcctctgagattgttttgttgtggttgttgttttcagagggataaatgacaaaaacggctgttttcccttatggttgaagaggaaaggtgggtggggagataaattaggaatttggaattaacagacacacactgctgtatgtaaaatattaatagataaacaataagatcctattatatagcccagggaactatattcaatatcttataataaaccacaataagaaagaagaaaaaaatatatatgtgcttcccaggcggtgcagtggtaaagaatctgccagtgtaagagacgtaggtgcattccctgagtcaggaagaccccctggagaaggaaatggtaacccactccagtctgcttgcctggagaatcccatggacagaggagcctggcaggctgcagtccatggggtcccaaagagtcagacacgactgaacgtgtgcatgcgtgtgcgcatgtgcacacgtgcacacacacacacacacacattcagcaaactgaatcactttgctttccctgaaatattataaatcagctattgcttcaataaaaattaattaattaaaaaaatccagttgttttccaactaaaatgtcatggacttactggctctccagcacatcccaggtaaggttcacgttaaaaaattctattctgtgacctctaacatgtttcccaattgttttaggaccagggcgcccatacaaggctatagatttctcacaccaaggacctgcctttgttacctggcaccggtaccacttgttatggctggaaagggatctccaggttggtcaaaagtttcttttagttttgctatgtattggggcaagacccgtctaagtctttgcttccttcattttcttgttgtttctgatgacatgaattgaacgtctgatcatgccctttgcttttagcgccttactggcaacgagtccttcgctttgccctactggaactttgccactggcaggaacgagtgtgatgtgtgcacagaccagctgcttggggcagcaaggcaagacgatccgactctgattagtcagaactcccgattctccagctgggagattgtctgtgataggtaatgacatgggtacctgctgtggaaatccaagagaccatatttcctcatgtctgagagatggacagtcactttacaattctgtttctaatgtgtgttgaattctgtttgcatgtttctgaaagttattttcctgcaggaagtaggattttttaaaaatcctgagtcctttagtaaaaaaaaaaaaatagaagtatggaaatcacacttataaaactgagtatgccccatcgctttgagatccactgttttaaaatgagaagtacttcctatattcagccatgccttgagctccgatcatattctaagcagtttaatagtgctgggaatacatggatgaataaaatacagccttcctttggaatatcattttatacttacaaaggtagatggctggtaaacaaattacagtaaaacgtgagaagttattttaataggtgtgtgtgcaaagccaagaagaaaatcagggaaagtctttagaaggtagagatgattatcctgagacttcaaggaggcacaaacctctcagccacaggtgggggagggtggtgtgtacttggttgggggaacattatgtatgaagctagaaaagcctctagaagctgtctggtatggctggaccatagggttctggggaattgagaacagaaaatggggtaggaagacagatctctaaagtactaaaattgggtcatgtgcagctgctgtaggaacttttttcctaccataagttataccaacaaatgctggttattaaaaaagtacaatactcaaatacacataagcagccagtagctcatgaagaattctgtcctcagtgattccttgaatatgtctctttctgaacacacatctcaggaacagattccccaggcagctcttctgtctctctatgtgttcgtttcctccacaacctgctgtgctcacactcttgccctatgtctttggactgctccatggggtgtgccgtccacaccccaggctgggcatgcgcgggttttcagggatccagctcacagggaccccatcttctccatcctgagcttttcctacagcctttcagacagtgtccctggggatgtagtaagtgctgtgtatgtgactgtgagtcattccagaaggctccatttctcatagtgtcctgggctattagtcggtggtatgtgaaaagagatatttctctgatcagattaatttagagaattctgaacttaaaatgtctttagaagttttagaatgtctcagagcctttaagtaaccatattcttatttttcaagaggggcttaaacttacctgaccctgacacccttaatttcacaggccgtctcactggaatgctctgggaaaggcagcttttagagtctgtttctgcctagtttttaggcaccagcctatttcatcttcctgtgtatgctgattctattctcacacactcagtaagatcccctcatccattaaaatccacacagaaacgtctttaaaaattaatctctactgaatgaaatactgctctgatggtggaattccaggccacaacaggcacgtgggatataataataccggcaggggtccccagcctctgggatctaatgcctgatgatatgaggtggagttgatgtagtaataatagaaataaagtacacaaaaatataatgcgcttgaatcattctgaaaccatccccccacccacaccccccaccccagtctgtggaaacattgtcttccccgaaatcggtccctggtgccaaaaaggttgggacccaccttctcagcctccatgtttgccaagtaaccatcccaaccttagagcattttctaacacggcatttctcctaattcctctcctccatatagtatcatctgttttgactctgaccaccttcatttgtcttcagtttgcctggaatgctttcctagcttcacttctcccaaactggcttagtcaaagtctctcagttgtgtctgactctttgcgaccccaaggactatacagaccatggaattctccaggccagaactggagtgggtggcctttcccttctccaggggatctttccaacccagggatcgaacccaggtctctcacattgcaggcagattctttaccagctgagccaccaagaaagcacatgtgtgctggatggttgaatttaccagatcaaactggcttagctcagtgttaatacagtctaccctggttactccagattcaaatgcacgtacgataggagtcaccatctttgcctagtaaaccgtcttactgcctttccaatggaatggtaatttcccttgttacttatatgttgatttatatttcatgcatctatgttttcaaaactccttcatccataattgcttttggaagcagttcttttaccacatatgtttgacccttgtaaggtaactatagtaaagtttaccacaactatgaccttgattggtttgttgggctcaaagttatgatactatccatgaactaacaggtattatttctaacctccttacacattttagcttgaatgactacaaccgccgggtcaccttgtgtaatggaacctatgaaggcttgctgaaaagaaaccaaatgggaagaaacagtgagaaattgccaactttaaaagacatacaaaattgcctgactctcaataagtttgacagtcctccgttcttccagaactctaccctcagcttcaggttggtgctctgatatctatattttaccgtcctttttagatttccgtgcttgtagttataatgaatgggaaggagagctagatgttgggagacatcaaagctcagtaatagggaagcgctttgtaagaggatagatagcaagacatagtgttacctatcattaattgttatttagttgcttagtcgtgtctgactcttttcaactccatgaactgcagcatgccaggcttccctgtctctcattatcatcaagagcttagtttttatatcttctaactcagctattcaaaaccacctttttgcatttctaatttctatacacatataagtacagtcttctgaaccatggtacctcattaattacatagagtatttaaaaaatattttcttgtgttctttcctattctattctgcattaaggaaatatcagccaaaccttaatgtttggttctgagatcttagaggagtaaaaaatcctcctgccaacccaagagacaagagattcgggtttggtccttgagttggggagatttcctggagaaggaaatggcaacccactccagtattcttgcctggggaatccccgtggacagaggagcttggtcgactatagtccgtggggtcacaaagagttggacacgactgaatgaatgagcacctgcacacagactaaatgctactcagattacagcgcagtaacaacattaggatacttgaaatttaaaggccaactaataattttctccctctaaaaagattgtaagaattatgagaaataattatgtaagaacaaataaataattatgtaagaattaagagaaatggctatgggcttcccttatagctcagttgataaagaatctgccttcaaggcaggagaccagggtttgattcctgggttgggaagataccctggagacagaaatggcaacctactccagtattctcgcctggagaatcccatggaggaaggagcctggcaggttacagtctatggggtcgcaaaagtcggacctgacttagtgactaaaccactatgtgtggctgtaagtaagatttaaaaaaaaaatttgtttattgtttatttggttgcactgggtcttagtttcggcatgtgggatctagctccatgatcaggaatcgaacccaggcccccctgcattgggagcatgaagtcttagccactggagcatcaggaaagtccctataaataagattttaacaagcatcttagaagatccagaaaggaatggcagatagattcatggttttcatgactaaaccttacagtaactgttcaactctgagccccttgtgttgctcagttgtgtccaactctttgtgacccgatggactgtagcccaccaggctcctctgtctatggaattttctaggcaactaatactggagtgggttgccatttccttctccaggggatcttcctgacccagaaatcgaacccaggtctcaatgtctcctgcatagctcctatttcctgacacaatctgaaattagcagactattacctaggctggaaacaaaaagggagctttctttgtcagttcatgactctagttgctgaaatactgatttctctcaggaatgccctggaaggatttggcaaagcagatgggaccctggactctcaagtgatgagtcttcataacctggttcattccttcctgaatgggacaagtgctttgccacattctgctgccaatgatcctgtttttgtggtatgttcaaagactcagagcagataaaaaatgtcctagataatgtgttgaacttatttgcttttcaacaagattaaggtttggtgtctgttttattctctgtgtgaacaacgggatgtatgcataagtcaattaattttaatctacaccatacgggtgggtagatagtgcttgaagtcccctcagccgtgctttagagatggttggttagctttgggatgaccctggatgggaatttacagtccagaagtggattcataaattagcataataaggttattcatgcatgcgtgctaagtcgctttagtcgtatccaactctttgcaacccagtggactgtagcctgctgggcgcctctgtccatgggattctccaggcaagaatactggagtggtttgccatgccctcctccaggggattttcccaatccagagatcaaacccacatctcttgcatctcctgcattgacaggttggttctttaccactagtgccacctgagaaaccctaataaggttacaaattatatcataacttaacatgagcatgaagagaaaggatttttcattggtagaatgagcagtgttgaaggtaagtgatggactagaaagtgaaagtgaagtcactcagttgtgtccaactctttccgaccccatggacagtagcctgcaccaggctcctctgtccatgggattttctaggcaagagtactggagtggattgccatttccttctccagggaatcttcccaacccaggaatagaacccaggtctccctcattgtagacagatgctttaccatctgagccacccaggtctcagcgaccgaacccaggttttccaccttgcagatggactagaaggactgtacatatgccatgaccctggcatgatgcccacctacctgaggcccaaaattctgtttagtgtttggtcctggcccccttcccttcacaaaggactggctaaaaatgagctgctgttcttgccatcggaggatcagaaatgtggactattggtccccacttctaataagttgaggggttatctgtaaatcttccattgtcatctttgctcttctgtaagatgtctgccttgttcactggttctaatttgatatctcacatcactttcagcctatcatttcagccattagctatgccaaatattttcttgtctacctattttgctatctagctatttatcaatactatatatctctaaatttttagtaaaacatacatttttaatttgtacataacaacccttattgataaggaaaaatgttacagtactctttatacagtactccaaaatattctgagaatagcagtcctctgacaaattgaagattaaacccaaacctttcactcctaccaaaggtaatagtggggatggctagtaatttgattttcggtcctaagtttcaaggattgccaaatcttatctccttatttcgaggaaacccactaagtgggtttctctggcgactcagtcagtaaaaaatccatctgcaatgcaggagacatgggttcgatccctggatcaggaagatcccctggggaggaaatgacaaccaattccaatattcttacctggagaatcccatggacagaggagcctggtgggccacagtcccgcctcagtggggtctcagagagtgggacatgactcagcagcagtattttgactaaatctgcagggcttgacaacatttttctgtcaatgaccagatagcacatgttttaggctttgcagacaagatggtctctgttgtaggtgtgcagccttgccgctgtagcgtgaaaggagccgtagacaatacatgaacagtgagtgtgttacccaaatctggggtcatctcttggtgggtgtttagccagaaaacacagccaagtcaaagatcaatcaggagaaggaaggaacttgcagcaagtaaggagaacacttggggtctttcccaaagcagcatctcctggaggaatagcaaaattggggaagttttaagctaagggtacatgaatattcatgaaggggcttgtgcataggagaattcagcatgaaatgaagtgaagtgaaagtctctcagtcaagtctgactctttgtgaccccatggactatacaggccagaatactggaatgggtagcctttcccttccccaggggatcttcccaaccaacctaggaatcaaacccaggtctcctgcattgcaggcagattctttagcagttgaaccaccagggatgcagcatagaattggagcaaaggtcgacagagtccaagctttagttggacttagctttcagttcagttcagtcgctcagtcgtgtccgactctttgcgaccccatgaatcgcagcacaccaggcctccctgtccatcaccatctcccagagttcactcaggttcacgtctatcgagtcagtgatgccatccagccatctcatcctcggtcgtccccttctcctcctacccccaatccctcccagcatcagagtcttttccaatgagtcaactcttcacgtgaggtggccaaagtactggagtttcagctttagcatcattccttccaaagaaatcccagggctgatctccttccgaatggactgattggatctccttgcagtccaagggactctcaagagtcttctccaacaccacagttgaaaagcatcaattctttggcgctcagccttcttcacagtccaactctcacatccatacatgaccactggaaaaaccatagccttgactagacggacctgagttggcaaagtaatgtctctgcttttcaatatgctatctaggttggtcataacttttcttccaaggagtaagcatcttttaatttcatggctgcagtcaccatctgcagtgattttggagcccaaaaaaataaagtctgacactgtttccactgtttcctcatctatttgccatgaagtgatgggaccagatgccatgatcttcgttttttgaatgttgagcttcaagccaactttttcactctccactttcactttcatcaagaggcttttaagttcctcttcactttctgccataacggtggtgtcatctgcatatctgaggttattgatatttctcccggcaatcttgattccggcttgtgtttcttccagcccagcgtttctcatgatgtactctgcatataagttaaataagcagggtgacaatatacagccttgacgtactccttttcctatttggaaccagtctgttgttccatgtccagttctaactgttgcttcctgacctgcatacagatttctcaagaggcaggttaggtggtctggtattcccatctctttcagaattttccacagttgattgtgatccacagagtcgaaggctttggcatagtcaataaagcagaaatagatgtttttctggaactttcttgctttttctgtgatccagtggatgttggcaatttgatctctggttcctctgccttttctaaaaccagcttgaacatcagggagttcacagttcacgtattgctgaagcctggcttggagaattttgaacattactttactagcgtgtgagatgagtgcaattgtgcggtagtttgagcattctctggcattgcctttctttgggattggaatgaaaacggaccttttccagtcctgtggccactgctgagttttccaaattttctggcatattgagtgcagcactttcacaacatcatctttcaggatttgaaacagctctactggaatgccatcacctccactagctttgctcgtggtgatgctttctaaggctcacttgacttcacattccaggatgtctggctctagatgagtgatcacaccattgtgattatctgggtcgtgaagatcttttttgtacagttcttctgtgtattcttgccacctcttcttaatgttttctgcttctgttaggtccatatcatttctgttctttattgagcccatctttgcatgaaatgttcccttggtatctctaattttcttgaagagctctctagtctttcccattctgttcttttcctctctctttgcactgatcgctgaagaaggctttcttatctcttcttgctattgtttggaactctgcattcagatgcttatatctttccttctgtcctttgcttttcacctctcttcttttcacagctatttgtaaggcctccccagacagccattttgcttttgtgcatttcttttccatggggatggtcttgatccctgtctcctgtacaatgtcacgaacctcattccatagttcatcaggcactctatctatcagatctaggcccagcttaagttacaagtgacaaaaggttaacatcatcatctcctgggctccactcatctagtggttgagggctttcagaagaggggttagattcttcagaacagctcaagaaagtgcttcaggctaatctttaatattaaaacagaatggagagtctttacaactgatttgttacctttgctattgttacttctcttgtctgttaacagtcaatttgtttttttgttcatttaaaatcctcattactgaggcttcttcaagggcaaacactgtggccaggcctagatggcaaaatggtgtaggcttaaaatggtcttttttatgtcaaaaagctgtatttggttctttcctttcagaccatccatttcctatctgcctacaagtgtggtgttctaataaaactttatttacaagaatagtgagccctgtttacccagcaggctttagtttgtcaaacgcagctggaagggatcagtgtcttctgtgtagtacagatatctctttagtcatctttctcttactgttctagctggaagcccacattatgattttatagacgtgggattctgtgacttacattaattcaaagacacaggatgttttatcatccttgtcttcattacttttaatacttttaatatataaaattttgttttccttggtataagttatgtacatataaatagacaaaaagccacagcctttctttgaaggcacagaaggagtaatgttttggcaccagttccagaactcacaattactttaggctattgacaaagagtttcatgttgaagccaattcagcttcaacaatattgagagccaggggaaagcacttaagtttacagagttatggcttatggaatttcaaatttatgcaaacatattgcatatgacattattaaatttgttttttgtgaaatttcttcaagcaagagaaacacacatttgtatttgatcaaaatgaatataagaaggtgtgatgttaaaatgcaggaaatactctgaaccaatctctgaaattctaattttaaggtaattgaaagtaatgcacacatttatcatggaaagtaagattaggtcacaggaatgctaaatagttctgttttcaatatcaaatttgggtataacctagaaaagaaaaaaaggagggaaaccaatagactgtaaagttaaatagttaactgccatgaaagaaactatgttagaggattagtgactttgtgcccaattcctaaagaaaatattcttaacaatgtatttggatgttatcctcttagaaaaggtagattcggcaagttttaattcttggtggggagattaataggttgcacagttaatatttactgaatggctcatgtgtctgttcttcaccttttacattaaaattctaaatggaattaagacatactggcagccttgttaccatttatatttatttctttttttattgatctatagttgatttatttacatatattattgtgtatactatgggcttccttgtggctcagctggtaaagagtctgcctgcaatgcgggagacctgcgttcagtctctgggctgggaagatcccctggagaagggaaaggctgcccacttcagtattcttgcctggaaaattccatggactgtatagtcctcggggttgcaaagagtcagacatgactgagcgactttcattttcactttgtgtatattatatatataactgaatcactttacacctgaaacgaatacagtatgtgtgtataagtatatatatatatattctttttaagattttttccaatataggttattagattattacaagatgttgaaaatagttccctatgctatacagtaaatccttactatttatttatatttcttaataatgacaatcatttggataagaaagaaatttaagaatataaagcaagaaaagagaaaatgagtttttgttgttgttgttgtattttggccatgccgtgcatcttgtgggatcttagttccctagccagagatccgactcgtgccccctacagtggaatttcagagtcctccccactggaccaccagggaattcccaaaaatgactttctaaaaacgaagctctaatggactacaccaagttaaacctgtaaggccttatctgactctattttcctaaactgcaataaaattaataggtcacaatagcaagtataaaatatttctgaattattatgagtaagttgaaatttttaaaaagagtatatagggcctttcttttctcccctcaggagcacttaaaaatgggtctgctttatttatgttttttaaaaagaaaagttgtaattagacaaataccttgagaatttaaaataatgttgttttatgtcaatttaaaattttttaactgtttaatgatttttaacaatttataattgcagatatattggcaaaaatatttaaagtgtctataattacatttcaatattcttgcttatttcctttcatattcttatatgttttacagtagccaatatagtgcacatattttcagaatgttatatagtttcctaaattttttaatttaaaaaacttataacatataatgcacataagaggttaaaatgaaaaaggcataaaatgaagtccctttatcaataccagctcccagctatccattctcatttttctttattcttccagatataatttataaatatacaagcacattatatatttctttatatatttcattatccaaatgaaagcatactatagacacttctgtgacttttactctttatttgttttacttattttaaacacttttcttttaaaaggctgcatagtactctgtgggctttccaagcagctcagtgataaagaattcacctgtaatgcaggggacacgggttccatccttaggctgggaagatcccctggtggaggaaaaggcaacccattctagtattcttgccaagaaaattccacggccagtggagcctggcaaactacagtccataggtttacaaataacttgggcacgactgagcacacacgtatggtattctttagtgtgaattcactgccgaattggtctcctactgatggatgcttaggtggtgtctcatcttttggtttatgaacaatacagcaataaatgaacatataggataaatgagaggatagaatcactggctgaaaagttaaataaatgtgtttgaaatttggtagatattgccaaattgccctgtggaaagttgaaagatttttttcctctacccagctatgtagcagagggacagctcctccactctctctcattagtctggtatattatcacactttttcctttttgctaattgataggtgaaaatatttcagtgagtttaattttcatttcttttcttctaaatgaagttcagcatcttttcacatatttaaggaaccttttgcattttcttttctgtggtctgtctgttcacataggataatgagttctgggaagaaaaaaaaaatgaaaagttcttaagagaattcggacttccctggtggctcagctggtaaagaatccacctgtaatgcaggagacctgggttctgtccctgagttggaaggatctcctggagaagggaacagctacccactgcagtattatggcctggagaatttcatggacagaggagcctgacaggctgcagtccatgggttgcaaagagtcacacaacggagcgactcactttcaagagaattagtgaaatgctttgttctctgtgtagcgaagtgaaagtggctcagtcgtgtctaactctttgcgaacccatggactatacagtccatggaattctccaggccagaatactggagcgggtagcctttccctttcccaggggatcttcccaacccagggatcaaacccagatctcttgcattgcaggtggtttctttacaagttgagccacaaagaaagccaaagaatactggagtgggtagcctatcccttcttcagaggctcttcctggcccaggaattgaaccagggtctcctgccttgcaggcggattctttaccaactcatctatgaaggaagcccccaacgttagcaacaaataaaacatcctctttaaatattttacttttcttggaaacctaatgctctgttcatataaaaatgtgttcttaggggacttccctggcagtccagtggttatgacttagccttccaatgcagggggtgtgggttccatccctgttggggagctaagatctcacatgcctcaggcccaaaaatccagaacataaaacagaatattgtaagaaactcaatgaagatttaaaaaatggtccacataaaaagaatgttaaaattttactgtgttttctagggttcactagcttaagagaagctcacattataaataataccacatcccacctctgcatcagtgcttaggtatataggttagttagtggttagtactcggttgatgtgcagtaaactcttgtgaagagaatgtgagattattgagcacttattactgtgtcactagataccatgtaaacataatcttttaacttcacaaaactgtgtgtggtaaatatggggacaataaagttcagagaggctaaggggagtacaacagcttatgtaagtggctgagcagagattataagaaaagttttctactcaaaaatttccccacgttgaatattccagctgcaattttgcctgtagacagttcttcatttgataccttcacaactgctttcatgaccactgaggacattttgtcctgttcgatcatgttgatgggaattaacactaattggtgaagaggcaggtctagattttgcttgacttttgaaaagatggggcattggttttatcacgagtaaggattcatgtttttaaaatgtcacatttattttattgaatctatgtgtttttaaatacctgaaatagacagctactaattcctaccatcttggtgaattttgcaagagctgaggtaccagcaagggtggctggccacctccttggggcaggatcttccaggacgtcagggtttccataggctcagttctgggcagggggtgattttatttttcttaacagttgaaaagctataataatatttaattaagtacaagaaatactcttgactgaagtgtatatcacatattctatcatgaaatactcttatttattttctttattgaagtatacttgatgtacaatattgtatgttacaagtatacaatttagtgatgcctaattaaatttttaaaaattatacagaagtgggtttctttttaatatcattttactttattttaattattatttatttatttttggaggctgcgccatgtggcatgtaggatcttagttccctgaccagggatcaaacctgtgccccctccactggaagctcagagttgtaaccaatataccatgaaggaagccctgattcacaaattttaaggattatactccacttactgctactactaagtcacttcagtcatgtctgactctatgcaaccccacagacggcagcccaccaggctcccccatccctgggatactccacttagagttattttaaaacattagctatagtccctgtgttttacagtatatccttgtagcttattttataaataatagtttgtagggatgttttgatctttaacttacacatgctaaatggttaaatggagatgaaagggttcttttcaattctaaattttataaggataaacatactctttggagaagaattaaacttaagagatgaactgtatacacttcattattgatgaattatggagaaggaaatggcaacccactccagtattcttgcctggagaatcccatggatggaggaggatggtgggctatagtccatggggttgcaaagagttggacatgactgagcaactcagcattaagttactcagaattaagtaatataatggcaaaccataatatatgtacatatctaagatggttctagcattgattggagttcctctctcttagagctttggaggctccttagcctcgaatggcctgggagtatctcagttcctatctagaatctcttctaacatcaccctggtcctctcttttcaatctatattgtttgcctatgatgtatgctgaactggtcacatcttttaaagctgacatattaacagcagaactctcctgtagtcctctgtttgcatctgttcaaaatttaatgcttaaactacaagctttctttctcagggatattgcagctgaattcctaatgctcttgctatttcttttatatgcatattattgtatcttgtatacaatgtatatagtataattatatgtttacatatgtgtattttgtatacaatgctatcatacaaagctatgaagaaagggtgctttccttaggtaactcttccaaaatgcctgaaaaaatggaagaatggaatggttctattctgtctgctcaggatgcaatgagagagtgggtagaaaaggagaggggaaaaaaaattatagtaaaatgagaaataccatctgggcttagcactgcccaggagactctattgttattcaaatgcccattttctctggtggtttttgtctctcactaaatgtgctgcctatggagtactcatctccctgtgggagagcttgctgctgctgctgctgctgctgctgctaagtcgcttcagtcatgtccaactctgtgcgaccccatggacggcagcccaccaggctcccccgtccctgggattctccaggcaagaacactggagtgggttgccatgtccttctccaatgcatgaaagtgaagagtgaaagtgaagtcgctcagttgtgtctgactcttagcgaccccatggactgcagcctatcaggctcctccacccatgggattttccaggcaagaatactggagtgggtcgccattgccttctccggtgggagagcttagtagtcagctaagtagaagttgggtgtcatgtaactattttaagcctattacctatggcttctttaggtatataaaaccaacatcttggctatacattgcttcaaatccttgataggagaaggcaagaataaataaatattccacggcaatctttctgtaggcacaaatactcttcttgtgtcagagattctgtgtggcaggaatctgaattttcagtcccctaagtgaagattggcttcctaagtggctcagtggtaaagaatctgcctgccaatacaggagacacgagttcgatccctgagttggcaagatctcctggagaaggaaatggcaatctccagtattcttgcctggggaatcccacagacagagggggctgatagggtaaaatctatggagtcgcaaaacagttggacacaacttagcaactaaatgacaacaatgacaagagaaggttgttagtaacttcatcctccagtgatcttgagaaagatatgcatgttttccctgtactttatgaagtttctttatgccgctaagcacaatatttgttgatcaattgctttcttctgcaaggttgcattaaaaaatttttaccttgaaagcccatgtaatcacattttctccaatactgccttgcaagttgaaatttagcattttttctcccttcctatacctatctttactttgttggaataagataggctaagtttgtgtaccaaaatttgtaacctcatttctgaggcactcaattattaatgctaaaatataagtataaatctctacagcagatataaggcaacagcagtttacttttactttgcttttgcttttatttatggccttgaattacatttacagagatagtagcttattttcaacccgtgttcaacaaagatggggcttccctgttggctcagatggtaaagaatccacctgcagtatagaagacctgggttcgatccctgagttggaaagattccctagagaagggaatgactgggaaattccatggacagaggaccctggcggtctgtagccctttgggtcacaagagtcggagatgactgagtgactaacactttttcaacaaaaataccactggtttatcaaaagcaattcaggttatttcatttaggaacaatgttcacaactttatcaaaaatacctagtctccctgttgccctgcttctccttctagcctctggttacattgttgctcacagcattttgtctcttgcctattttgcatctccttggctggcgtgctgccattcatggggttgcaaagagtcggacatgactgagtgactgaactgaactggcatatgctggtcctccaccccctcacccttttttttaaactacattctataaattggttcatctgtatgtagctcctattagggtttttattggataatgtttaaccgctcatctgagacctataatcttctccttattactcttcccctgttctttccctccaaattatgaatttctttagagtctcatcccctccctaattgtttacccttccacacctggtgaattctggtgcttccacccagttatttgcctcttacagcactgactctacatctttctctgccctgagattctcttatctcttttttttaaaaaaatcacagtttgatctctgacttcaactcaggtgggttctaaaagttcaagagatactgtgcggcctttcttacaaagtacattctgatacacacctttttctgtgtatcagttagcacttggttcaactgcttaaaatagaaaaccaaaattacagaagttggacacgactgagctacttcactttcacttttcactttcatgcattggagaaggaaatggtaacccaatccagtgttcttgcctggagaatcccagggatggcggagcctggtgggctgccatctgtggggttgcacagagtcagacacgactgaagcgacttagcagcagcaagcaacaaataaagaggtttatttttctcattgtgtaaaagaactccagtggcaggtggttcagctttggtatagtatctccatagccatcataaactccttctgtctttctgcttaaccatccttggtgagtggcttcttttcttagctttgcttgcgggctgctaagatagctgccacagcttcagccatcacacccatgttccaggaagcagtgcgaaggaatggagagggaaaaggggccccctttaagctgagaaaaccatctttaacaagattttctagaagtcctatccagtgatttccagctaaatctcatggataacttggcacattgcttcaccataaacaccaaagaagttaccgagaaagaagaggagaaaaaggctattgggtaagcaatagatagtgcttgctattcttggacattgcgcatctatttcctgggctccacacttgaggcagaacttctgtttgaggctgtcaggttcccgaggtcagacctggagcatggagctctctctgggaaacttctaaccttatctagagctcccaggattttacagcacgtgatattgttttcagggacctacaccaacagctaacgctcagctacttttccagggttaatgccccttctcaaagaggaacttctcctgaactctacttgggagagacatgatcactcgaattatcatgtgttccttcaaagctgttgctcattcgataagcttgatgccttttattccctcggggcttaaattctgtgcctcaaagccaagatttcagaagtcaaaaaatattttctgtctgtgaaagcccaggtcttacaatttgatgttttggtttttaacatgtatcttgtactgaccaaaaaatacactcacaacctaaaagtagagagtttttttatttcgtgggaatgtttaggactctgagtccgggagacagtatctcagcagctctgagaaaaacgctccaagaaggcaggaggggaagtcctgctatacacaagtttgcaacaaagggaacaggcagtcttaacatcaaagttcaggtatcaagttaaggaatttagcattctgtgtatgggaaggtgtaagcctctgggctcactgaattcattcctttcatacgcacctcagctatctggggccaatcttgtttccttattcctattgctttctgcattctcccagctcctcagcaatcaccacgggggtggtgtgtggcagcagtttcaggagccctcatgcccattcggaggccagaaatcgctgatggttgtgacatgtcttgtttattaatatggcaggagataatttcatttcatactttccatgaaccttaaaaatccattcagaaaaaaaatcctttcagtaaaatcacttgattcttttcactatcgtgagagtacacacgtgagacaattcaagtagaaagctctcgctgttgcctgaatgggtgagctagctacaaggaacctcgggtgaaatctgaaactattatctactaaataagcagcagtaataaaaaccagaaagtgaaattgttaattgctcagtcatggctgattctgtgcgagcccatggactgtagcacaccaggcttccctctcctttactctcccctggagtttgctcaaactcgtgtccattgagtcaatgataccatccaaccatctgaccctctgtcaccctcttctcctcctgccctcaatcttttccagcttcagggtcttttccagtgagtcggctcttcacaccagctggccgaaggattggagctttagcttcagcatcagtcgtttcagtgaatattcagggatggtttccttaagattgattggtttgatctcttgttgtccaagagactctcaaaagacttctccagcaccatcgtttgaaagcattagttcttcaatgatcagacttctttatggcaagaatattggagtgggttgccatgccctgctccaggggatcttcccgacccaggcattgaacccgggtttcctgcgttgcagatggatttgttgccatctgactcactagggaagcccttggatgagttgtacaaaatataaaagtactttgcatggcactgtcatcagccaacagaaacttattaaacatcggttctgtccaagttatagactaagcctaaaacgccaaaggtgaaaagaccttatctctgacttttaggagttaggagtctcattatggaaaattgataaacaaataagtgatagtataacttcaccagtgctatattagtggacggataaatgaattcatttaacctgtatttactgaagtaagtatctcctttcccccatgtgacaagccctggggtgacagaccctgcagacaaagagggaaggaaaatcatacagagtccctgggctccctgaactactaggaatgaaagaggacctctaacggcctggtcatgtttgtgtcctatcgcaaaatcagcactataaatgtgaaattttgctgttaatattttagatcacgtaataattgctgtctttgaaaaggactttgacagctttcttgagaaaataaaacagcactatgcgcattacagagtttttagactttcttttgctggcctgacactgagaattcaaatgaaaggcttatacagtgagcacatagaagggtgggagaaatctgaagacccgttttggatgttttctttctctctctctttttttttaaaattatccatttgtattataccattgtatactattggtaaacacaatatctcctttcttccttgttaaaagcaaagcatctgaatattggctgtagtatatatctcatcatacttgcctttttttcctgaatgtaataattaacttgaatttgttgaaggcctcaaatattcttaaaccagtgctacatctgccacatgaaccttactttgttcacttaacaaaggggtgtatggagtgatatgccatccagccttgaaagtgaaaagcaaagtgttagccctgagtcatgtccgactttgcccccatggactgtagtctgccaggctcctctgtccatggaattttcaggcaagaatactggagtgggttgtcattcccttctccaggaaatcttgccagtgggtatgtcaccaagaagttcctgatgtcaagaaaaaccaacttcatttcattttagagaaagttccagttggattggtctgattagaatagacccatcaatgttggccgcgcttccccagtgactcagtagtaaaaaatacgtctgctatggcaggagacactggctctattcctgggtcaggaagatcccctggagaaggaagtggcaacccactccagtattcttgcctgggaaatcccatggacagaggagcctggcaggctacagtgcctggggtcacaaaagagtcagacacgacttagtgactgaacacacatccgtcggtgttaacgctgcgttcaactgtcttgcaggtccttcattccttcaccgatgccatttttgacgagtggatgaaaagattcaatccccctgtggatgcctggcctcaggagctggcacccattggtcacaatcggatgtataacatggttcctttcttccctccagtgactaatgaggaactctttttaaccgcagaccaacttggctacagttatgccattgatctgccaggtaactaatgcaacttttaaacgcgtgattcattaatcttctaaagaggctttcttttcttttttcctttctttttcttctaaatcaagaccttaaacggaagtgctcagatctagttaagtttactggcaattttttagagtatgtatagttacaaaatgagcctttaaactaccaattaaacatcagaaaagggactgttggatgactttcgttttagaaaattgaaagttgttaagagaacttatttcagggcaagtatctacaactgcacctgatctgacaattgaaaaccagccatggtttgaaatgcctaaccaataaaatcaaaatgcactagccacggatggatggggacaaccaggacctcttagagatcttaacttaaaggcaaggctgggtttaaggtgaagcaaatgcagcacttgcctcaggcacaaagttcaaagggaagcccaaaattcagtaactgagctaagtaataatataatgcaatattataaaaaacccaatttaatgcccccccccatgttgaatacagtatcaaaattttaaagccaggctgttgtttgttttatacctctgtgttagtttataagtaggccatttattttttttcccagttaacccacaccacccctgcctggtgggtttgtaaagatgacaatggcctgccagtagattgggctgtgtgggacttcatgggtacacttttctaaatgaattttttgaaatcatgtttttagtctttaaaaaaattttttttacttatttatttttggctgtgctgggtctttgttgctttgcgaaagctttctctagttggagtgagtgatgaccactcttggatgtggtgttcaggcttctcactgcaggcttctcttgttgtggagcacagtctctcggtacgtgagcttcagcagttgtagcactctggctcaggagatatggcatgctgcgtccagagtacgggctcagtaatcgtggtgcacaggcgtcgttgcacaggcatgtggaatcttcctggaccaggtatcaagcccatgtcccctgcattagcaggtggattcctaatcactgtaccaccagggaaatcctgaagtcatgtttttaagttgtagattttttattagcttttccacttggttcaaaatacagaaagatattttgataaatgtaagggcatacttttttttttaatttgcccaggccccagtatagctccatgtgccatttaaagaaccttcggacaggttgataaaggaaaggtaaaacagtttttttaaaaaatctcttaatttgttaagaagctgaaaaacacacagcctatgtgctggtggcattttcccattaatggctattttgtcttctctaaatctcagcctgcaaagtaatcaagaccatttctgaggtcacatctctctctctccccccttgtcttactccctccctgcccccttctctctcaactttcaaaacctttcagaccctgggctctgtcccctgtttttccttccagttctacatctactgcagcttattctctttactgatttgaagtttctcttctttgggcagctgaggtgagaatgtctctttgaaacttttctcatttctctgggattgaacataataataatcagaaagtttggcatgtgcttctgaccatgcttccatggcctctgacatcagtcaattaacagatataacccgagagtctaaatatgcccagaatccattaactcattagaagatacaaatcacattcttttattggttggacaaaaatttacatcctttctgaggagacataactataacctaaggttgaagaagggagagagggatttgggaaaggagctgggtcctgaactgggttaaagagatggagggacttccctgggtgtccagtggttgagtccacgcttccaatgcaggggactcaggttcaatctctggacggggatctaagatcccacatgttgtgccatgtggtcaaaaaaagaaaaaagtttttttaaaaagagatggtaggttttaggtaggttgggggaaagaaaggggcattttagattgaagacaggcaggtaccaggactgtgaaaggcacatgtagtccatatagaggaccgtgagaagaaagcctggtgaggtgaaaggcttgagtaattaactgtgcattaaggttggatctgagagaaggcctggttatcagggactgtaaaagttgggcagaaaccacaataagatcccactttatacccattaggatggctgctaccaagaaagcagaaaataacaagtgctgatgggaatgtagagaaaatggaatcctcatgcattgctggtgggaatgttagcataggctctgtgaaaaacaatatggtagctcctcaaaaaattaaacacagaattaccatgagatctaacaattctgcttctgggcatagaccccaaagaattataagcaagtactcctacagatatttgtacccctctattcatagcagcattattcacaacaggcaaaaggtgggagcaataggagggagatataggagggaggggacatatgtgtgcctatggcttactgatattgatgtgtggcagaagtcaacacacgattgcaaagcagttatcttccaattaaaaataaattattttttaaaaaggtgggggcaacccaagtacccactgacagataagcaaaatgacaacagataaaatatggtccatacatacaatggaatattattcagccttaaaaagaaaggaagtcctgacacatgctgtaacatgggtgaatcttgaagacatgctaagttaaataaaccagccacaaaaggataaaacctatatgattccactatatggggcacctatagtagtcagattcatagagacagaaagagtggttgcttgttgctagagagtgggaatggatggaggactagagaattattatttcaattttgcagggaaaaaagttctatggatgaatagtggtgatgaatgtataacaatgtgaatgtatttaatgtcacagaacttaaaaatggttaaggtgataaaatatatgtcatatatgttttcccacaattaaaaaaaaataagtaattaaaaaaaaaagctaggcagaagagtttggacaataacaaaaggcaatcatttttggctcctgaacaaagaaatgacagaataaaaacctgtattttaagaagatgaggatggcaattgttgcaggaaaagacaaattaaaatccttttagagaaaccccatcaggatgagtcagggtcctctgtgggactggagagaaaggactagaaggacagtcttacatttagagaagtgtagagtacagaacaagaacccacttcagaaaaactgattttaagaactgagcaaggataatttttaaggaaacgacaaataggcataaatacaaaggaaatgaagaaaagaaaaaaagaaagaaatgaaatccattaattttttggaaaagtgcttataaaagatattcgaatagaggattgcgtttatcatgtaatgaccccgattttattcacaactatttaaatgggtccaaatttcttctgctcttgctcttgaatgacccctgttataatctccagtctcatctgtcttactcactgatcactccataaaaaatgtagagacaacagcaggatttctagacctggctgttgtatattttgttctccagataccattttaacatgcacttttacaaatgagtttctaactcacaaaagtcgttatatacttccttggagggtttattctgtataagtatttattgtaaggaattttgaaaatacaataagctatattcaaacaacggaatgtcattttccacttccaccaaaaaaagttatggatatgataaatagttcataaggaagaagaaaaaattttattccagtcagtatagttttgctttatcaacaaaagcacacatgaaagacacattggtttattcttcccttttctaagagtattcagccgatgaaaagaccaattgtaagactcttctgctttaatttcagttgaagaaactccagactggaccacagtgctctcagtggttacggggatgctcgtggttttggttgtcctttttgcattgatgcttttccttcaatatagaagacttcgaaaagggtatacacccttaacggagacacagctaagcaacaaaagatacaccgaagaggcctagatgctcatgcctcgctctagagaagaggctgaccaagctgtagttctgaccgacaatctgcagatgaaccctcactgatcttcctttcgttgaagagcttcggcatagcccctcctgttatggcgatgatcccaagtacgaaagatgcttcactctaatttctggtttgcttgtttacttaacaagctaaagtgcttgagggtatctctaccatcaaacaaggtagagctgatgacaactggtggtatctgataataattccccatactgattgattaagcctcctcgtgttctgaccccccccaaatcaatagagtggactcactgaaatatgcagatcagtgtaatttgagaactggatcagatcatggttacatctttcttaactcacgtgtcttcctttgtaaagggcggcaggaaggtggcaggtgctacatgagtctccagggtctcttttaggcgtaaacatctatgcttttaggtggattcctgatcatctt

SEQ ID NO: 58 - DNA, 58607 bp, Hippotragus equinus
  source 1..58607: mol_type = genomic DNA
tcggggatggtgatgggggttggtggtcacaaagtgtgggaagggtaacgcggagctggcgaggggaacgctagggctgagtcatgaggcgatggggggaaccccagaggaggaatggtgatggcccaggacccagtggccccaagagcccgagtcaaggcaggatgaagcagggtagcccctaggctcttcctccctcagcctggctccccgaagcccccggaccaggtcagagttcacaccagcagctccgagactccagaagcgttcggtctctccgaatccgccgccaccatagagacgacgcacggacgcacggccgttgggtggggtgaactaccctaacgtgcgacgcgcgcccggcgcggctgccggggcaactgtgggcggggcgagcctccctgcggcgcggttgccgaggagaccgataggctgcagcagcagctgcggctggacaggaaagctgctggagcctgggggttgaagctacagttgaggcgatggcgcacgaaggcccggtgagctttagctcagctgagggtggcccagagcggggttaagaccagtgtccggaacccgtgggccagctctgtgccacccggcatccgcccttcacgcgggcgttcaagatgaccgaagaagccctgtcggtgcaccaggacagaaaacctgcacctgcaccacgcgcactcacaagcatggtcacacttggagcctgagggaagggggttaaatgggtgatgaagagcccaagaacaagaagtgactttgacagcagttaatgcgtttaatgagtctcttatattgaggtactcatttaaatggataaaccagaattggtcaggcactggataggattcatttggacaatttcaggaagaagaaatggattaaacaacaattctgaggctgcacttaaagtcaattgtttaaaagccaagaaactctaaaatactgaagagcatttatgcagtaatgtctccaacccctctggtcaggccatttctaggtgtagccagccattagcgcgggtgtaatgagagcctgggcggggttgactaaggaatcaactctcctctcccagccgtacctacccgtgctctggccaagcctgaacggggctgtggaccattccttgggcttgccaacagaactgttctcactagcagagatgggaaacgaaacttaagggattttgagttcagtgtgaggtttaggaaacaccagagttgggggagaatgaattttggggaacaccatgtatgaagcaataatgtttggggtggggagacaaaagttagggaaattgtgttgggaaggaatcagcttgagggaaactgtcgtggggaaattaagaggctcccaataatttactagtaaatttgtatgtccttaaaatgggtttttgggagactagacttttcttttttagtggatttttcttgattataaaaggatataaagtaattgtagagaacttataaactggagaagagtgtaggaaagaaacatattttcatttcagagtatgcctttgtgtatttataaaactggaattggtacttttgaagattggacatcttttcagatgtttattagtcatcaatagttccacttttgtgaaatattatgttctttgcttattatccttggagatcttatggttataaaattttatatgcatttttaatgtatttgggaatatcttttttaaaaatttgttgcatgtattttttgtttaggaagcaggataaagccgagctctggagtcaaacagacctgcatatgaattatgactctacgacttccttactctgtgatcttgggcaaattctgtgaaatggggatacaaatagtatgtagtctaaaaaatgtaggaactgaatccatgtatgactgatatactttaagtgccagtaaatgataactaggaattatcagcttgtaattaggaattttaaaaaaagcacaggaaaatttgacatatatatatacagttacctacccatttctgtattattttttacattacttttatgcttaggcagctgtttgtcacccagagattatatgacaatttaaactattttccctacattttatcttttgttttaattttgttttgtttgtgtgcatgctttaattcatctggaatttatttagatgtatattgtgaaatgaggatctaagttgatttggggagtgggaggagatgggaaacacaccaataattcctgtactgtttattgactttttcaaattcctgaactctgaagaattttgaatactttgaactagcgcaaatagtaaggactgtgcagttagagctatatataaatatagcctgggttcactgtgtaatcccaagcaagtggaggtgaactgctgtcaggcttcagttcctttgtctgtgaaagagactgagtgagctgtttgaaaaattaaatcgtctaggtcacctgaaaagcatctgtcacatagtagctcttagtagtaaagtgtctctttctaaaggcctttccttcgtcttagacaacctaaggaagcttcctcctaacccatgattgctgctccactcctcggtttcccgccctgagtgccctgttcctttcccacagaggcaggtccgagaccgcggggtgacccgatccaaggcggaaaaggtgcggccacctacggttccggtgccgcaggtggacatcgtgcctgggcggctcactgaggccgaatggatagcgttcacggctctcgaagagggcgaggacgtggtgggcgacatcttggctgatctggtggcccgagtcatggactccgcctttaaagtctatctgacccagcaggtaggcctggatccttgtccttcagacacatctccgctctccctgacccctccctgctggactgagagcctttctcgccttcgcagtgcattccattcaccatcagtcaggcacgcgaggccatgctgcagatcaccgagtggcgctttttggctcgggacgagggagaatctgcagtggcagaggaccccacatggggcgaggatgaggagcccttggcttgcacgacggatgcctgggctcagggatccgtgccagtgctgcacgcccgggcctcggtggggctggaggagacgtctcaaggcgaagtaagcccagcctccagctgccgcccacctctcaccgccgcccccgatccattactcacccctaacctccacccctgtgcatttccccaggaccaagagagcgtggaccagattcctttaggaggatcgtggacggactcaggctctcaggagcggatggaatcttgggagctaacagtcaccccgggctctccacccacgtccgagttgcttcaggagacagggtcccggggtcctctggagaaactgggtgaccagtcgaggagcgaccagactgacctgtttgcagtcggatcctcgaactcgagcagccaactgttgatggagatggtgccggcaggcagtacccacgcttctctggagctgtccttggtagccagccctcaggcctctgtcgagcgggcacagcccatcagctctcagttatctctcgaggacctctacagttgcacgccccagccgcacgcggctggagaccggctggaactcagggaggagaaggtgcccctcacccccccgcaggtgttggtgtccgatccttccgagggcggcccgaccacgctcaacccctcggcgggattccagccgcagccgccgtgcctggctgacgagcggcccagcgcacttcactccagaactggccgtaagggggtaatgacgcgtctgaaccccgcgcggctgcctcgcctctgggtgcgcccgctgtcggaggtcctggtcccagactcggagggccgccccctggaggcctaccgggggcgccagcggggcgagaagaccgaagccccagccggaccgcaagcctccctccccagcttccgcgtctccgggtcagagttcttccctttcccacatggcgttcctgtccgagctttgggcccccgtctcagcctccagttacctactctaagcttaggcctaccgtcgccaggctttggttcaaagcttcccttccccagtcccgggctccgttttctcgccacacatcgggcgcgcccggacatggcacgcagccccagccccaagctatggccgagtgctaagtggcccagcggctgggagggggaggccgaactgctgggtgagctctgggccggccgcacccgtgtacctccgcagggcctgggccctggggaccaggagagccaggatcctcaccaatgtcttcatcccgtgcctcaagttctggaggccacgtcccaggtgacgtggaggcccgtgttgctgccaggagcactgaagctggctcctggtgtgagcatgtggaacccaagtacgcaggtgctgcttagctccgctgagcctcaacgggaggacagagaagtcagcgcctctcctcccatccatacaggcgccccgaagccacaggtgactgtggcacaactaatgaactcagccctcaaaatgtggtcactcccctccaagcgcctgccccattctaagccctaggcagtgggaattctaccttccttctgtctgcttgccagaaataaacagctgagtttcctttaaaattggcctgatgtccatcagttccttccaagtgtgtgctctcattgaactggagaggtctataagaacacagaacataattacattacacccttaggagaccctgctttagggtcaaggtggctctccaggagaggcattctggagaaccatccccatttccacaaaggagcacacagatgttgcaagagggatctgcctcagttgggagaacttagtctccttccagtaggggaagaagggggtagctctgtttaagcacagagtgattcaagacatgaggaatttgattttcagcccctggagctctatcaattcaccttagagtgcatatccaagttttctttggagacaaatttgaggctctgcaggatttaaggaaactctgactcttttgatctttgacttcgaccagcattggaatgaggcaatcagatagctagtgaaaataatttaaggaggaactcactgtcaggtccaaatggaatactcgaacacatcgaagagtgagtgcctccttaaattttgtgctttatgctccacatcaacctgttggctggtgctactcagccttcactagtccttccctgcccccctcctgtgggcagcaattcccggtggcgggccagtcttctctgccatgtcgctgtggtctgtactcagcagcccagtatggggtcctggctctgtcctcattctggtcctcctgcttagactaagtgtgcagatctggcataagttttatctctgggacctccagcactgctccacggatttgactgggaagacagcagtggtgactggggccaacagtggtgagtgtgcctcctgacctgccacaaccacagcttccaactgccccaacagggagggcagagaggaggaccagctcccactgtcagaacccttgtttcccaccctacttgcttcattgccctctagtcactccccagactagcatactctgaagctgccctcccacaggcattgggaaggctgtgtcccaggagctggcccgccgcggggcccgtgtgatcctggcctgccgtagccaagagcgtggacagcaagccctggctgagatacaagcaacatctaagagcaaccgcctcctacttggtgaggtggacctgagctctatggcctccatccggagctttgctcagcggctgctgcaggagtgtcctgagattcatctgttggttaacaatgctgcagtctgtggtatgtgccttgacttacttcccctaaacacatttccagagtttcatttctagctcaaggacctcaaaacaggaatctttcaagcctaacctgtacataccatggaaactctaattcagacactatcctgaaaaacctaaaattatagtctcaaacatcattgcccccatctcaacacatccatgctcctttggtgtttttgtgctgggtttagtcactcagtcatgtccaactctttgtgaccccaccaggctcctttgcccgtggaattctgtaggcatactggagtggttaccgcgccctcctccaggggatcttcccaactaagggatccaacccaggtctcccgccttacaggtagattcttgactgtctgagccaccagggcatttctatcgaacccaatatatcctccccagactttgtctccctaaggattctcactccattacccaccacctatgttttcatctctcacagggttccctaccacacttactccagagggccttgatctcacctttgctaccaactacactggaccctttctgctcacaaatctgctccaaggtaaggaaggacgggtacttaccttctgtgtgacccctggttttccatccctctagcattttcatggcttactgtctatcatggtcatctcctttcccttggcacccagatgcatgctgagtaatgacccaatacattgttactttccatacctggcctcagtcaagattaggagactggtaatggaatcagttagcccccaaatatcaatacatccagcaagaggatataagatctacaccacacctctctttccctcaggtctgagttctagccagaccagcagagtcaggcatctcaggtctgagttctagccagaccggtagagtcagtcatctcaacaaaagcttcttgagggtggcattaggctactaggtttaaggaggctgtgttctcctagggaagggaggggttaagcagcaggcacattctccctaacattttctctggattgtctaatagcctctttataattttgtttattgattgattgatttttggctgtgctgggtcttttgctgcatgggctttctctagctgccctgcataggcttctcattgcagtggcctctctttttgtggagcacaggctctagggtgcgcggggttcagtagttctggcctgcgggctcagtagttgcagctcagctatgctggggctcagtggtcgtggtgcacgggcccagcagctctgcagcacgtgggattctcctggatcagggattgaactcatgtctcctgtattggcaggcagattctttaccactgagccatctaggaagctctctgatagcctctttaaaagaaaattaattttttggtcaggtaatgaatatatgtccaaagtacaaaagggtatatagaaaaagaaagaaaaggaaaactctcctcctctcctggaaaatcagctgcccattcccttgctgggaggcaactcctattgccaggtctcatgtaccctttagtgagcaattaaattagtcctgactggaaagtgaacaaagagcaaggccaagctctatgggtttgtaatgtgttaatatatgtttttcccttttctaaaaattgtaatatgctacaataccctgtgtcttgcttagtgataatttcttgaactgtcttcttgttactgaaaagtgtgtgtgggggggtctgactgctcgccactcaaaagccaataaacaggccaggttgatggaaaggaaagtttgctttatttcggattctggcaactagtggtagggagggtggcggacatctgtgcaaaggccgactccaccacctgacaagcagggggtgagagctttgatagacagagtgtgtgtaggggggagattacatgtggaaacagcacatttatctctaacagtcatcttcaattggtcatcagtggtctgactagcatcatcttcattgttttaggtagagttaatcttcagatccagggtctatttgttcccatttctttgtagtcagttttcagaattgtggcagctcctgtcctgggtgcagtctggtcaccatggagttaacttttccacctgatattccggtatctgtaagacaactcacaggatatagctcaacatattatctataacctttgagaaagaactaaaggtccttgactatgcttaatgactaaattactattatttagtcactttagactgttttcctttgtttcagccatttttcacttttctgattaaacttattcttcaattaaagttttctatagacaaaaggcaggcagaggacatggggcagggggcgggcaaggaccatatggtcctgctctgtttcattctctcctgtctcttctgtctagtctattctcccttctgtgtcttctaagaaatcacctttcatcacatcactttcttgcttccaattcttggaaggtattctgacctttatacaataactaagctgtttatctccacttacaaaacctcctgcagactgagagcctagccttgacctttcccaaacccacacccaaaattcagccaaaattccttctctcttaggccacactctgtcttctaaatcctggctgtaatttgcacatgtgtttccctctatgtgaaatatcctttcccatcctttcagcctggctaacttaattcagcttccagcactcagcacagataccattcgtactgcggatcctgtcctgacacttctgcctcccaccaggtgcccccatttacctcatagctcagttggtaaagaatctgcctacacagcaggagacctgggtttgattcctgggttgggaagatcccctggagaaggagatggcaacccactccaggatttttgcctggagaatctcatggacagaggagcctggcaggccgtccctgtggtcacaaagaattagacacgacttagcaagtaaaccactaccaccacccgagcccctgtaaacagctctgttcctgtacagatgctgttgcatgaagatcagcctccaactaggttgtgagcccctttggtctttatgtcactatgtttgcaagtctggagttctctgtcctctttaagaattttcttttcagcaaattatggctgaatacctccactcaatttttcatttatgattcttaatctaaatggagggctcaaaatagttttagtattttgaaacaataagtaaactcatatgtgataactataattttttatactttatataatctagacttttttttttttatagttaggacgctcttttctttcccaaagatttgcttgtacctctcctattgatagtaattttactttcattcttttggaagataaattccaaaaaaaattttttttaattaaaaaaaatgtttaataaacctctttcccaagaatctctgcacatatttctttccccctaaactgaggacccatatgtctttagtgcctagcatggtgtctgccataattcaggggcgcagtgaatatttgtgggatgaattagtgaatgaatgagtgtatgactgtgtgaaagccaattttcacagcctttccagcctcttctccccattcttagccatcagcaaaataaaaatataaacaaggattaattaaatcagcttcagctggcaagtggcagaaaagggaaaactccacttttactttaggcgaaaaaaaaaaaaaaaaaactagaataaaacaagaagaaccttccgaaagcagttaatgaaaatagtcaccgttcacgttacactgtgcactgggcccactgactgtcttctgaaagcctgagatggaccctgctctcctgtagtctcgtggagaagcaggttggggactgggcatgggggtttactccatgacttggattaagggtgtgtggtcttctctccacctaggggcccttcagcgggcagggtcagcccgggtggtgaatgtatcttccttccggcaatcacatgggtacattgatgaggatcatctgataggggccggtagacctttgaccttcaaccagaactatgattgcagcaaactgcttttggcctcgttcactgggaagcttgcccagagacttcaagggacaggtaactgcctctgacactccctgcccttccactcccaacactacctcccaacccttcccatctcattccaatatattctggccttaaaatactcccagtatccccaagccagctgttaatctcctccatttatcacctgtgcacccagtatttctctcaaccccatcttcctacctccttttcattcttttccaactttctcatcatctacaacttccctctcctccaacaccatccatcatattccccctcaagatcaccccatgctttctaatacttatatctccttactggcttgggtatgggcactcatgtaagttacgaaacacagacttctctggcaccacccccaagtctcctgtctcgtctacccgacaggactgataggatccttccttagttgcacactgcagaaccacacttaactcttccttcccaccgtcctcctctcacctcactgcactacactgctcaggtgtgactgtgaactctgtggacccaggtgtcgtgtacacgaaaatcatgaagcatttctcctggtcatatcgcttcctcttctggctcctcagcttcttctttaaggtgggtagtggagaagctggcgctgcctgaagagggtgggtcagggctctgctgctccccgtcccggtaagttagagctcgcctggctttactcttcacttcctctgtgtctctacaggatagcaaacaaggtgcagtcccagtcctctacctgagcttagcaaaggagctggatggcgtttctgggaaacattttagcagttcctgtgtaataactctaccccctgaagctgctcaggatcctcacgtggcccaaagcctctggaatacctcagtccgactaacaaacctagacaaggtggactgatcttctgtgacccctgccttaaccagccaccctccctctgactcccagcccttactctgattatgccttctgtttgccaggtccagggatcaatctctttgtctagtagagtgaccacttcctctttctgttggttcaggggcatgggacctcagatcagccaggggaaagtttcagcttctactttattgctagttgtctgatagaagtattcatgtcttaggccctgggatctccagacctactgagtcccgcattgtagggacggggagtgagactcctttcaatgggtattagacgtgccaataagaggggaaacttctgcctatagcccttggttcctggccttggaggaggcggcaccacactgcgtcctctggatcaaggtgtgtgcctcatcctgccggacagcactctaactcctcagggtgctgtctcccagctgaaccgtaactgagcctacaggtcacccttccacctgtctatcaagtgctgctcctgagtgctgagtcctgcaataaagatagcgaattctgagagtgagagaccactgtttccttcaaaatctaaatgaattttgaactaaacgtttcaaatttcacgtatacaaagcttgtatgtgtatgtatctacttgggaggattgaagtttttatgacaatgagttgttctaaacatgaacagtgtgtacttttatctaaaccttttaaatatctttataaatttttgaataaagatcttacacaagttttactacatttaatttcagataccttacttttcatgctattgcaaatgatattttaaattttgtatattaattgtatatcattgagcaactttcagttcagttcagttcagtcgctcagtcgtgtctgactctttgcgaccccatgaatcgcagcacgccaggcctccctgtccatcaccaactcccggagttcactcagactcatgtccatcgagtccgtgatgccatccagccatctcatcctctgtcgtccccttctcctcctgcccccaatccctcccagcatcagagtcttttccaatgagtcaactctttgcatgaggtggccaaagtttactgttatctaattgtgataagtcatccatacattcttttggtttttgcacatggacaatcataccatctaggaataataacatttatttctcctctttcatattaatataaattttatttcttttcctagaccttaactgattttctactattaaaccaaacttgcatttaaaccaactttgtcagagtgctaattttgtatgaaagaaagtggaagttaattgcacagtcgtgtctgactctttgtgatcccgtggactgtagcctgcctggatactctgtccatggaattcttcaggcaagtttactggagtgggttgccatttccttctccaggggatcttcctaacccaggaattgaacctggatctcctttattgtaggcagattctttaccaactggtccactagggaagccactagtatataatttggtatacatggctaaatttagtatactcatgtttttatttggaactatttattcataaatgagactgacctgtactgtactttttcctacttatattgccattgtctagctttgctgtcatggatagtttcattttataggatgaatttggaattcatgttagtgtagggacgttatataagaaagtgttaattccttagttatgtctgactctttaagacccccgtggacttaagcccaccaggccactctgtccatggaattctccaggcaagaatactggagtgggttgccattcccttctccatgggatcttcccaactcagggcttgaacctctttgcgattccatggactgtagcccaccaggcttctctgtccatggaattctccaggcaagaatatgaagattcccttcagaatactaaagggaagatccaagggatcttcccaacccaaggattgaacacaggtttcctataatgcaggcaaactctttactgtctgagctaccagggaagctcttatataaaaagcagatgccaattaattgaagattaaatgtgtaagaaacatgctaggggaagtgcctgtgagagcaaagtggggagagaaagctaagagatccatcagaccatgatacaagtctgactcagagagaaggttggttggaagagtgcagtggaatgctttttcctttattttgggccatgttgcgtgagggatcttactccctttaccagggatcaaacccgcagcccctgccagtggaagtacagagtcttaaccagtggacaaccagaaaaatcccagtttttccttttaaaaagtccctcttgtatacaatctatttctgttctttagtggttagtctaaaaatgttattttattgaccatgctgaatgcaggatctttgttcccccaccaggggtcaaacctgtgccccctccaatgggagcatagaatcttagtcactggactaccagggaagttcctgcattttaaaagcctaaaatcttaactgtttttaaaattaattttttttttttggctgcatggagtgttagttgccttgtgagggcttctttctaattgtggcctttggggtctgtagttttccacatacaggcttaattgcctaaggcatgtgaggtcttggttcgctgaccagggatcaaacccacatcccctgcattggaaggctgattcttaatcactggaccactagggaagttccatccctgcatttaacattatctttaatctatatctttattcttctttcaaacaatacatagatcttagaggtctttaacgttctttaacattaatcattctctttggattcatatgcttttataatccaatatttaattatattgttatctcattaatttcacaaatcagatattttgttattctaagtagttggcatttatatggatttactcatatgcctagtattttcttagttcattcttctttcttgtgtctctatccgggattatgtttcttctaccctgaagtatatgcatcctttagaagaagtccctttcgtgaggatttgtggtaaacagaactctaagatggctcccaagatctgcaccctaccttgtgtacacattctctataatcacttctccctgagtgtgagcagatctcatgaacatgatggaattttactcttgtgattatgttgtatatcaggttaatggtaattaaagtctgtaaccatttggctttgtgtatgtgccgtgtgtgactgcacaatattcatgtctgttgtatttttcttacatctttctacatttgagttcctcaaagctttccatagtttgtgtcattcaatcatttattctttaaatgaattaatggagtgtcaactgatccaggcattattctatatgttattgtcctgaagtaagaagtaaaatagataaatgttcatgaattcaagcagtatatattctagtggagtaagagagataataaaaatatgtggtaaaattacatagatatgagtgcttcttggcagaaaagctatgataaagctagacagtgagttaaaaagtggagacattactctgtcaacaaaggttcacatagtcaaggctgtggtcttcccactggtgatgtacagttgtgagagctggaccgtaaagagggcagagcaccaaggtattgatgccttcaaactgtggtgctggagaagactcctaaaagtcccttggacagcaaggagatcaaagcagtcaatcttaagggaaatcaaccctgaatattcattggaaagactgatgctgaagctgaagctccagtattttggtcatctgatgtgaacagccaactcattggaaaagtctgtaatgctgggaaagattgagggcagaaggagaagaagacatcagagaatgagatggctggatggcatcaccaatgcaatggacatgaacttgggccaactccaggagatggtgatggacagggaggcctggtgtgctgcagtccatggggacgcaaagagttagacacgactgggtgactgaacaaaagcaacagcaatgagtgctatggacataagtgaagcaagaaagaaaaggagtgtcatgataaggggcctgggtaaaaattttaaataggttggccagtaaaaaagattcaagtaacctgttgactttgagataatcaaaggggaccttattttgggtgtgttagttgctcagtcatgtctgactctttgcaaccccatggactgtagcctgccaggctcctctgtccatgggatttttccaggcaagaatactggagtaggttgccatttccttctctagggaatcttctcaacccagggactgaacccaggtctttgcattgcaggcagattctttacaatcttagccaccagggaagcctagcctaagtagtgagccctttaaaagggcttagtcttagcagtcagagacctttaacaagatggctctggtcagactctcttgccgcaccctctcatgctctctggccccatgttctgtaaacagagactttgcacaattatgtagctgagatcacttatagcactgtgtatgagcatcgtgaggcactcactgggtcacgggctactttgtgcattatacctatatgagcttcagcatggaagccccggctctgctgccctgagaccgcactgcagtggcatcatggtgatgttacacgaggttatgttacggctgtgtcatggctacactatggttacgttatggctgctgttacagctgctgcgtcagccaggagagaggctgtgttatggctgccatgccaatcaagaaagaaaaagcgtgtctgcagtgcctatggttcctcgagtcatcttccagcctcttaacttgtgccttgctcaccctgggttcagcaaacagtgtgaacagcaagacaactggcatcacgaacaggatcagcaatacaaccatgtagaaataaacggccacattgtggagaaaaccacatggcctctagtagttgaggcttcagttctatagttacaaggagctgaattttgccagtgaccagtgaccttggaagaggacctgggtcccagatgagattgcagccctggacggcaccttgatttcagcctggggaggtcctgagcagaggaccaagctaacctgtacccagactcctgactcatagaaactgtgagataatgttcagtccccgagtcatgtctgactctttgtgaccccatggactgcagtacaccaggcttctctgtgcctcactgtctcctggagtttgctcaaagtcatatccattgagttggtgatgccatccaattatctcatctgctgtcacacccttctcctcctgccctcaatctttcccagcatcagggtcttttccaatgagtcagctctttgcaccaggtggccaaagtattggagtttcagcttcagcatcagtccttccaaggagtttcagggttgatttcctttaggattgactggtttgacctccttactgcccaagggactttcaagagtcttctctagtaccacatttcaaaagcatcaattctttggtgcttagccttctttgtggtccaactcccacttctgtacatgactactggaaaaaacatagctttgactatatggacctgtgttggcaaactgatgtctctgcttttaatgtgctgtctaggtttgtcatagctttccttccagggagcaagtttcttttaatttcatggctgcagtcaccatccacagtgactttggagcccaagagaataaaatctgccatgttcccattttttcccatttatttgccatgcagtaatttgagtgaactccaggagatggtgatggacagggaggcctggcatgctgcaattcatgggctggcaaagagttggacacgactgagcgactgaactgaactgaatggggccagatgccatgatctttgttttttgaatgttgactgttaagcaagctttttccactctcctctttcaccttcatcaagaggctctttaaaaaaaaaaaataaggctttttagttcctctttggtttctgccattagggtggtatcatctgcatatctgaggttattgatatttctcctggcaatcttgattccagattgtgattcattcagcccagcatttcccatgatgtactctcctttcccaattttgagccagtctattgttccatatctgtttccaactcttgcttcttgacatgcatacagtcttctcaggagacaggtaaggtggtctggtattcacatctctttaagaattttccagtttgttgtgatccacacagtcaaaagctttagcctagtttacgaagcagaagtagatgtatttttggatttcccttgctttttctatgatctagcagatgctggcaatttgatttctggttcctctgccttttctaaatccagcttttagatacggaagttcttggtttacatgctgttgaagcctagcttgaaggattttgagcattatcttgctagcatgagaagtgagtgcaattatatggtagtttgaacattcattttaggaatcactgaactaaaatggacagaaaggggtgaatttaattcagatgaccattatatctactactgtgggcaagaaacctttagaagaaatggagtagcactcatagtcaacaaaagagtccaaaatgcagtacttgtgcaatctcaaaaaggacagaatgatctcaattcatttccaaggcaagcctttcaacatcacagtaatccaagtctgtgccccaaccacgaatgccaaagaagctgaagttgaatggctctgtgaagacctagaagaccttctagagctaacaccataaaaagatgtcctttgcatcataggggattggaatgcaaaaggaggaagtcaagagatacctggagtaacaggcaagtttgccttgaagtacaaaatgaaggagggcaaatgctaacagagttttgccaagagaacacagtggtcgtagcaaacaccgtcttccaacaacatgagagatgacactacacacagggacatcaccagagtgtcaataccaaaattaaatcaattatattatttgcagctgaaaatggagaagctcttcacagtaaaaacaagacctggagttgactgtggctcagatcatcggctctttattgcaaaatgcaggcttaagttgaagaaagtagggaaaaccactaggtcattcaggtgtgacctaaatcaaatctcttatgattatgcagtggaggtgacaaatagattcaagagattagatctgacagacagagtgcctgaagagctatgtgagataagaagtgttttcttttaagccactgagtttgtaataattcgttatgcagcaatagaccactaatacaggatctagtgataacaaacttcttcaatttttttgtttgaagatttattttaccttcattgttttaaacttcaagagaagtatagttgatttaaaaaaaattaggtgtactacaaagtgattcagttacatatatatttaatattatttttaaaattcttttaattataggttattacagatattgaatatagtttcctatgatgtacagtaggtccttgttatttatttaattaaaattttaaattttacattggaacaaagttgatttacaatgttagtttcagcaaagtaatacagctatacatatacatatatccattctttttcagattcttttcctataaagtttattacagaatattgagcagagttccctgtgcagtagatctttgttgattatctattttatatatagtaatatacatatattaatcccaaactcttaatttatacttaccctcaacttttccctttcggtaaccataaatttgtttttgaagtttgcttctgttttgtaaacaggttcatttatatatatatatatttaaattctacatataagtgataccatatgatatttatttttctctttctgacctacttcacttagtatgataatctcgagggccattcctgttgctgcaaatggtagtatttcatcctttttatagctgactaatattccatgtatattccatgtatatattccatatatatattccatatatatattctttatccattaatcgttgaatcgttgatagacatttaggttgcttccatgtcttgcctattataaacagtgctgcaatgaacactggtgtgcatgtatctttttgagttagagtttttattttttccagatatatgtccaggagtgagattgctggatcatatggtaaatgtattttcagttttttaaacaatttccatattgttttccataatttccttagttccataagttggctgtaccaatttatactcccaccaacagtatagggggctctcttttctccataccttccctagcatatgttaaaaattttttagcacacttcctggcttgcaggatcttagttctttgaccagggattgaaactgtgccccctgcagtgtaagtaccgaggcctaaccactagaccaccaggaaattctccccagcatttattatttgcagactttttgatgacggacattctgactagtgtgaagtgatacctcattgcagtcttgatttgcatttctctaataattagtgatatcacgtgcctgttggttatatcttctttggagaaatgtccatttaggtcttctggccattttttaattgggttgttttttgatcctgatgctatgtcagctatttatatattttggaaattaattccttgttggttacaaatattgtctcccattctgtaggttgtcttttttgttttatttatgttttcctttgctgtgtaaaagcttttaattaggtaccacttgtttacttttgcttttgttttcattacccattactaggagatgtatccaaaaaaaatctgttgcaatttatgccaaagagtgttctgcttgtgtttccctctaggagttttatagtattcagtaggtctttctgtttggtcacatctcttgcaggatctcagttccatgacagcccaaaatcctaatcactaggctaccaaggaactccctacgtttatgtctttaatccattttgagtttattttatatatattatcagagaatgttctaatttcatgcttttacatgtagtggtccaggttccccagcaccacttactgaagagactatcttttctcctttgtatattcttgcctcctttgttgtaaattaattgacaataagtttgtgggttcatttctgggcctgttccattgatctatatttctgtttttgtgccagtaccacactgttttgattactgtcattttgcagtatagtctgaggtcagggtgtgtgattcctccagttccattctttctcaagattgttttggctcttcagggtctttcgtgttcctatataaattaaaaaaaatttttttttgttccagttttgtgaaaaatgccattggtagtttgatagtgattgcattgaatctatagattgacttgggtagtatggtcattttaacagtattgcttcttccagtccaagaacatggtttgtatcctcttcaattcatctgtttgtatcctcttccatttctttcatcagcatctcacactattttgagaagtcttttgcctcattaggtaggtttattcttaagtattttattctttttgatgcaagggtaaatgagattgtttccttaatatctctttttgatatttcattgttaatgtatagaaatgcaacagatttctgtatgttaattttgtatcctgcaactttaccaaattcatggatgagttctagtagttttctggtggctgccttaggattttctatgtatagtatcatgtcattcacttcttcctttctaatctgaattccttttatttctttttcttctctgattgctgtgtctcctgtagtggaagcatggagtcttaaccactggaccaccagggaagtcccccactccccaaattgttaaaaagttcttagtggggcttccctggtagctcagtggtaaaaaatctgcgtgccagtgcaggagacacaggttggatccctgatctgtgaagatcccacacgccgtggaacaactctgcccgtgtgccacagctattgaacctgtgttctagagcctgggagctgcccgctgctgagcccatgttctacaactgctgaggcccatgcaccctagagactgtgctccacaaccagagaagccaccacgagaagcctgctcattccaactagagagtagctcccactcaccacagctagagaaaaagcccacatgcacagccacgaagacccagagcagccggaaaattttaaaagttgttagcatatttatcacttaaagacaattttaaaatttacattttatttcttttggacagcaccagtataactagtgtagacgcttctcttctctgcatctgtcctccgccatacctggctttgctacctttgatttgctctctgcctttatctaatcccttctccatgtctcagcctgaaaaaccaattcctccctcctggaaacagcattctttttttttagttcagttcagtagctcagtcatgtctgactctttgcgaccccatggactgcagcacgccaggcctccccgtccagcaccaactcccagagtttactcaaactcatgtccattgagttggtgatgccatccaaccatctcatcctctgtcgtctccttttcctcctgtcttcaatctttcccgtgtcaaggtcttttttaaatgagtcctttgaacttttttcaaggggagtttttttccctcttggttcctccccattttctgaagtgcttagaagtctacccaaatgagcacagatgttcttctctgttcagtatcagggattggaaggatgggctctagtcatacaaattggagttttagggtctttggagtcttgttcatggtccctatcagacagggcctcaggttggcacctgtgaaaaagcacataagacagagacagtattaattttctttgaagaccactcagtctaattcaatataaaagaaacaatatgtctcctgtttgtatgtcgtgtcttcagaccccttttcatgatgttgaaaaggatttgggtctttcttgtatcactaccctgcttctaaccaatgcttggcatcttcacatgaaaactcagcatatctgttaaaggttgttaaagcactcagagagatggctccagttcaaattaaaaatatatatttaaaaacaaattcaaagcagatcaagatgtattaatatggaaaacctccaagatgtagtgtcccatggagataaaaacaaggttcagcacagggaactatatttaatatcttgtattacctataatagaaaagaatctgaaaaagaatatctatatatgtatatatacaaatatctgaatctctttgccatacaccagaaacaacattgtaaatcaactatacttcaatttaaaaaagcaacaaggtttagaacagtgtgtatacaaagtcgctctttgcatctaaaatgcttgcaatttcagaggctgactctgggaccaaaaacaaaaaatggcatctagttactttgggtaaggaccttggggatgggataaatgaggtacgtgctgctgctgctgctgctaagtcacttcagtcatgtccgactctgtgagaccccatagacagcagccaccaggctgccccgtccctgggattctccaggcaagaatactggagtgggttgccatttccttctccaatgaggtatgtacttttttttttttttaaggtgcttatttacggtagccaaaagctagaaacgactcccaaatccatcaaatccattacaggtgaatggataaacaaaatgtggtgtgtatgtaggtatgtgtatatatatatatacacacacacacacacatatgtaatgaatgtttttcagctttaaaagggaaagaaatgatgacacatactacaacatgaacaaattttgaagacgtaaggtggacacaaaaggaaaaatattgtatgattctgtttatatggagtacttagaaaagtcagatttatagagacagaaagtagaatgcttgttaccagagactagggtggggggagaaaggggaattagtgtctaatggatacagtttccgtatggaaagatgagaaaattctagagacgggtactggagatatttgcaaaataaggtaggtgtacttagtgccactgaactgtacacttaaaaatagttaaaatggtaaattttatgtctgttttaccacagtaaaaaatacatgtatactgagccttttagaactaacacccaaaaaagacgtccttttcattataggggactggaatgcaaaagtaggaagtcaagaaacatctggagtaataggcaaatttgcccttggaatgtggaatgaagcagggcaaagactaatagagttttgccaagagaacgcactggtcatagcaaacaccctcttccaacaacacaagagaagactctacacatggacatcaccagatggtcaacactgaaatcagattgattatattctttcaaccaaagatggagaagctctatacagtcaacaaaaacaagaccaggagctgactgtggctcatatcatgaacttattgccaaattcagacttaaattgaagaaagtagggaaaaccactagaccattcaggtatggcctaaattaaatcccttatgattatacagtggaagtgagaaatagatttaagggcctagatctgatagatagagtgcctgatgaactatggacggaggttcgtgacattgtacaggagacagggatcaagaccatctccatggaaaagaaatgcaagaaagcaaaatggctgtctgaggaggccttacaaatagctgtgaaaagaagagaagtgaaaagcaaaggagaaaaggaaagatataagcatctgaatgcagagttccaaagaatagcaagaagagataagaaagccttcctcagcgatcagtgcaaagaaatagacaaaaacaacagaatgggaaagactagagacctcttcaagaaaattagagataccaagggaatatttcatgtaaagatgcactcgataaaggacagaaatggtatggacctaacagaagcagaagatgttaagaagaggtggcaagaatacacagaagaactgtacaaaaaagatcttcacgacccagataatcacgatggtgtgatcactcacctagagccagacatcctggaatgtgaagtcaagtcagtcttagaaagcatcactacgaacatagctagtagaggtgatggaattccagttgagctatttcaaatcctgaaagataatgctgtgaaagtgctgcactcaatatgccagcaaatttggaaaactcagcagtggccacaggactggaaaaggtcagttttcattccagttccaaagaaaggcaatgccaaagaatgctcaaactaccataaaattgcactcatctcacacactagtaaagtaatgctcaagattctccaagccaggcttcagcaatacatgaacagttaacttccagatgttcaagctagtattagaaaaggcagaggaaccagagatcaaattgccaacatccactggatcatggaaaaagcaagagagttccagaaaaacatcaatttctgctttattgactatgccaaagcctttgactgtgtggatcacaataaagtgtggaaaattctgaaagagatgggaataccagaccacctgacctgcctcttgagaaacctatatgaaggtcaggaagcaacagttagaactggacatggaacaacagattggttccaaataggaaaaggagtacatcaaggttgtaaattgtcaccctgcttatttaacttctatgcagagtacatcatgagaaatgctgggctggaagaagcacaagctggaatcaggattgcaggagaaatatcaataacctcagatatgcagatgacaccacccttatggcagaaaatgaagaggaactgaaaagcctcttgatgaaagtgaaagaggagagtgaaaaagttggcttaaagctcaacattcagaaaacgaagatcatggcatctggtcccatcacttcatgggaaatagatggggaaacagtggaaacagtgtcagactttattttgggggctccaaaatcactgcagacggtgactgcagccatgaaattaaaagatgcttactccttggaagaaaagttatgaccaacctagatagcatattcaaaagcagagacattactttgccaacaaaggtccatcttagtcaaggctatggtttttccagtaatcatgtatggatgtgagagttggactgtgaagaaggctgagcgccaaagaattgatgcttttgaactgcgatgttggagaagactcttgagagtcccttggacagcaaggagatccaaccagtccattctgaaggagatcagccctgggatttctttggaaggaatgatgctgaagctgaaactccagtactttggccacctcatgtgaagagttgactcattggaaaagactctgatgctgggagggattgggggcaggaggagaaggggacgacagaggatgagatggctggatggcatcacggactcgatggacatgagtctgagtgaactccgggagttggtgatggacagggaggcctggcgtgctgcggttcatggggtcgcaaagagtcggacatgactgagcaactgaactgaattgagcgtttaaaagcctttaaatttgtattttataccatttctctttaactgcaggggataaagaccatttctactagaattatagatacacttaatacttagcccagacgcatcctacagatacgcctgctcacatatggaatgtcatgtgtgcaaggtgactcactgcggcatcattcacaatagcgaaaattggtaccccctagaagaggatggctaacaaattatgtttccatgcaacagagtactatgcagctcaaaaaatgaatgaggaagatctctatttactgatttagaaaggtctccaggatatactgtcaaatgaagaaggtacaagtgtatatagtatgctatcttggggagcatgcctggggaggagtaagaaactgagcaacttgctgagcaatttgctaagtgagaaactgacaccaagggttaactacagggtgcaaggaggaaggagtggatagggagagaggttgcagtgaggttttgaatcacactactgcattatctatttagaataataacaagaaatacttgttgctgctcattcgtgtctgactctttgtgatcccatggacagcagcacgccaggcttcctgtccttcaccatctcctggagtttgctgaaactcatgtccactgagttgatgatgccatccaaccatctcatcctctgccacccccttcacctcctgccttcaatcttttccagcaccagggacttttccaatgactcagctcttcgcatcaggtggccaaagtattggagctcagcttcagcatcagtccttccaatgaatattcagggttgattttctttagaattgactggtttgatctccacactgtccaagggactctcaagagtcctctccagaaatacttaagatgatgaaatgggaaaaagaggggcagtagtggagagattcatcctttctaccatttaccacccccacttccacctcaccaacagttttagggatttttcaggttgtttttcaatctgagattaactgagacaaacataatactgcaatagttatatttcaggctctttacatgaatccactcaaatttacgaacaaccaaataatgtaggttctatccttaacattctcattttatgaaagatgaaacagaggttgggagaggttaagtaaacaactcaaggactgagacagtgggtaaacagaatttgaacccattgtttatcagatcctgactcttccaagatccttgtaaaaagatgtctgaacacttgttcttttttttttttttttcatttctttggcatcattagaagtgggttcattgggtcagggaattcgtactttccaatgttttcttttttttcataactgagattttattggttgttttgaggatcagtacacagacatttcaatttgtacataattcttaacatttgtaccaaaaatctaaaaaaatcatgtagttttgattcttttctgaatagttttcctagaactctacaggttaaatttggaggcaaattttccttaacaggatatccagtacaatattggaggttccaccagtcacaatttaatgtcatactacacactcaaattttcaatcgttcacagcacattaacaatgttactaggagaactggaccaccacgactaaagatgctacagggcacaaaattctgaccaggaaagccaagatcaagcagtggttttgttgtaggatacaattctaccaaaaatatgggaagaaaagtaatagtatccaagatactggatgcacagttgactccaaactgccatttagtgtgctttatattatagagtataaaagctcacctcaatttatggaatgttactgacacctatgacaaccaaaacctcccatattcaatatcccactattttctggttgaaccaaaaaataaccagcaaatgatttcccctctaaaaaaaaaaaaaaaaagcactgacacttaaaaagtggaatgagagaggattctctctttttaaaaaatgtttttagagctgtcaaaaaactggcgtttacaaaatagttgataaaaataatcgtctggattgtacaggaagggagacagatagagtgtggtattaatcagacttggcttctgcttcatcaaaggctgggctctccttcttttagtctcttggttagccacttcggccgttgttcccttttcccccgttttatttgacttttttgtctgaagatttatcctttcctgccgccttcttcggcttcgtttccacttttgcaggagcccatttagctgacaatctcgcagatctcctcttgggctctttcttcggcgcccctcgtcggagcggacccgtctggggagccgtgacggccgggcgggagcgcgccaggtgcctgcaagccttcgcgaagctgaagtgcccggcagctgcggcaccctccggccaagtgtttttttaattaaaacatacccaagtccattatgtacatttgcattattttatatttaccacgattgttttaattaatagcctagcacgcaaaagcgtagcgagtctctgggggagctttgaccatacaagagtcgtccacgccttctctacgtcgtctaccctctgccggcagagggcgctggccaccgcgcgcctctcccccgtggtcctaatcggcttcccgtacagtacgcacgcgcaaatttcgctccaggtgtccagctttgtgcctgatcgaagtctccccggctgcgctcagcgcgcagggtttcacccgggctggtcttcggggaagagtagcgtgtcccccccgacccagaacacctccgggcctcagagactagaggtcctgagtgggcctacaggggtctggcggcacggcgggcagcccgtgcgggcggggtgggagcccgctaaggcttgggcgtcggtcgccagtggggcccggagccgggcgcggagcccctgacagtacaggtacggaggcggcgaccatggcaactgcctcctcccccgccgtgttcgcaaggctctcggctgtgttctgggggctcggcgctcgcctggggcgcggcggggagcccggcgtgccgggcaggggtcggcaggggtgggccgcggtgggggtgggcacccgcctgggtctggcctggtctgacccgcctgagctcttcagcctggcggggtcagagtgattgcgtctcccaattcttccggaactgcagggcttcccctcctttcctgggaacgtgcaaggcactcctgaacctattccaagctacaggtttccagtggggcacatggttgaaaagttgtcaaaaagaaaaaagaggactaaagctggaggccgatatgcgtttggtgtgtctgtctcccattcctggggtccgccttaactggcagggtgactcttgagcagtcatactgcgcatcccccaaactaagtcacacagatgaggagctccgctgtttttcaagaggcggcgatttagaaatgtaccctcttttgttacagtctggagaccagcaagctcgtcctgaccccttgccgatccagtatgcttaagacactgagggtcagggaacaacgaggtgaaggttgacgtcctttacctaggctacggccgaagcccaaggcacggggatgttaacgatagtagtaaatgacaacgtttttcccagaaggctttttgtgctcagatatgtttagaaacttcatggttccaagttttctcttcccaggtggcgctagtggtaaagaactcccgtgccaacgctggagacaggttctatccatgggtggggaagatcctgtggaggagggcatggcaacccactccagtattcttgcctggagaatcgcatggacagaggagtctggcagcctgtagtccgtggggtcacaaaagagtctgacttaaatgaagggacttagcatgcagcacgtggatgtttagaaacttaagctttcaatatgctaatagtatttttaccaagaatttcccactggaagtataggatggagtttcccagatttgggtggaaaatactgtttttcttgggtattgcctctttagcatataagacaatttggaaaatggagttccagaattggaaactcaagatttggaaggggtagtttaggtcagtgcttttcgaacttgaatggtgcatacacctaggggtcttgttaaagtacatgctttggttggttctacattttaaacaagttcttaggtgatgctgatggtccatggaccacatacactttgagcacaagggtgtaggtctctgggttggaagagaccatgttctattccttgccctccagaacaagctgtgctaccttgaataatctcttcccctgtccaagcctataaaataggagactggactagaagagcgctactgtttctttcagatcttgtgatagttgaattccttctaaaatattcttgcccaatggccagtttgggcttgaacatttctagtaatggggaatttactgaatgtaaggcatcgcatttcatcacgagatagctcaatacagaagtttttcatgttgctaaaatacatctctataacttccatcttgttgatcctagcttatcttttagaatcagagaaataaaaaatataattcctctttaaaagatgagtcttgggaattccctggcagtccagtggttaggataattctttcactgccaagggtcagattcaattcctgctaagggaactaagatcccacaagctgtgtggcacagccaaaagaaaaaaaagattcttaaggtatgagatgaccgagtttctaccatgttttccccaaactgaattgtcctttattcttccctggcattgtttcagattcctgtctcttaagtctcgtcctcctgtgtggagggtagtggagttgtagcaggactttgaaggacgagtggggcttgcaaaaccaggggaagcatcctaagcgtttgacagtggtgcggagatatgtcagatccagaacggtttgactcaagcaggaaatgttatgtcactgaaagatttggggcaaagcaatactttacagtgtgtagtcgtcctcctgtagtgtgtaatgtggttggaaatgaggaaagagagaggcagggaaccagacaggctccacataccagtaaagatggcctaggatggtgataatagtaatgccttctatttatgtaacgctttacagaacttttcacagagagcctttcctgtgaggtaggcagagcagctgtgaccctgttttatagacggggcaccaaagagggtaaacgatttgtcttaattctcaaagctattacatggcagagcaaagtgatgacagtggtaatggaggagaaaggaagaatgtaagagacaatactgagaaagagctgataagttgggcctgactgagcatgagtgcagaggaaacgaagttgttagggaggagtcagaatggttgggaaaatcatagtacatgactcacagctgccgtaacttgtactctgacagatctgacattgttagtagctctttggagttaaaggtcagaaggtattgtagaggattcctaggtggtgtgtgggggcttgggttacctgtcccatgccgagggaaatgagaactgggtattcagtgtcccctgagaaggtaagtgctgagcagttgactgattcaagcctatcttagggtccttgccatcctgaagtttctggatgtggttttatataatttctctttcgaagttccagcttgtactggttgtacttggctgacaagttggttacccagtctgacttccctaagctctgatgtatccactgagggtttcaaggaaacagagactggattcctgtcactcctaaaaccttacgaaagctattttcccaggtctgcacttctctagagcctagaggtctttctttctctgtccttttaccttagaagcatatgaaattgagatttattgccactactgaattccataggaactggagctgtccatgcagttttagtttttaggctcctaactggagaagaaagagctacctttgctggggtgtatgttgtatttcccctatggtgtctctgggaaacgtattagagccaacttatatccctagagcttgatgttggtacaggcttctgttcagtgcttaggataactgagatgaataaaaactctgccctggaggaattcatgatgggataaggaagacagtattgtaaggaagcttccctggtggctcagaggttaaagcatctgcctgcaatgcgggagacctgggtttgatccctaggtcaggaagatcccgtggagaaggaaatggcaacccactccagtattcttgcctggagaatcccatggacggaggagccaggtgggctgcagtccacggggtcgctaagagttggacacgactaagtgacttcacttcactttgctactgtaaggaaaatgtggtcttgtgatagagatatttccaaagatctgtgtgagtgcagaggagggaatgacagctccacatggagacgtcaagagaatcttcaggaaagaggtgatgagtaagtagagccttgaagagaaaggacatggtgatgtttgcaacatttgcagaagcataagatagatggatccaagtttctaagaggatttgggaatcaaagaaggggtggttgatgagattagattcataatgaggccaggttttaatggcctgtagttttgttctaagatggacttttgtgggagggaagtctggagcttttcaggcagggatttaacttggttatattttgggaagctaattgtggaaatagactgaaaggggaggatctggataaggaacatcaggagaatcttgtaataacctgggcttggcttcgggctgaattaaggattagtgaggatgggaagaaggggaggaatcagattgtagagacagagattccctgatgtaatgactaattaattgagaacaagagagggaatgtccaggatgactccgttttctatgctggatggaaggtggtaccagtaaaaaggagaatgtagaagaggaacattttctgggtgaagattccacgtgttttgggtcacgttgaatttgggggtctgtggcacttagcagataggtggaaatgtgggtctggagttcagaagagagtttgtgccttggggtggtggatgatgctgttgaaatggatgatcccagtcatgcttacagaaggctgaagatgatagaggaaatgacaaggcttagtgggcaaggtaagagagaatgttgtccagggagctacagagggaaaagttgccggaagagaatcagcagcttctgttgctgcagagaggtcgagtaggatgagcttggaaaatgtacgtggagcttgggcagttaagagattgtggttaccaggactcatttttttttagtgtgtgcagctgtagtggagtcataaggacaggaggcaagtgaattgaagagtggatggaaagtcaggataaggagggtgtacttgagtagtttggcaaggaaggaagaaaggaagatggtggcagcttgtggaggagtagcagaaacaagcgtcaggtttttctggaagtctcgagcatgggttatctgatgagaggtcacatttgaaggtacaacggaaaagatgatcgcagaggagggtggagggttgcctctgaagagaagacatcgtttcttttgaagaggaatgactgaaaaaagggaaaaaaatgtaggaagaaagaggcaatgatggacacatctaaatttgcaaatagggtccgtttcctttctcagcaagattatctgttgggggaggggttctggtgtgggctcagataggaacagggacttgagagtggcaagggaaggcttgaaacaactgtccagagaggagagggaaagagagcagactcaagatcgctccaagaacattgcataccctctgaacttgaatcctgcactgaggtctctcttttcctctccttcgtaataatgatggctgtcatttattgaatgtgtcataccaggcactcttataagtgcttttcagccctgttagaaaagtattgttattacctgtgttttacagaagaagaaattgaggcatggaacagtagtatttatgtttgatgaatctcttacttctgcagaaatggcattccttctctgaggcatcagagaaaggcagaaatttactcccaagtcccagcttctggtcttgaggggctggagtttagggctgataaggagggagccttaccaggccagtctgtgggtatgatagtggatgggtgggcagggtggtggggtcagtgttgctgctatctttttgcaactacatatggaattctgaaatccttatgtgacttcccagcagcctgactagaaggacaagtgactgtaatgatttgttacgtattgcaggctgacactgtgtcacttgagatggtgaataagaaaagagatcttgtctcagtcagccagaaaaaaaattttttttctgccagttatgggactaggcagatctatagcctttcataacaacatacattattaacactcacctttggtgttttccccattggtgtgatagaatttgtcggtaaggtgcacacctgacttgagtgagagaggagaatgatgagatggcatggatggaagagaatggacttacctttcctgctgcagccactggagcatcctttctgtgtccttcctcttgaggttgccatggatacgcctttgcttggtgacttgaggggattgatttccgttatgatcagttgatgacgtgggtttaaaaagagaaaggacagaatgctctgcttctggggagtggctagtgagctgcccaaaaggcagagccaagcgtagccgaggtggctgtggctttgctggctgctttgggttttgctgaagttgtgaaatggtgcatctctctctctacagcgcaggctcagggttccctgtccgcagggtcctagtgccaggggcttgttgattgacggaggggaggaagcagcaggaactttgaatagtctgttaagtgggacccccactagctctgggagggttgtggttctcgaatacagggctgcactcaagtgcctgttgccttcctgcaaaagcgcctttcttgaggataagtgaggcgtattgtgtagctttccttgctggaagtctgggccctttggaagcgggtctggcggtcactgggtattcctagaggggaatatcctgggagggagtagacctgttttcagtttgggagtgggctacagaaatttctggggataaatgaagagcttggagaggttagaaaaaaaagtctgtttagggtctaggtcctgtctctgagatttgcaaggcagggacaaaaggctccgtgtatcttctttctgggtatatcaggaatccagccttccaagcttccagtccccaagcttctgttcccctctcctttcctgactcttgagggacttatatccacacgtatccgcaccgcccccctgccactagtgcttttagagatgtacaactgcaccctagttttaagaaaatccgagtcttgatgtattacctttatgtttcattttatctctttgcaaccaaatcaaaatacccagtgcctaatgcagttcagttaaagtgtgtggaccctgctgtcagactgcctgaatttcagacctctataggtggaatcagagaaagcaaacgattgggttagcccaggatcaaggtttggtaaggtgagacaagaagaggtcaggggctcaaaggatactggtacaccagtaaaaagcaaggtggaaatggtacagactgggtgccaaagagacttttcctccttaccagttcctccacaattcccaatatctgcttctttttctgtcatgtctgaaatgttcaccaagtccactggtaacctgtttatcagacttagattgtgtccctcatctcttcccgttttcctactttttacttttttatttttagcagtttttaatgtcattgggaaggaaaatggattggaaatccagggagtatctgtcttctggttggggtaacacataacttataactgttctgtgtgacttgggatgggtcccaaagatgctgttgaaggaccccctacctgtggttgttcagtcgctccagtcgtgtctgactctctgcgaccgcatgaactgtaaccgccaagctgctctgtccgtgggatttcccaggcaagaatactggagtgggttgccatttccagctagtcaaatgtgccccagtggctatgagacttagagttgtttgacttttgagacttgtaaaatggaaataatggaacccgtgttgtcttcatcacaggttcgtgttggaaggagatcgtgaaattcatatgttagtggtcacggttaaatttgcccctgagaagacctcgtgacttatttcctctctcttaacgtgttcggtttcccttctcagctctgttatcgtcattctcattgttcctgcttgagaaatcccaggtttattcattccttgacttacccatgcactcatctttccatctacttattcgcgcaacatctgagttcctactgtgtgcagttgtcagtgatgtaccctctcagtggtgatgaagacagtgtctacagtttgttgaacacatattctgggccaagtgctgtgctaaatgctttacttctgtcttagttaatcttcacaacatccctgtgaggtaagtattatttccccccttttttcagataaggtaacgagggctctgaaaatatgttacctagagtgataccagtgaggaaatggggagaacccaggctgtacccagatctgtccatctccagagcccatagaggcctgcttggtgctgctttcctcatgtttgatctattgtagctccttctcagagttggttttttttttaggtagtgtctctgagttggtccatttcttcttccctttctttttctcttacgagcctagttcgacccctcccgcccttgctcattattgccgttagcgtccttgctgtcatccctgtctttatcaagttgctatgcctcagcgccatctctctgtctgccacctgtttgatgttcctaaaacagttttcactatgccagtctcctgctcgggaagagtctggcttcctgttgctattggacccaattcatctatctctacctgttgttaaactccctgaatctatccatatttaccttctaatacatctcaacatcagtgttagttctttcagtaatatttgacactgtgtgccaagagtgatggaatcataaagaggaaacgtcgtggagtctgccttaacaggcttacagtttgataggagaactcatcgagaattctttacttcagccaagctaggcatctttaatcttccccactcaagcagaattattctttgtctactcatactgtcgtcacaaattatgtttgtaggcctttcctttccacatattccacccctcgccccgcaaaaaaccccctcatataaggcataatcaagtacccttgttctttctagctcaccttgctcctctctgtagttccttataatatgtatacctagacattttaagacctgtagagcttttgcactttttatagagcacttttatatgctttatcttatttgagtattaatgtagatatgccaggtgacagtctcactttatagaagaaacagcatccaagaagttagatgactgtatatacttgtgttgctggagagttctgtgatgtccttagatgtgtgctcctttgaatctgggaaggtaatgtggtccggaggaagaacgtgttttggaggcctggaactatgtgtggtaacagagagcaacagtgcacagggttctgattcaggctttggctctagcttcggctcctctccttgccttctgtgtcacttcagagaagtcactcagttctccaagccccagcttcttgtcagcgttgttcctagcctgcctctctgtggggttattttggtgtccagatttgatgataacttttgttattagctaacttttgttgagtactcactgaataccaggcgctgtcctaaatgtcatacgtggattgtctcagctcatccttatagcagctctgagatgttctttgctcgcggttgacaaatgagcagattgaggcgcaaagatgttaagcagctggttaacaagtttttgtagctatcaaatggtgaagccatgaattgaatgtaagcagtctgagtctagaactgagtctactcttaaccacactactaacgagtgtttttttaaggtgctctgtagactgtaaggtgctctgaacatgcagaagtccagtttgcaaggagctgcgtggccctgcctaatggtgaatagggaaaggagggggcagcatggatatgttgcaggagaggagagaaatggtttcctagggggtctgaccggcattggagatgtggagaggtgttttgggggccctatatgtggctgttggctgtcattctactattaggctatctggttttccttagaaagtggaatggaggaagaccctgttcggccagtgaagcccagcatggacaagacagctagccctcagcccaggggatctacgtccatactgacctggtggagccataggtcagaccctaggacagtctcgtgggctacttaggggcatggcaacctttgccagttagggggaagctggcgtacttgacttgctttgctgtgtgtgtgtgtgtgtctgtgtctgtgtgtctgtgtgtgtgtgtgtgtgtgtctgtgtgtgtgtgtctgtgtctgtgtgtctgtgtctctgtgtctctgtgtgtgtgtctgtgtgtgttgacttgctgtgtgtatgtctgtgtgtgtgtgtctgtgtgtgtgtgtgtgtgtctgtgtctgtgtgtgtgtctgtgtgtgtgtgtgttgacttgctttgctgtgtgtgtctgtgtctgtctctgtgtgttgttctgtgtgtctgtgtgtgtgtgtgtctgtgtgtgtgcgtgtgtgtctgtgtgtgtgtggagttgcctctattgctgctcttcctttgctatgtattgggcatggggcctggctgctctggcccaggatgagattgaaatttcaaccctgatcacgtgggtttgaaccgggctcccaagtttagaagggagagggagaaggaagagcatcggaaggggtgagcgacccttctggctgggagaggccctggcagctgattgtttggaagtgtcacttgaagctggcagggctgctgccctctaacatcgtgggggtgggcgggtggcagagagggtgagggggtgcagaccaggagaggcatcagggctgtgctcccagcgtaagacagtgtcctctagaggtgagtgttgggagtctgtggagtgggccctcgtcgcctcctcgctgtctgtctggcctggcccaggtgcagcaggggggcactaggacccagaggctagctcggttcctgacaagtctagagcagcactagcgcagagtgagactcatcagctggcaagcaggattcggtgtctctgggttcaggaatcctccagcagcagaggggacttgctcctcagcccctttctccattccctcccctaccccagtaggccacccagtgaggcccatggacaggggagggccacgcctgccggcttctgtgtttgtccatgagggcctggagccctagccctcctgcctaggtctctgccttttctctctgtctttggtcagctgggggagggggtggaggccgagtgagcaacatggcccagagcaagaggcacgtgtacagccgggtaagtggccctgatctgggatggccatgggagggctgctggagaaggcctggtgcctgtgggcagtgctgtgggggctgggagacaaagctggactcggccggggccactcgcagccctgatggggttagactgcataggcctcccttcccagagttgggccctttgtgggtactggtgaggcctgacctttgactctagctggacctcaggccagaggttccttagggggccggacttgtcctggggatttcaaatggggttggtgggttggaatggcctttattgtttgtcgcttgctttcttgctcttctggctcaggttggctctgtagccactgtgtgtccacctggtcctgaggtctgttagggttaggacggtggtgacagtctctgactttggggccagccctgatgtgcctgttagctccttttattgtcaggtccatgagagctgctcaactgtcccaggtatgacttggcctctcatggcccctgggaatggcatcctcgccttcttggatgagttctttggggaagagagttggggagtgactggctctggcagagcttccctaggaggccaagcgggagcatcagaagggagccctgtgaggtcttcaggtccatgctgtcactgcctcatgcctcattctctgttgcgaggcccctggttcatggagctgctgttgctaaaaatggcttaggtgtgattttcttctaagccatgggcctatttgggacctaatttcatgtcttgtcatcacgagtatgtcagaagccgagagcttcccaaggacaatgtttagtctattcccttggcttgcctattcatttgggccactgggcagagtcgggggacagtttgcaggacagatctgagataccagattggcctagcctttatatatttatttatttgtagcaagatagcatgagtgaaggatctccaaagcttatagatagagttgatggaccagggctgaggcctgaaagaagggagttaaatggttgaatgggcttggtgaggcatctcggggtgtcacggtggggtgggggagggcagattgtagaggaggcacagttgtgtgccactgaaagggagaggcctgagagagccgtgtgaacctcagggaggacaggcagaagcagggaggggaacaggactctgcgggaacactcactggctcacctgtcttcccagctccggcctctgtgtcaggcagtgggttgtggggaaccactgtaaactgagttaactcgcttgagcttcattcccctcctaggggacagtgctcctgagaaagtagccatgtggagtgacattcacagatctatcaatgaattctgatttattaaagttaaatataaactcctaaaaattctcagattccagggcagtttgaagaagttttataacataacactgacatttttccaaaagcaatttggtaggtgttggcggggggcactctaatttgagaatggggttcaggcaagtgaactctggtcctttttcaggccaggatcctgactggggcctctctttgatattagaatgacacccttaacttgaggctcttaactgtgtatgtttgcatgtgtcttccagactcccagtggcagcagaatgagtgctgaggcgagtgcccggcccctgcgagtgggttcccgtgtggaggtgattggcaaaggccaccggggcaccgtggcctatgttggagccacactctttgctactggcaaatgggtaggtgtgatcctggatgaagcaaaaggcaagaatgatggaaccgtccaaggcaggaagtacttcacttgcgatgaaggacatggcatctttgtgcgccaatcccaggtactcacttcctgcctctgtgtgtgtgtgtgtgtgtgtgtgtgtgtgtgtgtgtatgtatacacgctctgttgcatgtgcagctggtgtgttggtgttctcttttcctgggcatgagcctgagtctctggttgggagagtgggaggtaacgagggagggaagatcgagagctatccttagggaatctgccctgtactctaggcttgcttagggcctgaagaggggcccatattacatccagccttgatctagctatactgagtctattctgtggcctcagatccaggtatttgaagatggagcggatactacttcaccagagacacctgattcctctgcctcaaaggtcctcagaagaggtaacaaccacccacttaagttgcctcctcacacgcaggagtccccaggacttctccccagaacaaggggccgcggtgtatcctgcgactttccgtcaccaccatattctgttgttccgtcttgcccagcctgccgtgacgttctctgctcctgtccctctatacaaacgcatgctttgtttctgtttgcattctacagagggagctgactcaaatccaaagaccagcaaactggtgagtagtcagggatgggagtggggagtaatggaggaaagagggaaaagagaaaggagggaggcccatactaggtcttactcatctgctgcttccgcccgaggcagtgaactgagttagcctttccaggctccgtcctctctgagaaggaagcttttctgggtatgagttgccgctttaggtgtaaaggtgctagcagggaaaagctgccaatgcccagaagctctggatctgttggaactgaggctgggggtgaaagggaggactgtctgcccctagtagtgttgttgccaacttcctaccttttggtacctgaggctgccgtcatctgatggatgtagggtagggggaggaaggtgctctctggttcacaagtaaggggaaaggagctgggccttctgccatcttttcaggttgtatgtagagggcccactgcagctcccctccactgctctgtagagggtgtgtgaggtggggctcccagctctccagctcctctgggcaggctgtggacctcctggaagctgatcttgagggaggcctcatctcacttaccctggccttgacagtgacctgctcctcccataccggtgtttgcctgttggtcttaatacctacacccaagatgtctgaccagctagcacagtgttgtttaagtctgttctctaactctgccctttccaactcctcatgcagcggggactgaagcctaagaaggtggtgtgtttactatttgtgcctgggtgggtgagggccatgagccccctccccagctgtcctgcatgtccttgggctgctacatgcatgtatgtgtgaccttggggctgggatggccagaggaaatggcagccttggctttcagagttcctttgaggggtgcgaggatatcaggctcagtgtccaggcccagatcgcgttagggacgatcgccactcctcctcacaccctgcccatcgcctcgggacttctagtcagagactccaagcatttgactgtaaatagagcagcatgggagagagcattgactgggtcacagtggattctcactcggcctgaactgagggtcagtgggaggggagactgggggtgtggaggtgaggagcttagctaggtagatgggaggtcagggagccaagcacaggacgagcagtgctgagtggagagcctgagtggggcctgcttctggtgctgtggctggaatgcacacctttgctctgctccgtccttctttccccgcgtcttccttcctctggtgttgtgtccggggcctacctcccacaccttacagccttccatcggccatcggtggagtggggctgccacccctgagactcttccagtctgaagttgctgccatgcccacttcctcacaccagctcacgccctcgggctgtgcccaagccgcctccgacctgcatgtgcctgtctggccttcatgtgctgtgctgtgtgtatgaagttctgatttctttgtcacctgtctgtgtcagcaccttctgactgtgcatggagaactgttagattggggcagtgggaggggagagtggaacttctctattttgatttctggttggtggtgggtcctcactttggagtcttgccttggaagagacgacatgatggtccttgctttggggccctggcttgggaggggatgggggtatacgaaggaagataattctctaaaggacgctgggcccattccaggaacttggcttcttcccttgattattggctcctggctggggctcccatcttgcatcagaccccaaatagagaagagcatggacctgcagtctactgtctatggaggggttctggctgcagtctgatctgaccatgagtgggacgtgagccgtgcccagatctggctgactagggaaatgtggcaaagcctagcctaggctgcctgcgctggggtacagcacctcctgggctcatggtgcagagtgtcagtcaagttgtcaagtccttccctggttctttctctccagtgcttcgctcgcagcgcatcacttaacacaggaaacagggagctagcacagaacaaaagaagggactttgaggggcagggtggaagagagggcctggatgtctctgcaaggtgcccagtcctttctggaagctctatagagacaggctctaacctgcccacaacccagggagagttgggaagggagccagatgctgtcattagagctgctactgcccagatggaatgttctccgggtttcttagtgtgccctgcagagctgatgcaggagtgccgggtgtgtgtgcctgatgagccaccagcagggtatcatctgtgtgtataagagacagaagtagagttgacggggttgtagactgaggggagtgtgagtatgaggcctgatgaagcagtgaggtcccatgtccctgtccagtgataccctggttccagagaggtcatcacagaaatgggacggcccccagcccaatttctttgagcaaatccttggggatgcgggagagggaggagccagccagaacctgttctttggaggaggaagcagggtgggtttagcagaggactttgtccagtcaggaggaggaggaggaggaggagccatcagagcctggtggttgctaggttactgaggagcagtggctccacccctcgtggagcagaggagggtgggtgcatgacgtcaggtggagctggtgcggcggccactgaggctgccgtcagcctaagctggcgaagtaggccgggggcctcccgagtgcctctccggtgcctgccggagcctggccatccccaccgtgcaccactgggggcttctgcatctgagctgcagccgttcgccagctggggagctgccgggccggggagctgaggctgcattgttgggatttgatacactaatctcctgtctccgccgcctttccctctgttcggtctcttgccctccctcccttggcctgtccttcctcctctttcctctcctggctttctttggttttctgcaatgatgagacaggcaccgacagcccgaaaggtactcttgcttgctctggtcctgctgccaggttgccagtgtgatggtggcagcgggcgctggggtgggggtgggggctgctcgacttgctctgtctggttgggggacaaggatggggatgaaggtgggggggggcgcagggagagtgtgtgtcactgccatgccccacaccctgggcgtttgctccctagccttcctgctcttggctctgaatctgtgttttgggccttgtacccagtggcctcaccagcttgagcttcaggcagcttttgctgcaaactggctctggatgtgtttcctaggagggaatctggggaagcaggtccagatgtctttgtgcctctagcaagcctacctcactcgacctttgctagaatgacacttggttgcaatactagcatccctccccgactggggtctgtatcaggggctttctctagaacagtttgtgacacatagttatggaggcttaacccagggtagtagaggtgggggttggtttccctaggagacctagaagggcccaggccaaatcttgtgtttgccagagctctgagcccctgggtatcaagaatactgtctgggagttggagttaatcatctgtttatcactttgcaatagtctggggtggttgatctccgatctggtgtagggcagtagtttccctatgctgctgcctacccccacctcctttcttgcagccgggtggggtcactttgctgagctctgggcttctggctaatgcaatattcatggtcgtgacacctgagccctctgccatggggatggggactgctgcaggaactggtcctggggaagcgggtggggtgggccgtatggccgcactgtgctcccttggggacctgatctcccctagctggtttcatatcactcctaggcttgtatcatcattcttgtcacgtggtatttctcaggagtcctgtgtggaatctagcactctaaggaaggggctgacctgggaaagtccttgggagtggtggatgggcggggctctgggctggagtgggagaggtggttgtgggaggactcctctctggcctctggagaccctctctaccagctgctggctttggtctcacatggctcagcctgggagatggggacagaatttccagggtgtccgaaggggtgaggcctacaagggtaggacagaagtgggagaaggaaccagtgggaaataggagttccatcctgaagtaagatcaaggtgactcacgggaaggagggcacggggccgggttggggaggagggggggactgctgactggagcctcgtggctgctgcttctgctctcattgctgtcccttctgctgtctgtctttctgccattaccctttctttcctgactactcctcctctggctcctgtcgcctgtccagactacaactcggcggcccaaggtgaggaaaaaacaggcctctgtaccagccactgctaagtggacacagatttcttaggcgtgtgcatgtatgtggcccttttgtatgagcaagtgtaagttggtcacagcgtgtcctgggttcccttaagaggagtgagggttctgagggtaaggacaggtccctcctgggaaagtggcttccagctcttaggagcatgtctgagccagcagcttgagtgtagaagagaaccgagagtggttgtggttagccaaggcagactttcttgaagaagggcctcttcttccagctgcttttgaccggcttttggcgggtgcgtatgtgtgtgtgtgtgttgctggggaagaggcagggaattagaagaaatgtgaaaaagaacttggaatgtaaatgtcaggggctatggaggtgggtgtgtctgtgaaaggccttgtgcgggggcgtccgtggatagcatgtggtctctgggtgtcagcccactgggagggctttagggctcggcgctacagggaggagcactgggcaggcctgtctgctctagcacctcagctccacagggacccgggtactgtcacctgattagagcccctctgtcctggaggagggaggtgacagatgggttggcggtacggaccttgtttcagaggagagccaaggattacaactttcaccctggcccttttacttgcaggatcccctaaaatagaccagggggaggaggatgagcttgatggtttatcaaagtgtagagcccaggacccccagttttagcccagccttctctgagagcgtgaaaattagagatcagtctgttctttctctctgggaatgacactgaggcgcttgttccctctgggggaggtgggtacaggcccagagcaacagtagcactgggaatattaagaaattgctacatgattacaagtgggtcacaaaaggaatggtcaagggagtgagggcttctgccctagcagggtagtgctagaccttggaggaatgtggggtcagtgccaagggaggagtctgataatcgtatgtcttcttccgtccctccctcccccgccatccccccacccaaatcccgcccggccctttgtcactgcctctgactgtggcgctttccctctgcccttcactgcttctctgttctctctgtcctgtgattttgcctttttccttctctgtcacttccttcaccatatgctcatattctgtctcactctctttcactacccctgtcccctgcactttttctggtctgcccctgccctctcggaatagcccacccgcccagccagcactggggtagctggggccagtggttccctgggcccctctggctcagcatcagcaggtgagctgagcagcagtgagcctagcaccccagctcagactccgctggcagcacccatcatccccacgccggccctcacctctcctggagcagcactcccacttccttccccctctaaggtaagctctgggtttggagcaaagaagaaccaagacacaaaggggcctgtgacccctgagagggtcttagaagtttcccgggttgggggagacccagaaccttggattagaagggtgggatcccagcatataagtatcccattcctgactaagccaccctttcctctctgcccttcttctacacttcccccatagggattgggctcttcacagatacttgtatgccacttgctttggccctggacctggactgttacctgcacacattcctgtccttgctctccagcttcgtcttgatggggaaaagcggggaggctatgcacggactgaagggtctctcctttgcaggaagaggaggggctgagggcccaggtgcgggacctggaggagaagctggagaccctgcggctgaaacgtgtagaagacaaggcgaaactaaaagagctggagaagcacaagatccagctggagcaggtgcaggaatggagaagcaaaatgcaggagcagcaggcagacctgcagcggcgcctcaaggaggctcggaaggtgggacctgggatgaggagggtgtctggggaggcacggggccaaggaggtgtgctgggagctgggaccggagcctggactgtcctgtgagaaggtacgtgaggcatctctgtgattgcacccccaccctccacttctcttcaggaagccaaggaggccctagaggcaaaggaacgctacatggaggagatggctgacactgctgatgccatcgagatggccactctggacaaggagatggctgaagaacgggctgagtcactacagcaggaggccgaggtgctgagggagcgtgtggaagagcttactactgacttggaaatcctcaaagctgagattgaagagaagggtaaggggccaggagctgccgggggccagatgatggggttggacccctgactgaaagtatgaatggtcttccccaggctcagatggtgccgcatccagttatcagctcaagcagcttgaggagcagaatgcccgcttaaaggatgccctagtgaggtagggtcctctcattgacaggctcactctcctgtctccagatctgtgagtgacttgatacctggtctttctcctcctctctcgccattttcccacagaatgcgggatctttcttcctcagagaagcaggagcacgtgaaactccagaagctcatggaaaagaagaaccaagagctggaagttgtgaggcaacagcgggagcgtctgcaggaggagctgagccaggcagagcgcaccattgatgagctcaaggagcaggtctgagcagcccaaccgcttgcccagagcactgtgaggctcgccttccgatgtctcctctgtcttggcacctttcagtccttctccttgtttgctctgtctgacacaggtagatgctgctctgggggctgaggagatggtagagacgctgacagaccggaacctggatctggaagagaaagtgcgcaaattgaaggagacggtgggggacttggtaagagaagagagactgctcacttacaaccttgatggagggtgtttggaagagacttgccgtgagaagggttgacgtgatccctgatctttgagtagggtgtgtactgagtgcacccaccctgactctgacttttctttgccccaactaccttgtggtctcccaggaagcaataaacgaaatgaacgatgaactgcaggagaatgcacgcgagacggaactggagctgcgggagcagctagatatggcaggtgcccaggtacgggacgcccagaagcgtgtggaagcggcccaggagacagtcgcagactatcagcagaccatcaagaagtaccgccagctgactgcccacctgcaggtgcctgcacacccactgctctctgcccacggtcgccctggggcttcccccgtgactcagctgtgtcttgtcgcccatccttgctcccaggacgtgaatcgggcactgacaaaccagcaggaagcgtctgtggagaggcagcagcagccacctccagagacttttgacttcaagatcaagtttgcagagactaaggctcatgctaaggtcaggaaagtgggtgagctggagaggggtgggtgttggagaccccagcctgggtgtggccgtgggctgatctgctgcggggttctggccttgaggttcctggagttgggagtgctttgtgcggtggtttggaagactggcctgggcctgtcctagaagcaggagacacattggaacgcggcatggaggtcaggagggtctccgcagcctagctgagagcccacccccctgtctcccacgcaggcaattgagatggagctgaggcagatggaggtggcccaggccaaccggcacatgtccctgctgacagccttcatgcccgacagcttccttcggccgggcggggaccacgactgcgtcctggtgctgctgctcatgcctcgactcatttgcaaggtgcggtctgtcggccactttcccagcagaggtctgctgagctggcaatgagccaggcactggggatgccaagcaaaggtggcagtcattgtcctgctctcagggtttatgatgtagtacagggatgcagaatcacagacagatgtgtgttacagatgacgttttatgaaggggagatgcaggatgtgaagtggaggtagtgtctgggggagagcacagctggggagctgatggagacagtgggctattactgaaggagtaccatttgaggtgagacccagaagatgactggaattcgtggggggatagctgtcaggatcacgctctagttggaaaggcagtgggagcagcagctttatggtgggaaggagctggtcccactggtcctggtgtcctgtcagcccgcatccaaatcttcatcagtaccagcggtcacatcaccctttgcccatgtgcggctccctgcccatctaagagctgtttgtgctttctctcccgtgtcttcatgccctccacatagttgctcagctctctatagtcctgagtctgtgttctccatcctctgctctgagccccatgtctctggtgcttcttcccacaggcagagctaatccggaagcaggcccaggaaaagtttgaactaagtgagagctgttcagagcggccaggacttcgaggcgctgcaggggagcagctcagctttgctgctgggctggtgtattcactgagtttgctgcaggccacactccatcgttacgagcagtaagtgatccctggcctccacggcagggccatgggtcccagattggctggaagtgaggtcgccttgtagactctggcctcacagggccctcctctggtctccagtgccctctctcagtgtagtgtggacgtgtataagaaggtgggcagcctctaccctgagatgagtgcccacgaacgctccctggacttcctcattgagctgctgcacaaggatcagctggatgagactgtcaacgtagagcctctcaccaaggccatcaagtactaccaggtctggggcgagaattgaggcttagcacaggaggagggagggtttcttcccaggctgaaggcgcgaaactcttagatgaactcaccttaggatgcagctccttgagggttttggattctttcatacctctggagtcccttgatgactggggctcaaactgaagtttgggaagaatgctgtgttcctccaaggcctaaagactgttcatttgccatccctcctcagcatctatacagcatccaccttgctgaacaacctgaggacagtaccatgcagctggctgaccacattaaggtgaggtgtttgggccaatggttgagccccttatagaaatcagaaatgaaagacatcagatcacaccctcaaagggtgtcacataagactggaacagggtcactaaggccagatcagggaagctagagagctcacttatggatggggtcagcaaagggtggagacttcctttagagatgttaatgggggcagaagggccccgctggaggctgacagccacctgcttctgtcttcacagtttacccagagtgccctggactgcatgagtgtggaggtggggcggctgcgggccttcttgcaggtgagagcacaaccagatctgtcggagttcctcttccttcggagtccccacctccttgcccccggccctaattctgacttggcttcccgtctgtctcctgttctgagtagggtgggcaggaggcttcagatattgccctcctgctccgggacctggaaacttcatgcagtgatacccggcagttctgcaagaagatccggcggcggatgccagggacggatgcgcctgggatcccagctgcactggcctttggaccacaggtgtagggctgtgcagggggacgggaaggaaactgagcagaaccaggaggggcgcagtatgtcgagacctggatcccgtcagggggcaggaatggttctgaggtagctgggcgctgtggtattgagcccagagtgggctcctgactccggcccgttgcacaggtgtccgacacactcctcgactgcagaaagcacttgacgtgggtggtggcagtgctgcaggaggtggcagcagctgctgcccagctcattgccccactggcagagaacgagggactgcctgtggctgccctggaggagctggctttcaaagcaagcgagcaggtgggctgggttggctgggcagaaggtgatgggagagtcaggtggccagtgtggggttttcactactgcctttgacacctgcagatctacgggaccccctccagtaacccctatgagtgtctgcgccagtcatgcagcctcctcatcagcactatgaataagttggccacagccatgcaggagggagagtacgatgctgagcggccccctagcaaggtgggtagctccttggagggaactgcaggggccaggaggagcagggtttggggaactgctgctcagtgtgggagggcgggggggcagggatttggggaacaccttcctcttgcttaaaaggcaaggaggaagattttctgtttgactggatccctctgaaaggagagccttgataaccctgccctctgcccctcactctgtccattagcctcccccagttgagctgcgggctgcagctcttcgtgcagagatcatggatgctgaaggcctgggtttgaagcttgaggatcgagagacagttattaaagagctgaagaagtcactgaagatcaaggtgagaataggggaggctcaggatctgaaaggccaggaaatagggggcacagggaggcagtgagtgttgattataactgagaggggttgaggactgaggggaagacgtggcacctgtgatcagtgggagttcttgtggcagcttgctatctcatggtatgtcccaggtctcgggttgggggcggtcatgggaagtgtaaggcaactggacacgctccatcctcgtccagggggaagagctcagtgaggccaacgtgcggctgagcctcctggagaagaagctggacagtgctgccaaggatgcagatgagcgcattgagaaagtccagactcggctggaggagacccagacgctgctgcggaagaaggagaagtcaggcacctccccggcccctgttcactccaccctccctcctgcgagcagctccctgcctgctaacccaggccctctcagagtgagcccccccagggggacagaggccatctccttcccagctgacagcaccattgtctcatcccgatctgagcctcttctgcccctggctcctggccagcagggctgcccttaggacctgtcgggacagagaaatgggtgcggggccattggggaggggacactgcccaagcccaggttctctttcacagagagtttgaggagaccatggatgcacttcaggctgacatcgaccagctggaggcagagaaggcagagttaaagcagcgattgaacagccagtccaagcgcacgattgaggggctccgggggccccctccctcgggtattgccaccctggtctctggcattgctgggggtgagtgccgtggagcaggcagcaccagcccagaggagattgaatgtccccactcctgtccttggtctctgtttgacttttctcccctaccctgctccgcccacagctggatgttgagccaggaactcgcttgcccagtttcactctgtggcaactttcaccaagtttttacttcttctgaagatgtgtgcagagttcctttggccaaggtggggctgtggggcctcaccaaggcgtcagtgaaactcagaattccagtagctctccctcctgggtctgccgtctggcctttctgtccccaccctgtattccaggaggtcatcagcctgcagcagactggggcacctgctgtggtatccagtggtgcctggtgctgctcttgactcttcctctgtgggggcactgcattttctccagagttcacatcgcttcaccctacagtatggtcctctcttccagtgctgaattctcccacttccacttggggcttctgttctgacctttgcctgctctcttagtgtggtcagggctccttccctggaggttttccagcttccaggcctagcctcccagtttcctgacaaggaggtggccactgctgtcttggttctcctctactatgtagtatggtttttgttcgctctttagtttcttacttccccttctcacctccagaagacaaactccttgaaatggaattaaatctgcaggatctctagaactcccctgctgtgcttgtcttgtcagttggcctcacctagggtcttgtcctcgtcaaagcccccgtcactggtgctgcttgactctgaaaagtcaccaagtatcttcttgtctttagactcctgtgagtcagacggttctgtgttcttggaatgggacagaattaccatattgtgtggttttagcgtaggctttttttttttttcagttgcactaggtctttgtgcgatagacgggctcctctagttgcggtgtgtaggttcagtagccttgcagcatgcgggatctttgttctttgacaaggaattaaacatgcatttcctgcactggaaggcggattctcaaccactggaccaccaagggaatcctagcataggctctttaaacaaatactggttcttttttttttttttttaataatttcacttattcatttattttcagctgtgctgggtctttgttgctgcacagactctctctagtgagcgggagctgcttgtcgttgcagtgcacaggcttctcgttgcagtggcttctcttgttgtgcagcatgggctctggggcacgtgggcgtcactggttgcaacacgggggctcagtagttgcattttgcaggctccagagcacagaccagttgttggggctcatgggcttagctgctctgcagcacatgggatctccccggaccagggatcgaacccatgtctcctgcattggcaggcggattctttgtcactgagccaccagggaagccccaaatatcagtttttaatttctaaaactttgcactaagaaagggtgacttttgtctcagagcaatagggaacatgaagaaacgggtatgtgtcttcatgctcagttaagttttgccggtggggagcactaagggtgcagacgtttcagggtctcaggagcggtccatctgcccttctgggagatggagtgtagggcagggacagcctcgtgcctcaagtgtttgctcaacgctcactgccactgccactcttcctcacatgttgcagcttgtatcgtggcctgactgccctttctatctttctttcacacatatttgctctttccccgaacgtaaaggcaggattttgttagagaaggtatggtgataaggaaaaatgttttcctgcatgaccaggattcttctggtgtgtccccctcaccaccataccatctaattcctctctcctcttttcctgctcccccatgggctgtcttgagtgcagaagaacaacaacgaggtagagagccaaccttctgggggtgttaacagggttggtgggaattggggcgtggggagcagggcgagactgccgccttgagagccatcaagactggaggtagcaggggataaggaagggggatgggtaggaatggaacccatcttcaacccttcccacctggcactcatgacatttgttgtggtccccataggaggtgcccctgggcaggctccagggtctgtgccaggcccagggctggtgaaggactcaccactgctgcttcagcagatctctgccatgaggctgcacatctcccagctccagcacgagaacagcaccctcaaggtgaggaggtcacagagagggtaagtgcctcactgatgatagacgctagggcgggctgtcacttcttaccaccactcttccctctttgttcacagggagcccagatgaaggcatccttagcagccctgccccctctgcacgtggccaaactctctctcccgccccacgagggccctggcagcgagcttgctgctggagcgctgtatcgtaagaccaaccagctgctggagacattgaatcagttgagcgcacgcacacacgtagtggacatcactcgctccaaccctggtatggacctacccactcctgagacgagaaccacagcccctgcccctgcctcagggatgtagtccccgcctaggcacttcccacaccagaaaggctcttcgtagccctgttctttggtctcagtgttcagtgtgcttgaggcaggcagctggactggatgacgggtcactagtcaagctgcctgcctgcgccttggcgggcctcactagccttctctccccacagctgccaagagcccgtcggcccagctcctggagcaggtgactcagctcaagtccctaagcgacaccattgagaagctcaaggttagtttagacctgcctttcctcacccaggaatgcacacttcagagcattctgtgctggaggccctagcgagcatggtcatttccaccaggacccccggggcccctaggggtccagccctgtactaggtgacacgttgcaaaggaggtgggagggaagacagggttcctgccttgggagttcactcccgaacagattctctcaatagaaaagagattcttagcagcaaaacgggttgagctaggatcatcttcagtgtagtgcagctctctgtcagagctgagatcactgcagagtagaatggttgagaatggcttcccagaagtaacagaatctgagatgaaccctgaaggttaagtatctataaagtaaggatgttgggtagggatgggattggagttgagagcaaaggtatggtgataaaagagaactgggtccctgtccttggtattagtattcctgtgaagccagggagatactgggctaacctgtggagggtcccctaaatgactcctgtttccccatctgccaggatgaggttcttaaggagactgtatctcagcgccctggagccacggtccccactgactttgccaccttcccttcatcagccttcctcagggtaagagggagcatggggagggggtgggcagtgaaggctcagatgagtccttgccctctcctccagaattcgaagaggcttctggaggtctcagatccaacgactgaatttcttaagtcatctggccatgtcttaacttggaagtaacttaacagtgcttgcaatgctttccgaaattccagtatttttagcagttaaacatcatctgtgatttctggcaccaggagagactcaaaactcccttgtcaggctatgtgcctcaattctgatttggaaagcgtggtcattatagcctaggagcctcaaagcccccgtctcccagggtctcgggtgctcagggaccttgtcagtggcacacagctcaagtgagcccctgacctggcggcttctgtcccttcccaattcccaggccaaggaagagcagcaggatgacactgtgtacatgggcaaagtgaccttctcgtgcgcggctggccttgggcagcgacaccggctggtgctcacccaggagcagctgcaccagctccacgaccgcctcatctcctaaatgcttcttccttcactgcctgctcctgcccgcagccctcctggagctgctcctcctgatgcctagccaccgggcagccccccgggaggactgcgtgtgtaagctgttcctgctccactcggctccacgcccaccttctgcgccctgccccggccccttgacccgggttcccgtttcccttccctggcctctgccagagttcactgttcagttgctcccttcctgaggagcttcaggggctctcgggggtaggtaggttgagaccccacaaccaaaggttgaatgagatctctccgactgaggacttcactccttgattaaagccacttctgcttcagtgttgtctgtgtgatgttgggagtgggaattgggccacttgacccagagcaggagtggaggagaaggggtgctgagaaggctctggctgtgccgatttgaagatctccctctttcgtgaccagtggaatgctctgtccctcaaatttgtgtgcagttaagtt

SEQ ID NO: 59 - DNA, 14350 bp, Hippotragus equinus
  source 1..14350: mol_type = genomic DNA
gactgaggattatgcaacatggtccaaccggagcggccagcatgaccagctgtccaggggctgcctcctgccttttcttttgtaaagacaagacccttgggagttttaattctgttttgtacttgccctgtggggcctccactgcttttctatgggagacactcttaatttaacagatgagaatattttgaaactctggctctgactctgtcctcattttttccttagtttttttgtaagaacagattataatttaaatcctacttctgtggtagagagtgcttagactgtctgttacactgtgtatgtctctttcagtgctgcctcttccccaggaaacagcagaggccacacagagtacaacagcatttaatggtcagaaacagttgtacagtattacagtcagccacagaagctgtgctggaggacaggacccaatcctcccccacaccaggcaaagcagtattgggcaggagctggcatgtggctgggccatgtcctcatccctgtggcctaaggggagaccaccatttaatatccccagcttccactactcttcagaggagggggtgtaagccccacatgcaagaagcccttgcccccagtgtcaaatgggacgcaagagttacgattaaggggaaaccctgtgtaaggtattaatagagttcaaaggggtagggattacccctgtcctcaatcacccaaaggtgctcactttcccagcttcttcatccgttcatcaatgttggcaaagttcccctcaattgtggacaggttttcacgcatcgtcgtctgcacctagaaagcaagacagctgtttcagtctgtcaggttcaggtgcttacctgggtgaggccctgaagaaattctctgagagaagacgaagacgtgcaggagaattccctggtggtccagtggttaggactctgcactttgactgctggggcccaggttcagtccctggtgggggaactaagatcccacgagctgcacaacaaagccaaattagaaaaaaaaaaatggaaacagcttgtgggcccgagaatgggaaggtgacttggagcaccatggacctagcatgggatgtgctaaacaggcaggcctcttaagaattcctatcctgactttaaccagaacagttctttcatctgttttatgtactgagggacaaacaggattttgttgaagtaagggtttcactcgtccgaagttttaaaaaactgctctggaggaagaacctaccatgccaagcactttaatttattttggcagtcctgtgatgccagaatcccaactgtagtgcatcccccagcatcgagaacagtgcctctgccagaacctgaagacttgctctgtgctgggcactgcttagagaatggagaggtgacgctcacagctcagcatcagaaaggaaggggcaaaaccaggtgggagcctggctccagatttcaatgcccatgttctgtctagtgtgctgtgctcagcaacatctggttgaggacccagggaggataaaagccagctgagactacagagggaaaaggtaggttttataggaagaatggaggtttactgagctcttaccaattcactcatatcacttcatttaatccacataactctgaagtaggtatagtttgccagatggtgagatggaggttcataggttaaataagttgtcagatgtcccatggtaactaagaaacagtatggagactcaaccaaacccctgccacaccactgtgccaccaaatgggccaaggcagaaccctctggagctgaagctggagaaccttgcctgtgtgtgctggggaagggaggcactcacctgagtcaagagggtggcattgtccttgagggaacaagtaatcatctgctgcgtggtatccaagtgtgtcagaagctgaccaaactgcatggctgtgaaaggtcagaacaataggcatggcattagaatccaagaccagagggaagggaacaagagttgctcactttccattcctcttgacaccccttgtggctggcctcccaccttgttcatgcagctgcttgatggtgacaagtctctgtaccagctcaggaagggaggtggcaatggggctccagcgctgtatggtttcatacagctggtgcacctggagggacaacacagtggcaaacttcagccaaatacaccccattaggatgagacaagtgcaagctggggcaacaaggaagcactgccttatctcagctggtaagagcttatgaggacagtggccttaggattcagtgctctcatgctttgctcttcccagcaggaagagtacatgaaggaggaggaaagggtatgaagatgggaggaaagttctcttcctgaccttgctctgtgtatctgcatcctctacagaagctttatgcttggcaatctcattcacttttcccagcacactctgaaagcacagattttaaggttgatagtaaaggcatcaaggtcttccaaagtcactagctgcctgtaatccaatttgcctccacttaatacctgtaaccgagcctccacttggtccaaaactgcaaggtccagggcgcccaccttcgcctgcaatagctctacagtatcctgggggcggggtcaggacaagtgtcatgaagcagacagaatcagactagaaaaggacacctcatattccactgaaggtaatgaataaacagctacagatccaaaaacaattttctaagcaaacgcaatcctgatatcccctctgtcatccaaagactccagttccttttacactcaccatgaggcaggctccctgcagacctgctgaaaggggattctgatggggaaaagaagcaaagaagtcagtggttctcatctctccaggtgattaccaccttctcccatcctttctggttccagtaggcaactgctggctgctcctgtaactagaacctgttcctgactcctccctagattctgtggaatgctgtggaccttagggctcaggatgtgagggttggaacaagtataagagagcacctgacctgagcatcctgatcacagcgtacagtggcttccagctctgtcaggcgcttctcgagttctgccacctaggggaggaaagagggtagatttgccatccacctacttcccttctgctgcagtgggaggtaaaccttgctctttgctggtctgcttgccctcccctcccctctccccaccactctgccaagggatttctttctctggaacacagccctagtcacagtcttaaatgagacatcaagaggaatcaagcattcccagcaccctctccccagatgtgattccttggagggcagcaggaaagtctccggagccacgtcttccctggccccttaaccaacattacatgcatccacacacatacacaaacacacacaaaaacatactttggcagcttgagagaacttgtcctgctcaggccgagaatgcagttcataagtgaccaagctgctatctgggggagtcccactggtggtcttgccccctgaaccagtccctttgctgttttttgttgcttccagctgcagcagtaggcgcctggatcaaaaacccagcaatattatcatgacttgaaggatgtgggtcagcccagtcacttgtttctgcctcagggtcagcattaaagaacagctaggccacctctccccttcgcagccctgtcaatacctggctggagtccctctacaccccaattagcaatgatttcccagcaaagtctggcacccacttagccagagctccatcggggtcagtaaggttgattgcggcatctggtcccagcagcttctccagatgggaagcaaccagctgctgcttcagggtggccagctgtttagccaacaccacaggggtcagcttctcctcagtggctgcttccttcactgtcgtctggtatgaaaacaaatagacagtgaggggtgctaagagtgagtcaagagaaaaaagatcaagacccttaaagatagctgtgactaaaagtcactgggctgctcctcacccacttacagtactaactataaattcatgtgcattcccaaactctgaaaacctcagcccccttagggaggagcttagggaatccttctcctcccgttgggaggccttcctctgctatgtaagtcatagcagaagggcgagaggagtctagttaccttgattttttcaacttcagttgtcagctcttggacctcatgcagtagtctctggtacttttgctggggtgtctcctttactcccagaccctctccaagctagagagcaagcacagacggtgacatcacacctcctacaacagggaacctcaagaatgttatttaaaaacaaacaaacaagaatgtatccaaacccagtctgagtttgtaagagtatcatatccaaatccagtctgagtttgtaaggttattatacccaactaagaatccaccatcatcctcactcagaagacctgcagagagctggaggcctggggacactccatagccaatagcagggggacaaaacatcctcccctgcatccagctgggcttctgaggagccccaaccagagaggaacccagaatcccacctatatccctgctctgtcttaaatgcccactggataggatcgctgcactattcccatcaacacacaaacaacaaaccatctcatattctccagattcatatcccgttcttttggtttttccaattcgatctgagaaatctgccaagaaaagaagatggaattgagggcctgatcaagacccacggcagtcatgatctcagtgactgtgagggcttccataagacagctctttccccagagcaaatgtcagtgaggcctgaggtcaggcttccccatccaatttccaaccagtctcaccaagtccctttgtgcccactctcttgtctttgaacttgtcataggcagcattgggattgacaatgatgtgctccacactggtactcgtcagctcctcctgcagaaacaggtagttcaggccaggggcagattcattcccactctagaacttcccagagccccccaaatccccaaaccattaggagactgggctctactctccccaggggaaagaaggacagctccaatccaagctatcgacccaggttcaccctaggaaatgaaagcttcctgctaagtttggagtctcagttgtataaatattaacagcctgattcaactgggaacagaggcagcataacctccccacccattctgtacataagcctcctcatcccctccccttccccaatctaactgggccctcccagttatctggcaacacgatgcactcagggcaagaaaccaacctgacctcttttaacctccccctcccaaaagtaaatttccttgctgctgaggaagtccattttcaagctaacctcccatccttgctggagggaaagaggagcaatcaggctactagctcttgagtatcagaacttgcatgtgctgctaaagggaagataacagcttttagatacaaaagaagtttggcagaggacctggccagatgccatttccagactgccatgaagtcagggaattcaggggatagagagaagaggcagatactgtgttatatttaaagggacatcttagaagcaacagcataagctatacctggttgccaagaatacccatcagcaaaggccacaggtacattctgaaacagagatagccctgcttcttctcaaagagaagctgcagcactggcctcttctccctgaccctctgctgtttctcaagcactgaagctctttcataggagggggcgtggtaaacaaagttaaagaaacttcaccctagaaactgaggcagaaaggttccctccttactagtttatctgttagcggttcagagtctaataactacaccaaaaccaagtcctccagactgcatgtctctccttcaattgtcagcagtccaacaggtctcatcatgcttctggaggaagtggaaggagacctggaaagcctttttcttggagtggacatcaccttctactggagaaaggcaaagaaagtcttctttcttttaaccagaacaatggttctcaaccctgcctgcataatcgaatcacttagaaaaggggtaggggagaaaagagggatgggctcacctccatagatctgattgaattgttctgaggtagggccagggtaggaggccagtttaaaagctacccaggtcattctaatatgtatccaggactgagactctctgtcagtgggtactaggggttgatggggcgcggggagaggttatgatggagagacatggagaaagcagcagacgcaagctccacccttcatctctgctctgctattactgaaggaatcagtgtgagtggcagatttataaacaagggaggaggcaggtaaggagaaaacatcaactgtgctttttacctcttcagggaagtgctgggcagaggggcaagagctaaaaaagattaaggggaaataaaaggtttcaaagtcccatatgaaagtgcctatgggaaaaaacaactgagtcacaaattctctcaatcttctctgtagtgttatggccagagcacccactggtcaagtaactgtggtctcaggcctctaaaaagtgtgtgtctgagatggattcatgttcaggaaagaacattaccctctttcaagttcaccctcaagaataagaatatgccactcctccctctgacaatgaggtagggaaaagggaaaaaaacctctttagaaggcacagtctacagactaaggaaagcaatcacagctaccgttttgttaagcacttactacggcccaggcactacgcagatgagaacatactttcttatttagttttctaaagagggaatgtgtggagtaaaaaagggtcaccactagagtgtgagtgtcggagcttctggacatagcagggacggtcagtaatttcatcttactagtcctgctgcaggagcacgtcctggggcagaagggctacccagcgctggcaccctcccggagcctctctgagggtgtggctccggaggctcaggtggacagcacacttgagcccttcagaggcaccgactctgccttggaggtctgccttggagtgtcttggaggtctgggggcatgggctagaggtagtgtcattacggtgattcatgagatgggaaaaggtcagctggggttggggctgaatagcggaacagaagatttagtagagacaaaaggacagagaacaactgtccatcatagcacaccccgttaaaaagcagatgaaaggtaaggcttcttaccagctccttgtggtttccccagaggtgagaaaatcaaaagagttaaaggaaagggatggggaaatgggggtgagggagggaaaaaaaaaaagacaaaattgttattagcaaattgtcacatgcactacacgacagtcttcaaatatactgcatctcagggcccaggggagcctagcaaaatttggggcctagccaagaaatttcagctggggtcactgcataccccaagagaaagaagagcttgggaccctgtcctctctggtggtcaggatgtcatgatgctttgccgtgaacagcagcaattcaggatcacctgggaactaagggttaggtgttgcaagccagtggcacggaagaaagtgggggcaaagaaggctcggggaggcagggagaagctgtagaaacggcagaatgtgaagcagaggctgtggagataagagtctgagggcttgtagctgattgagggtccatgattctcaagggaagtaattcatggctcaagtcttcctgtctctcggtttctctaattttgaagaattaggcatttgaatggcagaatcaatcataatgcgggtgcttatgtaggtggtttcatgtgactttgtgttaagcagaacaaagtgaactttctagattatagatggtaagttcaatgaaatgcaaagtacctaactgcaggcccatcctcattcagtcgccagaggagaggcagggcaaatcctggtcccttgtgtagtctggtgtgtttgtatccatcttgagtgcttggaaactcaccctacactctgagggatccagagcaactctgccatgatgtgctagcacacagtccaaaagacacccagattcacagctaccagacatgtgcagaacatatttcttcaacccactgttcacaggggttggagggtatacaatggggaaaagtaagagtctttcaaaaagaggccttattttagcccaagccacacagataaggctccacttccagcaagactggttaaagaattgccagggaaggacggatatatgtgtatgaaaagacatgatgggataaaaacaactacattctgccccagagatttcagctagatgcatcagaacttcaacctctagcccagccaagactcctctctcagttcagggcagaggtggatccaggtcctgtggtctaaggctgggatatctctgcagaatcactttacccttctcttgcctcaccaagctaaagccagcttgattaaaaactcaagggaaaagagaggacaatcggccataagttcaagtccaagtcatgaggaatgggggaggacagaaaaatttaaaaaggaaaagtggtatatgcatatcaatttgtaaatcatacataccacctccaagtctgacctacggttgggttgggaaatgagatttttgggataacgtctgtaacctggagtagtaacaatctctatgggagcctactacacccagccaacttgattagaattctaagtgccttgatcccaggtacatgactccccagtccctctcattaataatctcccagactccccagggctgtttggctaagtggctgtgcctcagagggcaagacctgaggttctagatcagaaacaggaagaggtcactgccgctcgctcccttagcctgtttaggctctttgccaacaccacagccagggggacttcagtaccatgaggacaaggaagatggatagtgctgtagaataaaactgtccaggatggaccaacacagtgctgaccatccaaccatttctaaaggaggggtacagaaacaggaagacttgtggaagcacaaaaaaatccaagttagtcccttaaaatgcatataacatccctttcctagcccatttacttcctctaaaaccttagcataagagaatattaagatgaagttttcatcttaatcaggtataatccacacactgctaagaagtgaggactgctgctgtccccccgttcttaacccttgtccagaatggctaaaagtcattccttttctcttaactccatttcagtttgtggaggagaaaggcaacccccttccaactcctgctcttaaattcctcacgtccagaagtgttcctagtttccatgcttctatcccatcctccactggacagttttattctgcagacgtcacaaggggaagacacaatgatgcatgaatcatagttgtgtttctaaaccttgattaagaatctttaaccatgaggccagcagggcccttagtaacccggctagagatgcattagaatttaaaacaattagctgcgacaacagcacagtgagagcattgcatgcgagatggcaaatgaaaaaaaaacatgcagaggaagaagcattgaatggtcttacttgtgcaaactagtgtccaggcaaggtggtgaggagggaggatgggggaagcattaggaaaaactcaggtaagttccagtgcgccaacagtcaatgaacacaatcaagcatactctgtgatatcccaaactgtaaggaagagaacttactatttcccatctcaggctggtggagggtctggtatcatttaccctttggagaactgaaggccctgccagggccccaccaagctaaggctaggtcattttcccccttccacatggcatcaggataggcatggcatagagggaggaactaatcctgtttctagcgagtttctaaacttactcccccttgctccagcacttcaaaagtggggagaagaatgcctatacagacccaagcgtaggctgtgggctcagtggggagggaattccagctgagaattagctttcctgacaagacattttaagaaaagtttccaaaaagctcatggcccaaatcaacccaggagtgtctgatatgcagaggggatcctcctacaccgaggaggaaagggctagcctgtgtggttttctggcccattcactttagaatattttagctcctgctaaatttgttttaaagggatagcagaaaaatcaggaccatttttacctaaaataaaaccttctactatttcctcttccatccttcccactatgggaattgcaaacttttccgtttaagttaaactagcaattacaatcttttgggtgtattacagggtattatttccttcggcagcccgatttcttccatagcggagcaattgaaggaagaaggtgaaaagacagggaaggtcgtcaataacctttgattacttctttagataaaaatctggagaccgccctgaaaggttccattaagaagttgaccaaattggttgtctccagggaggaactgaccattggcaggcagcagtgggaagagacactttttgttctatgtacatatattacctactttaaaaactaataaaattaaagttccaaataatctggagactaaggcagagcatgctcttgctggagttaagaaggtgactgaaacctcatggttcagccacaatagtggtggtgtgcagtgtgacccatgctgggtcttgggaaggtaagtgagaaggggaccagctgctagtgagaatccaggcctcaaggaaatgaggatgctggattgtctaagtacaaccaactgctcctcaagttgcacacttacgtcagtatcaagggcagtggcagaaccattagtcagctgacttcccaaaagctgcgctcgtaaggcccacagggacatgcaggggccagagacattagctgccatcagggaacgtctcaggcctcccccactcccgccagggctcctgaagtagctgagagtctcccgaccctactcactcctccccagtgacagtgtcattctgctgacccttaggtgatggaggcaacttagctcctcttgtgtttaccatccagttcttatctacttctacactggtattctggctacatgctgcaggaaatgaacatcagcccatcagacaccttgccagatgctactaaaacaggatgctcaggttcagcagggagaaacagccaatcagggcagaagagtcaggttcttccatgcctgggatgaaggtcatgctctttttattaagagatagcccatgatttcaaatggaaaattacaatttattttttggtttggaaaggggactgctatgatattacctgtttgatcatggtcagtgacaaagggacaaaggtccattcattatttcaccatgaaggcttgatattttataggcagagccctaggctacagctgaacagtctctgaactatggtagcagaatggagtcctcagtatatatactcctgccctttgagtcagagatagcttcctaataagatacctcttagagtgaaggtgcaaacttaggtcctgagcaatgacaccacctgcattatttccagatactcaagtttgggggacagactgacatgccagcaagtacagaagcaacaagaacacaccactcagagaggggataaagaaggtgttccccacaaagaaggaaccacttctacacgggggaatcaaataaggaataagtgagtacgccaagccatacattataagccagcaaccagcattctccagaactaaccagccccacagacgtagccacaggactcacagacacacatacagagcctgtttccactgactcttagtcagcacttttttgagatctcataccatcaatgtgaccctagcccagctctccttgcaaattatagaacctaaaatacatcctataagacatgtgaacagatctttgctccccttggcacttacactcagggtttccactatgttcacttcattcactcagttttttctttcatgtttcctatatgtatcctaactccctcattagtctgggggacttttgagggaagggacatttttccctctgtactgcacaaaaatcaacacaaaatgaacacattcaataaacaatgctaagtggtttcccttatggttaaaatgtgtccatagctaattccttcctcttgagttcttcctgaatctgaaagtgctatcaagtcctctcctctgctgatatgaaatatttatgttcttcttcaaattccttctgctctgactagctctcttatctttctgaagtctccaattcattttccttgcctagtggattctggatactcacgtaaaatcacgtatagtattcctctatacttcaaagtctagcttgttaggatgttaatgaacattgagtgagagatatattttatgaaatagaaggtctaggtcttaaactcatgcactttttaagtgcgcaggcttcatgacgcattaccatggactagcactaccagggctaagtcactagcacccagcccgttttgaaatatttcaattttatttaaaaggcctaagtatcaggcctcttagttttaattccactgacctgactctccttcctggcattgctcatttgcaagtcctacaacctacgtaccacccaggctgggttggcatacccgcttattgttgtggctcgccagaaaagggaaagggcctgcctgggagagagatcagaatccacaggagtcctgaggcaccacatagtcttaccgcatcaaactctgcttgatcatcctcaggcaggtcgcttgtttcataaacatctggctcgttcctggcctgcaggtagaagcagtgaccatccaacctcactacccagtactacccagcaacacccctgaccccactccatttgaacaagttaacagagaagtcaggctgtgatgccaggattctgccccttctttcacctgccgggtgaactgcatgtcatttcccatgtcttaacggggggggggggggggggatataacagtggagatgactgatggtaaatggtgagtgttaagtgatgacaaagatgttgccctgaatctgaagaatgacgggtcctgggcaatcagaagtaggagaggagccatcattaggccctgcacacactaccctggcacaagggctgagagtgactcaggaccttagtacacaaggtcctattccaaccccccaccccgtgaatgcaagtaaggcaacacaaagggaggtacattccggcatgtgcggggcttgggaaggaggttccctagaggacaagagttctctatctggggttctgtcacggtaacctcctcactctgcagagtgaaggccatcaccaaatggcctggtttgtgtgtctgaggtgggggtgaggggcttatgggactatctggggagacacgggaggtgtagacacggatggtaataagcactagagaccatttccgggccgagaaaccggcgactgccggaaaggggccttgtaggccttcgcatagcccagcccagtcgggtcggagtccgaaaggtgctggggccggtcagggagctagaggcaggagccctcggggctgaagaggggtgcaggcgggaaaggtcacgggttggtgtctgttaggggtctttaggaggttgggggcgcggtcttggggagccagagccggccgtgtactcacaatgccgggaaggtcggcgtacttagggtccgccatggcggcggcgaggcagggttgggggaccggggcctcggcagagccggggccggtgctcgggtaggggagaggatgggtcctggtccgcgttaaggcggccgcaaagggagcggcggaggaggcggaggagcaggaagtctcgcgacaggagtagtacaggggaagggtgaagcaaaagtcgcgagaacagcccgctaccacacccctggagaggcagggattggcgagaacgaggccgggaatgaggtaatggcaggaaaccgccgcctaggattgtgggatatgcagtcttggcccacccagcttgggcggggaccgacgttaacgcgctttggcagctgtgtcacataacttattttctttcgtctttatagcgagtctgtgaaagagcttttacaattcctgtttttcggtggataaatttatttttcagtcgctaactcctgtctgctgctaagtcgcttcagtcgtatccgactctgtgcgaccccacagacggc

SEQ ID NO: 60 - DNA, 190221 bp, Hippotragus equinus
  source 1..190221: mol_type = genomic DNA
gctgcaagaacacggacccagccatcccgggcggcagagcacagccccctcggccaagcctaacttccatttcctttccttcctttttgggagagctaggctccccccacgcgctcggttatcttattttcctgagcctcgccaggtcgctggcctctctctgcgtccttctgatcatgtggaccccgcggcagccgtgcagtcacggccggcggctgggtccctccacgccccattcttcctcttggctcccgcgggccggagctgcgttctgaagaccgggttcccgcggcgattgacgcgctgggggaggagcggtttcttgctgcgcgcctctcaggagcattacggctgggctcgttcccggctccggccgccagccccagcctcccgggtccggagcgaggactggaggaggcggcgagggagggagcgcgagcgaggaggcacgcgcccgcctgcccgtccgcgcccagagcgctgccgccgccttagcagccatggccgagcgtcgcgccttcgcccagaagatcagcaggtaaatctggggcatgtggcgcgccgcggcagtcggaggaagagcccgagagtcctcccgggcccggcctaggaggcgggtgggtgtggcgacgggggcgccgggatcccgcggcctggtcggctgctgggcggaggggccaaggggactcgccggggctgccgaggcctcgcgcggcgctcctgcctcggccctcagccctcgcctaccccgggggcgcagagagccccgcgcgcacgcctccgccggctcctcggccgcccgggcctggagtttggcggcggcttattgaaaggcaggcggggtaagctcggcggctggccgctccgcgcttcccgaattctttgtgtccccacccccaggctggccggggccctttccctctctccgcccaccctcggctctccccaggagggtgcggggggtccgccctcgtctccaccccaacaaaaggttcggtgcgcgacggactcccggcggaggagggaggccgcccctccttaacgccccttcacccttcccagaaatctgacacgaatcctctttgcacccgggggtcttgttcagagtgggcgcgtgcacccagaatggaaaacgtacggccagaataaaaagttgagaacctgtgctttgcaccttcggtgtgcagctgcaggatccgccggattgtacgctggagcttgatcctgctagcgtgtgaatgtaaattaccctgtgtttctcgtagctccggagaaagatggatgataggcagtgttctttatacgccggccctttgactcgtgttttaggagtctaggcgtaaaaagtaaacgatcaaggctgagttttcttttacctacttgtggtgagaatgttgccgcttttctcccctctaaaactaaaaattgaattacggtggaggattctaatatttgtagactttgtgaaatatacgaatgtatacgacactagacattctgttaattatgaagtcgcaagaaaagaaacattcgaatatattactttttcgacaattctatttccttgactctggatctttttagtttactgttatttaagatttttttttttgcctgccaaacaggtcttttcttaactatctgaacttccatagtgttactctattttggttacgtttttcatttaaaactaacatctctttaagctttgtgcttttttttttttctttcgaactttagaacatatttcatttcctcaggaggcaaaatagcaaatgcttaagagcatagaggctcagtctatgacatgggctgaaatcctgattgttactttctaagttaacaccttggccaaattgattaagttctcttaagctttagttttaagctggtctggataatgggtaaaaacaaatcaaaaacgtgtacccagctcatagacttgttgtaaacattgtggataatttgtgtaaaggttttagtatggtgtatagctcctgctagctatcactgaacccttaaaataagtagtataatctagggagctgtgatagacttaataggaatttattacttaataggaaattattacttttgttctttttttgtaaaataatttgatcttgtttctgaaggtagtgccatttaaaaatagatatattacttgacatgcatgctaagtattaatttctcttaaatagagccaaaagcttatctctgagaacactgtgctgatcaggaaagtgcacattagggagttaggtatgaaatgtatacaatgtctggtctccagtcatgggatttgtcctcagatagatatgacaaaacacaagaaaaaaagataaccagttttgcaaaacaacagaaaattcaaattaacattaccttgtaaagttataaaagtacatgaggcaatagaaatgaagatacatgaattgactggagagatattcagacgtaggcatgcagtgattgatgattgtttggatatggaaggtgaggaagactgaagagtctgggaggacatccaagtttctgatttgagcatctgggttagaggcaattgttgaggtaagggagtgcaggagggggaaggggcctgagagtgggaagtgtggtgtactggagatgttaatttagttttgtacttgttagttttgaagtgctgtggagcactcaaagcgaaatgtctgtgaggctgttggtacaggtttaaggtgcagaagagagattgagttgaaggtctagatttgggagtaatcagcaagtagactgtagttaaagcagaggaggaggtgagatagttcaggaggaatgctcggacttaatttggagggaagaccaaggacagaacagcttatctggtcattgtgaatgaaaggtactttcttcctaggaaaacacggctgaataaattcctgttctgcttcttaatttcctaccatgggaagtatagtacagtttgaaaacaaactgcctggtttgacatcctagcactgcccctcatagagtaaacttgggcaagttatttccccacagttttacctcattttccctatctataaaatggagttaatggtatatggactcaccttataggatggttgtaagagttgaataaattcgtacccgtgaagtgcttataagtgcttttttgataatgagtgcccagtaagtatcactttttaaaaattatgggatttatagaatggcttaggaccatttcttgaaagtaataatcctttttatgatgtacctgtatgaactttgttgctctgtgagaagcctgttgctatctgaaaacttacttttctttttcaaaggtttatggttttttaaaaacctttactttaaaaagaattatactggtctctttcctggctcagttatttcctagccctttgcttttagtgcttttgttttttgaggctgtgattggtgatttcttgaagctctttattctgtatcactgattgcactgctaacctcagctcatcatagaaaagcagacttcatgtcaagtactgcctcttgtctgttctccccgcttttggagaacaagacaaacgctttgttaacctttgtaatcactccctcgtatataatgagcttcccaggtggctcagttggaaaaaatccacctgccagtgcaggagatgtggattcagtccctggtccaggaagatttcatggagaaagaaatggcaactcaactccagtactcttgcctggagaaccccttggacagaggagcccggcgggctacagttgatagggtcgcaaagagtcggacatgatttagggactgaacaacagcaacgtataatgggtgcaatttatggaatgttgtttgtagataaatgatctaggactttgtttggattattttgtcctgtcacttgatattcagctgtaatgataaacatttgtgtatacttaaaacactttttaccacgttctcatcttcataacccagaaggcagaagaacacagaacagaatgtaggctctaggtcacatcctcaggttgaaattctgcttttacgaataatagctgtgtaattctgggcagttgacctaacctttgtcttggtttgcttatcagtaaagtggagctagaaatctctatagggttaatttgaggattaattgagataatacatgtaaaacacaaacctgtgcctgaaacatagcatttaaaaatattagctgctgctattattcctatattatttagcattcgtataatctagatgcagaactgaggcctactaggagaatgagattatttgtcttatttgaggctcaaatcctagttctatgattgcagatgttcagttcagttcagttgctcagtcgtgtccgactctttgcaaccccatgaatcgcagcacgccaggcctccttgtctatcaccaactcccggagttcactcagactcacgtccattgagtcagtgatgccatccagccatctcatcctcggtcgtccccttctcctcctgcccccaatccctcccagcatcagagtcttttccaatgagtcaactcttcgcatgaggtggccaaagtactggagtttcagctttagcatcattccttccaaagaagtcccagggctgacctcctttagaatggactggttagatctccttgcagtccaagggactctcaagagtcttctccaacaccacagttcaaaagcatcaattcttcagcgctcagctttcttcacagtccagctctcacctccatacataactactggaaaaaccatagctttgactagacggaccttagtcagcaaagtaatatctctgcttttgaatatactatctaggttgataccatctgcagtgattttggagcccaaaaaataaagtctgacactgtttccactgtttccccatctatttcccatgaagttttgggaccagatgccatgatcttcgttttctgatgttgagctttaagccaactttttcactctcctctttcactttcatcaagaggctttttagttcctcttcactttctgccataagggtgatgtcatctgcatatcggaggttattgagctttctccctgcaatcttgattccagcttgtgtttcttccagtccagtgtttctcatgatgtactctgcatataagttaaataagcagggtgacaatatacagccttgacgtactccttttcctatttggaaccagtcgttgttctgtgtccagttctaactgttgcttcctgacctgcatacaggtttctcaagaggcaggtcaggtggtctggtattcccatctctttcagaattttccacagtttcttgtgatccacacagtcaaagactttggcatagtcaataaagcagaaatagatgtttttctggaactctcttgctttttccatgatccagcggatgttggcaatttgatctctggttcctctgccttttctaaaaccagcttgaacatcaggaagttcacagttcaagtattgctgaagcctggcttggagaattttgagcattactttactagcatgtgagatgagtgcaattgtgcggtagtttgagcattctttggcattgcctttctttgggattggaatgaaaactgaccttttccagtcctgtggttaaacccttactatttgtattttctttctgcaagatattttctgtagtagttctagattttctaacagtgctgctattagtatccccaaagttacccttgctttcttaatctttgttaatttggtatcattttgctgcccaagaagcagaatttaatgaaagatttcatcagatctttatttctgaggaaaatcttacatgagtaggattttctggatataagcttatttataacctcagtttttttttagtcttgaatctgttcataaccctggctggatagccccaatcttttaatgtactttgttcaattcattttgtcactcctgatcaaagtagatcatttccacatagtatcaactgtttcagtgctgcctgtttcattactttagacacatataccacctccctgaccttctgttgtgctcatctccctaaatgttaatggtgaatatctaacctctttcttgctcctgagctgcagaatagtgttagaaggggactagagtagtccagagttgatcttttattaattaatgtcttctcatttgaaatgaggtttattccaaataatttctcttatttactatctttgtttacctactccatcttttactgaaaattttgggactatatcacatggtgctgtgctgtgctaagtcgcctcagttgtgtgaccccatggactgtagccctctaggctcctctgtccatggaattctccaggcaagaatacaaaagtgggttgccatgccctcctcaggggagcttcctgacctaggaattgaacctgcgtcttttatatctcctatgttggcaggcagattatttaccgttagcatatgggaagccgccataccacgtgagtccttcattttaacctggacacatgactgtcccagtatgtcgttcagccgtccttctcgaacccgaaaggtgtcttgtccctaaaacttacctattttattgtattttgaagcctgtatcttggcacctactcccaactttgatctcacaattttccctttcctttgtagcatcttcagtctgttctttttcatggatgtttcccttaagccatgagacttatcatgcctttctcatcataaaacaagaactgttgcgtcttctggcatttctagctgccaaccaatcattcctttttcttttatagtcacctttctcacatgtctgtggtatagtgacgactacttcctgcttgttctccttctcatcaatcttgtagcaatatggcagtgcttaccatgctaccttatgtgtacttgaattgtagacctcttgagaattaggagtggttgacttttttcttttgttcatcactgatttcaagtgctgcagttttttatttatttatttttaaatgtctcatgcttgctctcctttttccgttccccttcttttctactgctttcagagctctttgaggactggcctaggtctttttggcttcccaggtggcacagtggtaaagaatctgcctagcagtgcaggagacgccagtttgatcccagggttgggaaaatcccctggagtagaaattggcaacctattccagtacttttgcctggaaaatcccatggatagaggagcctggtggctccatggtgtctgcactcctgtacagtccattgggttgcaaaagcgttgagcacaatttagcaactacacgtcaataatccctccttatcctgaactcacccacactgatggatcttcaaaagtataagtgaggaactcctttcttacttcaccatctaatcttttttttttttttttttaaccatctaatctttataattccatggacagaggaacctggcaagccacagtccaggtggttgcaaagagttggacataactgagcacacacacactaggtctttttatctccagtgcttagcacataatcttgtgtaaactggacatctaaaaagtgtatgagtgaataccatcctgccacctgaatcatctttcataacttcacttacagataaccacaataagtttgtagcttatctagtccctccctcctctattacaaatgtgtttcaaatgaattctccctaaaacacagcttttatcatagcatgctgctgctgctgctaagtcacttcagttgtgtccgactctgtgcgaccccatagacggcctcctaccaggctcctctgtccctgggtttctccaggcaagaacactggagtgggttgccatttccttctccagtgcatgaaaatgaaaagtgaaagtgaagttgctcagtcgtatccgactcctagtgaccccatggactgcagcctaccaggctcctctgtccatgggattttccaggcaagagtaatggaatggggtgccattgccttttccttatcatggcatacttatgttcaataatgtatacgtagtgacttcttatggggttaaatccaaacccctgcttgcattttaaaagtcatctataatctggtctttctcttgttgcttattcttgagtttacattttggactagtcaatctggtgttttcactttacccccacaatgctctgctcatttccatctctataacagttcctgttgtttttgatatatgctgccttttctcttttaaatcttaccctttggttcagagtactccaagctgctgtcctgacatttgggataaccatttccttgcttttctttatttttaccgcctacgaatgcatccataggagaaggcagtggcatccataagtaatttaatttagaaaatttttgaattcatttaaatagaatcatactgtatgtttgtatgctgttctatcttttgctcaaaattgtatctgtgagattcagccatgatgttacaggcagttgaagttcattcattttcattgcttaatattttccattgtataaacataaccacagttttccattctacagtagatggacatttgggttgtttccatttttttaaaaaattattttacaaatacaccaaaatcatgcaacgctgccagcagtggatgcagttctgggccacaagtctgcacattcctttgcaactggtcctgtgatggcagaacctttcatctcgcctttgttgtttactgtgacccccgcattatcttcaaaataaagaaacacaacatcttttctccggtatgagtttcattgtcaaattaccactgctggatgttccttctttctgagctctggtttgcctttcttgactgtggccatcaccatgtcacccacaccagcagcaggaagtctattcaatcgtcccttgatccccttcacagagatgatatacagatttttggctccagcacagttgatcacggctccaaccgggagacccaagaaatccggaattttgcaccagaggacccaccacgtcctcgcttcaacatcctgaaggccggaaagggacaaaaaggactgtttccaatttttgactattagaaacaatgctgctatgagcattcctacacgtatattctggtacatatgttcatgagtttttctagggtatactcaggtgtggagttgctgggtcttgattgcttgttgtagcaattttatttatcgtcaaatttgttaggcaatgccaaactttttaaagatagatgtacaaatttacactcccacatgttgctttacatagttaccatcacttggttttgctaactttctaatttttgccagtctgatggatgcatgctgctatcttattgtaaaagttttaacgcatatttatttgattactaatgagattgagccctgtttttgtatgtttattgaccatttgcatttactcttttgtaaattacctaattaagtagtttgccattttctttctttgtttcttccctttgggttctttttcttactgatttttgtgagtaccttacatatattcagtagattagttatttattgattttacattttgcaactatcttcatacactatggtttgtttttaatccttttactggaaccttttgaaaactaagctttaatgcagtataacagggttttttttaatgtatagtacttttggggtcttatttaagaaatattttattaccctgaggtcattcatatatcatatatttatcataaactttgtaattacctcctttgtatttaggtttatattccacctggacttgatatgtgtatggagtgaaaattttatttttttcagaatggattctcctttcgccattgatctgtcctgccatctctataaatatgtgtgtgtccttatttgtgggtcttttttatggactctattttgttccattgatttggttatacatcttttcattaattataaacagttttcattataataagctttggaatttggtaggataactctttccaccttaaaaaagtgtcctagctgctcttcagttcagttcagttcagttcagttcagttgctcagtcgtgtccgactctttgcaaccccatgaatcgcttcacgccaggcctccctgtctatcaccaactcccggagttcactcagactcacgtccatcgagtcagtgatgccatccaaccatctcatcctctgtggtccccttctcctcctgcccccaatccctcccagcatcagagtcttttccaatgagtcaactcttcgcatgaggtggccaaagtactggaggtttagctttagcatcagtccttccaaagaacacccagggctgatctccttcagagtggactggttggatctccttgcagcccaagggattctcaagagtcttctccaacaccacagttcaaaagcatcaattcttcggcgctctgccttcttcacagtccaactctcacatccacacatgaccactggaaaaaccatagccttgactagacagacctttgttggcaaagtaatgtctctgcttttcaatagctgctcttagctttttgaatttctgtatatattttagaatctaccaaaaacaaacaaaacctcccaaatctttggtgacctaaacgggaaggaaatccagggaagaagggttatatgtgtatgtgtggctgattcactttgctgtacaacagaaactgagataaattgtaaagcaactatattttataccatctacaaaatggcaacccactttgtattttattttttttaaaacaaatttttttaatcaatatttaataatgatccttgattctttgaaatgggcaaaggcttttcaactctggatggtcctcaggtcctccaaaaaacaaaacaaaacaccaccgccccaaatgaaaaacggccaagtccttttagaatttgattggtattgctttgaatctatgtatcagtttgtggaagaaatgatatttttatgttactgactttccaattcatgattgtggtgcgtgtctccatttatttaggtctttatatcacacaatgagggcttccctagtgactcagacagtaaagcatctgtttgcagtgcaggagacctgggttcgatccctgggttgggaagatcccctggagaatgaaatggcagccccctccagtattcttgcctggaaaatcccatggaccatggagcctggtaggctactgtccatggggttgcaaagagtcgaactgagcgactttcactttcactttttatcacacaatgaaattttatagttctctctgcaaggttttgcatatcttttttagatttatttttaggtatgtatcagtgataaaccttgctgggcttcccaggtgactcagtggtatagaatccgcctaccagtgcagaagacatgggttcagtccctgggttgagaagataccctggagaaagaaatggcaacccactccaatattcttgcctagaaaatcccatggacagaggagcttagggggctatagtccatggggtcacaaaagagtcaggcatgactcagtgactaataaataatatcttgctaaactcttgttaaatctaaaaatgtgtattcctttgtattttctttttcttttatgagacaggatgctcaggactggtgcactgggatgaccctgagggatgggatggggagggaggtgggagggagggatggggaacacatgtacacccatggctgattcatgtgaatgtatggcaaaaaccaccacaatattgaaaagtaattagcctccaattaaaataaattaaaaaaaaggaaaaaatatagacctaggtacagtgatgggtagccttgccctccaggtttgttatatcaaattaattttgcacaaaggaattggttttaaggggcagaatgtactgacaatttgtagttttacttagttatagacattggttgctattttacactgataatgtctgctccagttttttacttttagtctgtatcttttgttttgcttcttatttatactttttctttacaattaaaaaatgaaagcataccttgaagaaaataatacaataataatgaaaataattatactctttactcaggaaaaaaattgttttaattgaaatttaataataatccttgattctttaaaatgggcacaggctcttcaactctggatcgtcctcaagctgttatacaacagcattgtgggactgattcaaccagaactgttatactttctcaggaaaacacagggtcagtctttttcaggaggcttaatattccaacttcgtacttgataaacctctgttacaggacagactaaagctgaaggggaagattaggctgcagtcaacctacttactgccctgtggccttgtttattctatgtacatagctgtatcatatgaaaatcagggattttgttgtatctttttgaaacttgtagctggtttatttttttgtgttgatctgcatattattaccttgtattactgtatagatttttaatatcatttctattcaacattgtattaatattgagtgtctttgccgacaaactctgccgacaaaggtccatatagtcaaagctatggtttttccagttgtcatgtacagatgtgagagttagaccataaagaaagctgagcactgaagaattgatgcttttgaattgtggtgctagagaagactcttaagagtcccctgtacttcagggagatcaaactaatcaattgtaaagggaatcagtcctgaatattcattggaaggactgatgctgaagctgaagctccaatactttggccacctgatgtgaagagctgactcattggaaaagaccctgatgctgaaggcaaaaggaaaagggggcagcagaggataagatggttagatagcataaccaactcaatggaatgaatctgaacaaactctggaagatggtgaagaacaggagagcctggtatgttgcagtctatggggttgcaaagaattggatacaacttagcaactgaacaacaacatcctcagtttgtttataatctcaaaatgttttcacttagtattaagccttatggttattgtaggtttttgtagatctctttcggtttgggttccctagaaaacagatgctgagacaaagataaagagttgagactttctgggaggcataatcctagagcattagaagagaaaagggaagtgaagcagagaaagatgggaaacaatgtaaggtaatatcttatctccttggccactgcttcacaaagagctaggaggagattgtttggcacgtgtgcttgctaggccatacaggatatcactggacagcagaatagttcctcagatctgcagatggggctctgaaagaagaggaaattcatctgcctgcttttctcctgaattttcctaactcagagttagttccctttcctttctgggttgcatcttttggacccctttgtcaaccactcgagatgtcccacgactttttcagtggccttttatagaagagacttcttggtttcaggtgacagaacctcaaagcagattcacttgcacgtacaaaaagttgctgactaatgtaactgagtatgtttggtccagtgatgttcatataggcttcttatcttcttgtcttggctagattttcccatagagttgtaacaaaagggttacagtggaattgacagtcccaggctctaatcctgcaagtgcagttgtggcagaaaaggtttaggaactcagttattggtctggcttggaccacattactataatccttccttgaaccaattattatatttagggatgcaggggactctgaccagtcctgggtagtatgtcctctatggcttgggggacagatatgatggtgtcagcaacattcaacctcaaaaaatgagttccttatcaaaaaggagtttataaccaaaagaaggaggatcagagagctggtccccaaaacaactgatactctttgaaactagtcatttgaagttgtgtagcatcactataatcatttaaatatatagctgtatagtcagctcgactacctgctaaaatttaaagtaactggtgaagtacaaaaagaaaaccagggtaacctgatgccagctgtggatcccatctcttagctttaagtttagttctcaccttaatgccaactctgggctttcctggtggctcagctggtagagaatcttcctgcaatgctgaagacctgggtttgatccctgggttgggaagatcctctggagaagggaacagctacccacttcagtattctggcctggagaattccatggattagtccatagggtcgcaaagagtcagacatgactgaatgactttcacttaatgccagctcagcacctcccaaggaggtctgcttggttcttgttttctggctttcccatgcttctttctgcacctgcactcctgcatcatccttaggtgttccgtatttgtcctgtgacaccagaaaactgaacttctctgcgcgtgtcagcctattattgattttcagaaactttgctaaagatacagggatggtggtaaggggcctcagggtccaaagctttcttagtgatttcaccccaactcttctctttttcccatcatcaacattctttttttcactgtaagcagtttcttcctcttatctacatagagtagttccaatcatatccaaactcttaaaaaaaactttttaatttattttaatttttatggttattattcttatattttatttatttgtttttggctgcactgggtcttcgttgctgcacatgggctttctctagttgcagagagtggggtccactctgtagttgtggttcatgggcttctcaccgcggtagctcctcttgtggtggcacacagattctggagtgcaggcacagcagttgtggcgcacaggcttagctgtcccatggcgtgtgggatcctcctggaccaaatctgtgtcccctgcattggtaggcagactcttaaccactgaaccaccagggaagtcctcctttgtttttttctttaaacaaaacaggacaactttattgagctatgctttacataccatatacttaattcgttttaagtgtatcattcagtgatttttagtaaatttacaaagttatgaaaccatcactcagaatcctgttttagacctttttcattcccacctaggatgtttgtgccagtttatagtcactccttagtcccaccccaagctgtggcaacccctaatatacttttaagtctgtcactttctctctaaatttgccttttctgaaagtatcatataagtggaatcatacaatacatggccttttgtgtctggcttctttcacttaatataacttttcaaagcttgtcatgtattggtactgacattgtggttttgatttgcatttccttaatgattagtgatatttttcctgtgcttattaaccatttacatatcttattggtgaaatatctattaaaatcttttgctcatttttgaattagattatcttatttttgagttgcaagagttctttatacattttagatacaggtcctttattagatatatgatttgcaaatattttctcctgtctggtttgttttttcattttcttactggtgaattttgaagcacaaaaactttaaattttgatgaagtctaattcagtaattttctttttgtggattatgattttggtgttgttatctaagactgcataattcatgcttagggtttccttctctgttttcttctagaagttttagcttttacttttggtttatgatccattttgcattaatttttgtgcatggtgtgcgatgagggtctaaattcatcttttgcatgtgaatgttcagttgttgcagtagtctttgttggaaagaccatcttctcattgaattgccttcataccttgtcaaaaatcatggatctgtatatctgtccttgaaatatcaaaccggaagtgtctttcagctttttttttctttttgaaaattgttttttacatttctgtaagcattttaggatcagtatcaacatgaattttgccaattctgataaggattttaggattctgataaagattacattgaatcagaaaactaagatcatggcatctggtcctatcacttcatgggaaatagatggggaaacagtggaaacagtgtcagactttattttttggggctgaaaatcactgcagatggtgattgcagccatgaaattaaaagacgctcactccttggaaggaaagttacgaccaacctagacagcatactcaaaagcagagacattactttgccaacaaaggtctgtctagtcaaggctatggtttttccagtagttatgtatggatgtgagagttggaccgtgaagaaggctgagggccgaagaattgatgcttttgaactgtggtgttggagaagactcttgagagtcccttggactgcaaggagatccaaccagtccatcctaaaggagatcagccctgcgatttctttggaaggaatgatgctaaagctgaaactccagtactttggccacctcatgcgaagagttgactcattggaaaagactctgatgctgggagggattgggggcaggaggagaaggggacgacagaggatgagatggctggatggcatcaccaactcgatggatgtgagtttgggtgaactccgggagttggtgatggacagggaggcctagcgtgctgcaattcatggggttgcaaagagtcggacacgactgagcaactagactgactgactgacattgaatctgtagattagcttggagagagttgctatcagcaatattaagtctttagatccatgaaaacaggctgtgttttcatttatttagagctttattgatttctcttactaatattttaaagttttcagtgtgtaagtcttacacttttgttaaatctatttttaattttttattgtttttgatgttatcatgaatggaattaaagaattatttttggtgagtttgttgctagtatatagaaatgcaattgaattttgaatgttaaatttgtatcctctgaccttgctgaactcattgattaattctagaaatacttggtggattccttaaacttctctgcttataggatgtgttgtttgtgagtaaagagtttatttcttcctttccaatcttaatgcctttaatttcttcactttccttccctctttctctccctccctctttccctttcctccttctttccttcatttctccttttctcctttcccgaattccactgcctggatccttcggtatagtgttgaatagaaatggtgagaatgcacatccttgctttcattccagtcttaggaggaaagcatttcactattaagtttaactatttaagttaactatataaaagtttaagttaaacatttaactattacctgcctacagataatgttatgtaacagataatgttacagataatcttcatgactcagataaccatgatggtgtgatcactcacctagagccagacatcctggagtgtgaagtcaagtgggctttaggaagcatcattaccaacaaagctagtacaggtgatggaattccggttgagctatttgaaatcctaaaagatgatgctgtgaaagtgctgcattcaatatgccagcaaattgggaaaactcagcagtggccacagggcaggaaaaggtcagttttcattccaatcccaaagaaaggcaatgccaaagaatgtttaaactactgcacaattgcactcatcccacatgctagcaaagtaatgctcaaaattctccaagccaggcttcaacagtatgtgaaccatgaacttccagatgttcaagctggttttagaaaaggcagaggaaccagagataaaattgccagcatctattggatcatcgaaaaaacaatagagtttagaaaaatatctacttttgctttattgactccggcaaagcctttgactgtgtggatcacaacaaactggaaaattcttcaagagatgggaataccagaccacctgacttgcatcctgagaaatctgtatgcaggtcaggaagcaacagttagactggacatggaacaacagactggttccaaatagggaaaggagtatgtcaaggctgtatattgtcaccttgcttattttacttatatgtagagtacatcatgtgaaatccatgctggatgaagcacaagctggaatcaagattcccgggagaaatatcaataacttcagatatgcagatgaacaccacccttatggcagaaagggaagaagaactagagccttttgatgaaagtgaaagaggagagtgaaaaagttggcttaaaactcaacattcagaaagctaagatcatgatatctggttccatcactgcatggcaaatagatggagaaacagtgaaaacagtcagagcctttattttgggttctaaagtcactgcacatggacactgccgccatgaaattaaaaggtgcttgctccttggaagaaaagctatgaccaatctagccagcatattaaaaagcagatacattactttgacaacaaatgtccatctagtgaaagctgtggtttttccagtattcatgtatggatgtgagatttgaactattgaacaaaagcattgaagaattgatgcttttgaactgtggtgttggagaagacttttgagagtcccttggactgtagggagatccaaccagtccatcctaaaggagatcagtcctgaatattcattggaaggactgatgctgaagctgaaactccagtactttggtcacttgatgtgaagaactgactcattataaaagagcctgatgctgggaaagattgaaggcaggagaatgagatggttggatggcaacaccgactctatggacatgagcttgagtaagctctaggagttggtaatggacagggagacctggtgtgctgcattccatggggttacaaagagttggacatgactaagcaactgaactgaactgaggcaggtagtgtaggaaggggaagcaggggacaaagatctgagaagtctttaagatgaacagagtttggcaactaattgtatacagtttacaccagaatataatttctgtgttatcttatcttggtcaaaattgtatacagtgttacagtttatgggtaaggagattctggctttattttcctgagtagaattaaggtatatttatctccttttgggaggattgacttttttacagtacacattttcccccttcagttttctttttagctgccgattttaggtcagtgataatttttacaaatactaagattttaaattttttttctatagtttatttaatatgttccacgaagtagggagcattgttaccaccatgttttaggtgaggaaattgagataatagtgaaatgctgtagatcagaatgatggagacctccaagtctttttaatacactgctttctgaatctttaacttaaatattatccccagatagtgtcagatgggatacatgagtcatctgacatccttttttttttttcattctgccccaaaaggaagtgaagtgaagtcgctcagtcgtgcccgattctttgcgaccccatggacagtagcctgcaccaagctcctccgtccatggggttttcaaggcaagaggactggagtgggttgccatttccttctccagggaatcttcccaacctagggatcgaacccaggtctctcacactgtagacagacgctttaccgtctgagccaccagggaagagtcaaactctgtcttaaatgtgaagtgtattatagagaaggattatttctgttctttggtttcacaaatcaactgtatgtgtttttgttttcttggacttttagtcattactggtccactgtggacctagattctttaagaatttaatgcaggataacttacaaatgacagtgcctcaggtgggagttttatttaaccattcatgaaagataggaaacagatcataccagtggtagtaattattatagtgttcctattaatatgttaatatgtgtcagacgttttcgctgggtatctttaactgacctcataggctagattttggagaatagagaaatcattaatatgaaatatttgttgtcgttcagtctctaagttgtgtccaactcttttgtgaccccaaggattgtagccagccaggctcctctgtccatgggactgtcccagggaggaatactggagtgggctgccattttcttctccaggggatcttcttgacccaggcatcgaacttacgtctcctgcattggcaggtggattctttaccactgagccaccagagaagcccagtatgaactataattagaattatttacctttggaaactttcttccatggaaagaggccttcagagttttatggatctgaattcgaacccagcatctacctttcataagcttgggaaagttgctctatttttgaaatttatctaaaaacgtctattttttcttgctgtagattagtatatagtaccgcaggaaatttggaaatacaaaaggcccaaaagagaaagtaaaaatcaccgtaattcttgatttagacaaaaatctctcaatgaagcttacattctagtgatgatctttgcagaccagaaattgcttaaatgtctaccagtagagagtggttaaatatgttgcagcgtatccatttcatggactcaatgttagataagaggagaacagtggttaagaataagtgctctaagttcagatcttagggctgttccttattggttaatatgacctgaacgtcttgaaatttcagtatcctcttatcgtacccacttcatagagtttttctgaagattaaatgagatataagaaatttaacactgtaaacagtatctggcacattgtaagtgcttggtaaacattgatagaatattatcattaattttatgtgctgatacagaaagattctcaagatatattaagtgtataatgtaagataccaagaaaaggttatgtaagatgttatatgtgagtattaaaaagtaagaatttcttatatacacacatctttttcttgaaggatcccgaataaaacattaagtggtcacatgtggggaatgggattggggattggaaagggtagagaaatagaccttttgtttctacttctttgtgaagtttgagttttatttaattaatttatttagttttggctgtaccacatggcatgtggaatcttcccggaccagggaaaatcaaacccatgctccttgcattgggagcacgaagtcttaaccactagaccaccaggggaagtgcaagtttgcatttttaataccatgtatgtgtgtgcatgctaaatcactccagttgtgtgcagactctccagcccccatgcactgccaggcttctcctccaggggaccttccccagccagggagccaacctgcatctcttacatctcatctcttaagtctcttgcagtggcaggtgggttctttaccactacatccacctgggatgccccggtaccatgtacattttccttttctttcttttttttttttttaaagatgtcgtcttcttttaccaagttgttttgtcttttctccatagtaggaaattttattttctctacttctcatagtaactgtacttatgtagtggtaaagagttttaagtgtagttctggaaccagccctttgcagatttgctaaagacctattagagactactttgagataagtaaacatattgtcttattaaaacattgtttaaaagaagagtttcacatagaataggagagcattacgattcagtagtagtttttaaacttaccacttaacaaatgggatagtaatgatgttactaggctcttaaagaaaaagttagatacatttagaactcttctgttgactcagacttttttcctccccagcaagtgcttacctgattatttgacagtaatagataaaaaggtatacttcttgtctcctttcagtcagttagaaaccaacaatacttacaggttaatttactctgataagcatttggaaagttcatgtactgggtagtctcttaagttcatccttttttcttacctccatttctttctctccacttttatacttttctctccattctactttctcccgttgccattgtctcattatcttagacattgaagatgtaaaggttaataagatgtaattcctgctctcaggaagttcatatcaattgttccattctagcattcttattgaactacttttttgggaggaggaattacgaatttttctctcagttcagtcactcagtcatgtctgtctctttgtgatcctgtggactgcagcaccccaggcttccctgtccatcaccaactcccagagcttgctcaaactcgtgtccatcaagccggtgatgccatccagccatttcatcctctgtcgtccccttctcctcctgtcttcaatctttctcagcatcagggtcttttcaaatgagtcagttcttcacatcaattggcgaaagtgttggagcttcagcttcagcatcagtccttccaatgaaatattcaggactgatttcctttaggatggactggtttgattttcttgctgtccaagggactctcaaaagtcttctccaataccacagttcaaaagcttcggtgtttagccttctttatggttcaactctcatattcatacatgactactggaaaaacggtagccttgactacatggatatttgttggcaaagtgacgtctctgctttttaacatgctgtctgggttggtcatagctattcttccaaggagcaagcgtcttttaatttcatgactgcagtcaccatctgcagtgattttggagaccaagaaaataaagtctgacactgtttccactgtttccccatctatttcccatgaagtgatggactggatgccatgatcttcgttttctgaatgttgagctttacgccagctttttcatcctcctctttcactttcatcaagaggctctttagtttctcttcactttgtgccatacgggtggtgtcatctgcatatctgaggttattgatatttctcctgacagtcttgatttcttcttgtgctcatccagccctggcattttgcatgatgtattctgcatgtaagttaaataagtatgataacaaaatacagccttgacataatcctttcccaatttggaaccagtgcattgttccacgtccagttctaactgttgtttcttgacctgcgtatagacttctcaggaggcaggtaaggtggtctggtattcccatctcttgtagaatttttcacagtttgttgtgatctacacaaagtctttggtgtagttaataaagcagaagtaggttttttttttttttaactctcttgcttttttgatgatccagcggatgttggcaatttgatctctggttcctctgcttttctaaatccagcttggacatctggaagttcacagttcatgtattgctgaagcctggcttggagaattttgagcattactttgctcgtgtgtgagataagtgcaattatgcagtagtttgaacattctttggcattgcgtttctttgggattggaatgaaaagtgacgttttccagttctgtggcaactgttgaattttccgaatttctctatttagtctcatatttttcacttcagctttttaaaccttattaagtacccagagtgttctaggcactctcctagagggtgctaagctaggtaaaactaattgcttcgttccttgtaaggagacaggtaaatagatttcagaacagtttgatacatgctattcatctgctcagttatcacaatgaggtagtttttgatcggaaagtgccgccagacagttaaaaacaatacacattttctttaatggcagaaattaacctcttttgagacatttatacaaaaaaagggacatactcctgtcagaattaaaggttctttggcttcagtcattccccaaggaggttgcaaaggtacctctgaaaagtgagtgtgccaggtctgagtagccaaatctttcatatttcaccagactctttttttcccccaccatacttttacgtttgtgggttgcattactaccattctagaaaaacctacattgcaatttatgtgcttctttcaaagagaatgtttacaaacattgggttttcccattgctgaaatcaagctctgtctgcaaggccaggttctcattccaccagggaaaacagtctgactagtccgccgcctatctgaacgagcctcctggaaacgccattactttggatgaatgaggataaacacaatgctttgaaagcacagaggatgagtgtctaacctgagtaaaagaggcagaattaatcaggaatgtacggaggatatgatacatttcttgaagagtatttgccatacctgtattccatatttggttttctagttttctctgttaaggcagaatggtaataactgaagagttttaagcccttaaggtaaattatagacctcatttgcctttctaaaatataaggacattttcctccgttattatcgtactgtttcccacattaaaaaaacactaattcttaattatgtaataccttgtccatgttcagatttctcattatccttagaaatatcttgttcaaaccaggatccagttaagaactattcattgtatttggttatgtttaagtcttcctttctctttttgaatagactttaattttagccttatgtttttttggtgctaaagcttagcccactgcgtttatttattcatcacactgacttgttaaagagacatgacttttcttttggtttttgtctgattgccttttttagtattgttaatactgttttctgtattttttgtgatctagatattagatatacaggtttgtttttgcttgtttttaaactttttattttatattggtgtatagttgactaactgttatgttagtcattttaaatatagcagtgtaaatgtcagttccaaactccctaactatccgtccccacctgtcctgccctgataaccacacacacacacacacacacacacacacacacacacacacacacacacgcacgcacacacacgcacacacacgcacacacttattacaaagcaggaatagactcacagatttaaaaagccaactaatggttacataggtctgattcagttcaggttagacaaatttggcgcaaatacttggaaggtgatacaatgttgcatctgtttatttatttttgcctctttttgtctttaataccaactatacgcaatggtccaactgtgattcagcctgttggtcatcagtcttggacttgtatagtcacagctttggagtatcatctgttcttaccttttttcttttggggctttttagctagccctttttgccttgtctttgatatgttcccttacctggtacattccatggtatattcccttacccttcttccctgagttctgtcttcaatataaacagtaccagttccaagagatattattcttatttgacatattacattgtggactttttttttggtaaactttataggagaagctcaactaacttcttttgttttagtctaaactctcctttggtttcccaggtggctcagtggtaaagaatccaccttccgtcttcacttgggcgtttcctctggtcccatgaagaataagtagagataagagaggcccagattaggcttggggcatttggaaatcatggttgatggggcatctgaaactgggatgaggttagatgaaaggttacatgcaacataattttccctttgtgaaccctttgttatttctaatgtctcatgatgaatggtcttagtgagtgcattttttttttttttttttggtaaaaactgtaacgcatgttgacatagtgagggagtttgtggaactggtcagagttggtaaggagataaataggtcaaatattggatcatgttcttcagggaggggaagaagatattctgctattataatttaagagcataagtaactgtgggatttttgacctctttccactttgctgttgatgttaatagcttattagaagtaaaaaggtttccttgtattgctttactatatgagctacattaggaataggaaaaattatcaaaaagctaatctatgataaaggcttttaactgatatcaggaactatatttattatattacttgtcatgcatactttggaccatggtgtagttaagagagttttctgtttgggaaaatttcctcaattactgttgaggaaatcttttcatgtagagagtcttaatataaatacatcctttgctgggttgcagatatttttattaccattatagctcagtttggaaatggttcttattttacaaatttttgctgcttttctcttgtggcgattaatggctctgtggagattgcatgtctctgttattaagcaaaagattgtctcttttggaagtaatatgttaagttttgtttcatttttttaccattttgtgaaatcagagtatgtctttcaattaattgatggtgtaatggttaattagcaaggtttttctttcttagctgtacctgaagtaacagcaagccctaacagttagtgagatcttgaccttgatgaaatatagcagtttacaattcagattactcatggtttagccacagaaacactgaaacacagaagtggtagtgttgcggttggcagactgagttaagtagcactgaggaaggtagagataaaatatttgttctcttgttctctgcctctctctctctctctctttaaaggcgttttcatattttcgtctcagtcttgacaagattgtaaggcctttaaaccaagcctaatgaacattcacagtggatgggtgtcattaaaagacctgaggggaaccataaactgaagtgactgttcccgtcctctcacatccaggtgctttccagattttgccctttgccctctcctcaatctgtattctccttcaaaggttaccttttctctttagctttcacctctgacctctagtggtttcttcatgctcttctcttcctcccttgtctgttgtcagtcttttttattcatttgctttaaaaaaaaaaaacctaagactttttggggagaagttttagatttaaagaagagtggaaagtgaagagatcacccatgtttgtaccccaatcaggtatcccctatcattaacatcttgggttaatgtgaaacctttgttataatagataagccaatattaatacattattactaaagtccaaaaattatattcggtttactctttgtgttgtgcattctttaggttttgacaaatgtactgtatatgtatctattataatagtatcatggagaatagtttcagtgccctaaaaaatcccctgtgcattacttattcatctcttccttttccttcctcctacaacccctggcagctgctcttttttttttttttctcctctccatactttgtcttttccagaatgtcatgtaggtggaatcatataataccttgtctctttcgcttagcaatattctcttttctttggcttgctagcacattttttttttttttttagttgctaaatagcattccattgtgtgaatgtactacagtttgtatatccttttacctgttgaataaacttccaacttttggcagttataaataataaattaattttttatgaaacacaaatatgatctaaagtacttcaagtaaagaaaaagttgagctaattcagtaccttgagccttaaaaaataacacttttacctttgtatcaaaaatttctaattgagtagtcagctcccaacagtgctcaagaggtatgtgtggagtggttgaatatgaaaaaggtaaggaagtatggaagagaaggaggctaaaggctatatcatataatattcagataatttttggaaaatgagattgtctagaaattcagttggaaatttgagtgggcactaagatgtgtagggctctgaattcaaccgttaatttgagaacactccagaacaaagtatcatcaagctggcccagaggtgaataaacatttctctgtttcaagtgccacaagccaaatattttagggaaaatagcagtaaatgaaaccattgcctctgtttatatagggcatacatgaatgtggaaaaaaactaggaaggagaaaaatgcgagttaggttatgatgaatgctctaagagttttaaagaaggatattattttagctgtggtgagtcaagaagcttttatggaagtcttgctgtttaagttttacctttaaaatagttgagttgaatttgcggatataggagagaaacagcattctaggaagcaatttatgtttgttgagaagaatttgagatagagtataaaagctgaagaggtgattagggtcaaagtatagaaagccattaataccagagtatgcaaacagtttttattagttaagtaaaaatagggaataattttatggggcatgaatattgtttataaagtattttagaattaattttatatccttaaaatttatatactttataatatatacttctttttttaaatttagattactgttcagccaaattaactttttttaaaaaattttatttttactttattttgctttacaatactgtattggttttgccatacattgacatgaatcagccatgggtgtacatgagttcccaatattatatactttataatatatacttcttatagctttcagctctatcataagccagaatatttccctgaaatgtcatatacaaaaagaagctttatgtaagttgactgtcagttttgtgccctgaatcagcattataaagacattctactataattataagcagtatttaccaaattagcttatgaatttataaccttactgatatgctgagattttgttgttctttaaatgaacttttaatatacttagctttctcccatttcaaattaagctgatttctttttgcaaacaatttatttgctttttttgttgcagaactgtggctgctgaagtcaggaagcagatctccggacagtatagtggctctccccagctgctcaaaaacctcaacattgttggcaatatatcccatcataccacagtaagtaatttgtttaagatatggtatgttactgttacattctgactaggccatgaaaaacagtggaaagataagagccaggcctttgactgtgtggatgacaacaaactgtggaaaattctgaaagagatggcaataccagaccacctgacctgcatcctgagaaatctgtatgcaggtcaagaagcaacagttagaactggacatgatggagaaggaaatggcaacccactccagtactcttgcctggagaatcccatggagggaggagcctggtgggctacagtccatggggtcgcaaagagtcggacacgactgagtgacttcacacacacacacacacacacacacacacacacacacacacacacacacacacacacacacacacacacacacacacacacacacacacacacacacacacacacacacacacacacacacacacacacacacacacacacacacacacacacacacacacacacgtacacacgtcctgcaggagcccaggcgggaggtgggaacgcatgggcgggcggcccgtgcgcagactcagtgctaaaaaaaaaaaaaaagaactggacatgaaacaacagactggttccaaatcgagaaaggagtgtgtcaagggtgtatattgtcaccctgcttatttaacttatatgcaaagtacatcatgtgaaatgccacgctggatgaagcacaagctggactcaagattgctgggagaaatatcaataacctcagatatcaataacctcaataacataacctcagacaccacccttatggcagaaagtgaagaggaactaaagagcctcttgatgaaaatgaaaaagctggcttaaaactcagcattcagaaaactaagatcatggcatctggtcccatcactgcatggcaaatagatggagaaacaatggaaacagtggcagactttattttcttgggttccaaagtcattgcagatggtgactgccaccatgaaattaaaagatgcttgctccttggaagaaaagctatgaccagcctagacggcatattaaatagcagagccattattttgccaacaaaggtccatgtggtcaaaagctatggtttttccagtggtcatgtatggatatgagagttggactataaagaaagctgagcgctgaagaattgatgcttttgagctgtggtgttggagaagactctttagagtcccttggactgcaagataaaaccagtcagtcctaaaggaaatcagtcctgaatattcattggaaggactgatgctgaagctccaatactttggccacctgatgtgaagaactgactcatttgaaaagagcgtgatgctgggaaagattgaagacaggaggagaaggggacaacagaggaagagttggttggatggcatcactgactcaatggacatgagtttgatcaagctccaggagtagatgatggacagggaagcctggcgaagagttggacacaactgagcgactgaactgaactgaagtgccaggaaattgggttccatcatttgttacctcacttttttctgaaatttgagtcaggggagtgttgggaggtgttacagaagtattgatttcctaatcaactccaaaactttatattcaggatttaatcaactctgaaattgtataaatagaatgtctcagacccaaggtggattcatacatgaaaattcaggaatcttttctagaaataataggtactgaaagtagtgaaagtaagtcatttggttgtgtctgactctttgtgactccatggactatagcctgcaggcttctctgtccgtagagttcttcaggcaagaatactggagcgggttgccattcccttctccaagggatcttcccgacccagggatcaaacctgtgtctcccacactgtgggcagattctttactctctgagccactggggaagccccagtagatactgaagtaaatgttatataattgtgtagattcatactattgtctgcctccttcgatagaaaggaatatatagttttgaattattgctttaagccaggagctgtgtcagagatataaatatatgtttttttttttttaattcaagaggctggcatgaggataatcagttttaattaaaaaaaaaaccctgatacttagttgtagtaggaatatgaatttaaaatatgctccatttgtcaaaaactgaaaatgtagttaagagtgagttgggtaaagttatatcaacactttctttttatctgtgaaatagtaccaattattgaacgaacatggtatgccagagcatagtagtttgaatggcttgtggtgacgtgtttataatgtttgttattaaattttaagatatgaagtttacttttaacaacagtaacatactgattggagaaagtttataatatgtagatttctggatgatttcagtgtgcacagagatggtccttctaataaataccctcttgagtgtcttgaactcctcttttcaactgatttcctgtgttgtgtgctacaccttcactgttcatttccatagtcatccctggatttggtcattatgaataactgtaagccttatataatctcagttccacagttcttatgctctgaccaccgcttcttctctctcttgctctctcattctggtgctctgacttcaactgatcctgcgaacgcttttaggtctctcactccttgatgttctttttttcttctccttaccaaacttaaattatttgttgaaatttataattattcttttgcatgtaccactgatttccttaacttctcatgtcattggcactacctcagcactgcttaaacccaaccttctgcttacttcatgtcagcactcatgcagctgggtgtggctggagaaaaatacacaggtctcactttacatatatgaccactaatgcatgaaggcttctacattgcttaaactaaaaatattttattttcctagtctgttcattctcctgctgttttagttgactcatttcatgcttcctgctcttcccttaaaatcctaatcgctcttctctattttcagtcttaggatgacttgccttcctgtttcactgagaaaattgaagcagtcagggatatccacatactcctactgctatatgtattcaccttttatcttctgtgcccatattgtctgtctattcaccagttactttagataaaccactagtgaactagatcccaacttctctgttactaaaatacagtactttagtaattctccctgctcttttatgtcattacttttacattcccatcagtttacaaacatgcagatgtgctgctatttctcctatttaaaagaattctttttttgcccaacttttccatcagtctcccattttcagtatttctttgctcttctttgcaacagaattccttcaaaaggttgtcagagcttgctgacttcaatttctcttcttatattctttctgagaaagctcttttcaagttatgggaatgttcaaacatacacagaagtagaagacaagtaaaaacattgacatttttttacttagccacaatgctgttatcacacttaacaaaatagacagtctgtaattctttggtgtcatctattatccagtgaatgtttaattttctcaattatttcacttgtctttttgtagttgatttattcaaagcaagatcaaacaaaatccacagatggaatttggtcttagatcacttgcatttaaaaaaagagggtagtttctccttcctcttttttttttttttaaattgagatagggctgacttataatactaaataagtttcatgtgtataacccagtgtttcactatctttaatggttgtaaaatttatagctattataaaaattgactctgttccctttgctgtatagtatattcttacagcctatttattttatagtagtaacttatttccttttggccgtgctgggtctttgttgctgtgtggctgtttccctagttccttgagcgggggctactctagttacagggcacaggctgcttgttgcagaacacaggctgtcaggtgtgtgggcttcagcagttgtggcgtgcgtgctcagtggctgtgcctcctgtgctctggagcaggggctcagtcgtggtgcacaggcttggctgcttcacagtgtgtgggatcttccagagcagggactgaacacatgtcttctgcgttggtaggcagattctttaccactgcgtcaccaaggaagccttacagtagtaattttactttataatcttgtacccctttcttggttctgtttccccactgataatcactggtttattctctgtatctgcgagtctgtgtttttttttttttgctattgttgttatattctttagtttgttttattttatagattctacatatgagtgatagtgtaaaatatttgtctttttctgtctgatgtattttactaagcgtaatatcctccaaatattagaccactacatgttgctcatatggtgatctaatattctgcaagggtgccaagagcatccagtggggaaatgatagtctgtttaataaatggtgctgagaaagctaaatagacacatgcagagcaatgaaatcggtcccctatcttacaccactcacaaaaattaacttgaaatggctcaaagtcttaaacagaagaggtaatagtataaaacttctagaagaaaatgtagagaaaaagctccttgattttggtcttagaaatgattttttttttggatataataccaaaagcacaagcaccaagagcaaaagtcaacaaattggggctgtgtcaaatttaaacacttttgtgcagctaaagaaataattaacaaaagacatcctatgagaattccaggaaaatatctacttctgcttcattgactatgctaaagcctttaactgtgtggatcacaacaaactggaaaattcttcaagagatgggaataccagaccaccttacctgcctcctgtgaaatcagtatacaggtcaagaagcaacagttagtactggacatggaacaatggactggttccacattgggaaaggaatatgtcaagtctctatattgtcaccctgcttattgaacttacatacagagtacattgtgtgaaatgccatgctggatgaagcacaagctggaatcaagattgccaggaaaaatatcaataacctcagatatgcagatcataccaccttagtgaagaggaactaaagagcttcttgatgaaggtgaaagaggggagtgaaaaagctggcttaaaactcaacattcaaaaaacgaagatcatggtatctggtcctatcactgcatggcaaatagatggggaagcaatggaaacagtgaaagactttattttcttgggctccaaaatcacagcagatggtgattgcagccatgaaattgaaagacgcttgctccttggaagaaaagctatgaccaacctagacagcctattaaaaagcagagacattactttgccaacaaaggttgtatagtcaaagctatggtttttccagtagtcatgtatgcatgtgagagttggaccataaagaaggctgagcgccgaagaattgatgcttttgaactgtggtattggagaagactcttgagagtcccttgctcagcaaggagatcaaaccagtcaatcctaaaggaaattaacactgactattcattggaaggactgatgctgaagctgaagctccaatactttggccacgtgatgtgaagagctgactcattagaaaagaccctgatgctgggagagattgaagacaggaggagaaggggacgacagaggacaagatgattgggtgacatcactgagtcaatggacatgagtttgagcaggatctgggaaatagtgaaggacagggaaacctggtgtgttacagtccatggagtctcaaggtgtcgggcataactgagtgactgaataacaacagtgggaacaaaattttgcaaaatatatttcagataaggggggtaataaccaacatatatagagctcatgcaacttaatagcaaaaaggcaatccaattaaaaatgggcaggagaactaaatggacattttttccaaagaagtcatccagatgcccagcagatacatgaaaaggtgctcagcatcactaatcgtcaaggaaatggaaattaaaaccacgatgagaatattccttcatacgtgttagaatggttatcatcaagaagtgcacatgactgaagcggcttagcagcagcatcaagaagtgatcaggttgatgataaccagcctcgatgttgttatcatcaacaagtgatagtagatgctggcaaggatatggagaaaagggagcctttgggcacttcgggaatgtaaagtggtatagcgactggggaaaacagtatggaggttcctcaaaaagccatatgatccagcagttctgcttttgggtgtttatctgaagaaatgaaaacgctaattcaagaaggcacacccccgtgttcctagcaacattactgacagtagccaatatatagaagccacctgaatgcccatgaacagatgaatggatgaagagatgtagtgtatctatacagtagaatgctgccccctcccccgactcttagtttgtttctgtgccattgacttgttgaggaaatttgattacttgcctcacagtttctgccttttggactttatgtatacttccttgtagacttgtttttctatttcctgtaactgattagattctgattcaactttttggaaatttcttccttgtatacttgtttttcccatcttctatattttctgtgtatgattagattgtttcagtttttttttaatggttttaaattgagatttatttcacataaccatacagttcacccatttaattgatgattcagtggatgtaatatattcacagatatgtgcaaccatcataacagtcaatttgaaacattttcattacctcaaaaagaaatctttggctatcaccctttaattaaccctcccttccctgtagccccaaataaccactaatcaaatacaagaattttgatggtatacctgaagagtttgaaagagatcttaacactaaacacatcagtcacagctccaatacagtgattgttgaaagaagacagggtctcacattgcctgtaagagattctagtgcttcactgttgcttcttcttgtcaccctttaaccctgcttactgtctggtcgctttctattataaagtcatttttcagtctcctcccttggatctgtaaatacaggatctttctttggagtcttgcaaaataatatatagttgtaagcatcttattactacatccgaaaactagcccaggcagttgtctctgatgggaggcagggagagtggagacagttgtagcaaacatatacttattttctggttccaagtctagctaacagtaacacctagaaaaccagtgactttcattgtgactttggtaaacaagatcatttatcttctctgtcatttagtgttgagagtctcttcagtaagtagtgctaggaaaattggacagctacgtgcaaaagaatgaaatcagaatacttcctaataccatacacaaagataaactcagaatggatcaaagacctaaatataaacctctgcctacttctattttctgaagatattctattttcttctagcagccttgtagttttagcatttatgtttgtatctgtgatccatctcagtttagtttttgtacatgctgtgatgtaaggattgaggttcatttcctccccatatagttatccaacttttccagcaacagtaattgaaaaagatttccctttccttgatgaattgcttctttgcttctacaaagaatgtcatgatagtgtatttatgtacttgatgaaatagtgagatagaatgcttatgagagagaaaaccatgaattttagactttgaagactcagtttgaaattttgctccatcattttgtggctgttatttccagaagttaacttctttgaccacagttgcctttatttgtagaactgaaatagtaattatctctaacttacaggatttgggggaggtttaaatgagaaaacacataaagataatgacaataattattactatcctttgagtatttatgatattataattattcagtattttacttatatctttaaaatgttgttttaagagctctgtttagttgttcagtccagagaagtttagattaaagcaccttctctgtagtaatgtgaacttgcatggtagcaagttggagtattttttacccgattgagtatcgtgaaaaataacatattcttattttcattgatctatagctgcacattttttatgttaatatatgaaaagataagatcctttatagttttgcctgaataatttttctttcttgaattagacaagaagtagaataccttatcaaaaactattatttcagcttggctaaggaatgccacaaatactctgttattgctaataatacttttaatatggtctgtgttactgcaagctaggtggcttaaatggagaaggcaatggcaccccactccagtactcttgcctggaaaatcccatggatggaggagcctggtaggctgcagtccaggggcttgcgaagagacggacacgactgagcgacttcactttcacttttcaccttcatgcattggagaaggaaatggcaacccactccagtgttcttgcctgaagaatcccagggacggggaagcctgttgggctgccgtctatggggttgcacagggtcggacacgattgaagcgacttagcagcagcagcagcagcaggtggcttaaaacaacagaaatgtactctgtcacaatgctggagtccagaagttttgagtcagtatcaatgggtagaaatcagagtattggcaaggtcaccttttcttcagaggctccttttagtatcactttattggttcttccagattctgatggctgcttgtggttatatcacttctatcatgaaggcgagaatctccaagtctctcttatctgtttcttcatatggttttccccttgttgtggcccatatctccctctgtcttcgtttaaggatatatatgattgcctttcggacccactcagataatccaggataatgtccctattttaagatccttaatggtatcttcaaatagtgttttattttgtattttatttatctatttattttgacatttaaggttcatggattgggatgtggcgatcttttggagggccatttttcagcctaccacagtatgctatatgtttttactagggtaatcggcagtaacaataaagacaccattaagaaacttaaaaatgaaaattcaaaattataaaaaagaattccttcaatgagcattttgtcattgttaagtactataaacctgttaattatcttactgtttttatgtgggagttaagggcaaaattgaagcaagacgatcaaaagagagtttgactcaagcacaaagaactataggaaggccaacacctgtgatttctttagcacatctagctgaatatctgttgacattttagagataacgagaaaaatacatttttttaaataataaatttcctttataaagtttcaaaattcttgtatccatctgttcctttctacccacctctctcacccacccctctttataaaggtgccgcttactgaagcagtggacccagtggatttggaagattacctccttactcatcctttagctgtggattctggacctttaagggatttggttgaattccctccagatgatattgaagtggtttatagtcctagggactgtagaactcttgtttcagctgtacctgaagaaaggtaaggagacatctacctatttctagttttagtgtaactataaaacaactgccttccattattttatttggattccgcttcttgtggtggttggtattcaacaagaatgcagcagcaaaattcataaacatcagcgctttcctgtctaaattatattttcttttttaaaacagtgaaatggatccacatgttagagattgtattagaagttataccgaagactgggcaattgtgatcagaaagtaagttgtatattcattgtgatatttaaaaatactgagcaggatctataaatggattaaggtaggttactactaattatgagagctgaaaattcatttgaaaaatagctgaaaaagtaataggggaacctttgcatatagatattttctccttagaagttccacacttagctttctcttattttccttataaaataatactcaatggacataagtttgagtaagctccgggagttggtgatggacagggaagcctggcgttctaaggtccatggggttgcaaagagttggacatgactgagcaactgaactgaactggggatagtattcctgttattacagatcattaataattactaataatatgtaataataatgacttatagtagtcttttgggaaatcatgggtaaatattgatgaataatttatatttgtcaaatggatccaatttattgaattaagttaaatttaacagctagttttctagatcaggctgtttgaaaggtcttgggcgtttattaaccagctgaatatttataggtccttgacctgtatatccagtcaagtaagtatttgtaaaaataatgttttgccacaaaatttgttcctagtggatggtgtttgaaatatcaagtcagattaagaaataaaattacttttcctttgctaacttgcatagtgaagagagtctttatgctgaatgttcttggcctcatcctgtttttctaaaggaagaataattagtaaagtagtggaaaattctgttaagacattacagttttgagaaatgaagtttcctgtgctaaattgtacttactagcaacagtgatgtgttcattgcttattgtgttgcccttctgtcttatttcactgcgtttaatactgtgctaagcatcactcttggggatactgctgacatgctttttagttttagtgtgacctaataaaagcacagtctgctaccctttataaagaagagccgtttttatgaacttaaaattttgataagtatttcaatagccagattttacagattactgaagaatactgttcctctgtcccataactcaaaagtctttacatctgcttgtatgttggaagcttataatcagaaatgttaacaaaaagagattagttgcaaaatatattaacctcatggaatctggaatctgctacttaacgataatcatggggttgctcaccttgatttaagccaagagggtatggtagttaacatttatgggtttttttttgctatatgctgggcattttattgggtactttatgttcatttaagattccaacagataaggtaacttaggcttagagtagttaagtaatttctttgaggtcccatagccaaaaagtgggattgttaggactagaacctaggggcatcagactctaatgcttatattttttttttctgttatactagatattatttttagtggtagatggaagatgaaaggggtacttttggtagtctagaagttttaaagtgtccctaaaatagaaaagataggtgtgattggaaacaatagaaaaccacagtacaaaataatccaaggagaagatacatgcccaaagttcaatagaatgttaggctcagtgaatacaggcagtagaaggggggtaacatttacctggggtaaatgttggacatttggttattttaaaacctcctatgcctttatgcatagacttgggagtagaagtatccctattttaacagcacgaatggtgggggcttgagaacctcgtgcttccctggtggctcaaatggttaacaatctgcctgcaatgcgggagacctggattgggaacatcccctggaggagggcatggaacccactctagtattcttgcctggagaatccccatgaactgaggagcccgggaggctacagtccatggggttgcagagagttgaacatgactgactaagcacactgcagagatcatagtgtagtgcccagggtgggcataccttggaataagaagaaggagcctgcatacccagaagactggcagactctaccttgaaagcacgagatgcgttttctccataatcactggatatgtgtttggctaaggagataaacagtatttcccagacagatacgcacttacaaattaaaaaatgagcgttagaacctagaatggccagctagttgatggaaaccagttcactttggcttccaaggtggtgcagttggtaaagaaactgcctgccaatgcagaagaggcaagggatttaggatcaatccctgggttgggcagatcccttggagtagggaatggcaacccactgcagtattcttgcctcggaaactccatggacataggagcctggtgggccacagtctgtggggtctcaaagagtcagacgtgattgaggacaaacaaccaatctaaaccaaagtgcacttaaaagagaattatcaaaccacaaataaaagagctaatgatttaggaaatagttaatagaacacagatcaagaaccatatatataactaatatcctcaaagagatatgaaaagatactgtaaccatataaaaactcagctagttatctatggaagtgaaaattttgttcagtgaaaaagaatttaaaactctggatgggtttaatggtggagtagatgtgactgaaaagtggaatagtaagttgtgagatgaaaccaaaaaatccttccataattcagcacagaagggtaaaaggatagaaagtgcttaatattcatttatttattcaaaagatacttattgtgagactcgtatgtgccaggcactatattaagcagtgatgatacatcagtcaacaaaacaaactccatgccttcatagagcctgcattctacttggggttgaaggcaatagacagtaaacaaacacagataaatatttaatagttgtggtggagggaagtcttgtagagaaagaaagtaatatgtaggggtagggcaagccaagcagaggtgtttttactttatataactaatcagagaggcctttctgagaagatgactttcagcaaagacctaaaggaagttaaggaggaaaccgtccgtatatcatgggaaagagtgtatttgacagaggaagagcagtacgtgcaatggttccatattggaagcatgctaggactgtttaagaaataccaaatgatcgatgtggctggaacagaataatttgaaggagagaatgctaagatacaaagtcaaagaaatggcattggtggatggatgatcgtgtagaacctcatagcaactaactagaggaatagaatgataatacagaagagtattaatcataaatcatgtccttcatctcagtactcttgagtttcatactattggttttttagaacataaaattcaacagtattctggcttattagagtagcttagctataaaacttcacaaatgaaggtactcttttccactgtatctcatttttattaaaattacaaatactataagtatgtatgtgtgtgcataatgtatatgctaggaaaaggtccagttagttaaataataggagtgttcaacactgataatctctgagtagtagaaatataatgatttcacaagtctgtatttttaaattttcagcaatgaacatggattggttctgtaataataaaatatttttaaagaaaactttttcatatagaaaagcaacagtgtattctgtcctttaaaatacaaatatttccattgagaacaaaagatgcaaagactagaaaacagttcagtgtctttcaaaaattatctagtgatggttttggctataaagttttatctacttgtctttagttaacatgatttttagttaatcaggcttgtgtttgaattcacactttgtcactttacaaacacttttacacaaactaaggcactttaaactttcatgaaatattagaacatctgcttttgagtaatactttcatgttactatattgcatatctttgttttggttcttccagagaaaactgctgttttttattctatgattatgctatgatatgaacatcatgtggctgctgtttcagtacctttagcaacaagacacaatgtaaataattcatatcgggtgtgtttatttactgtgtcatcaattgactgataaaccataatatcctctggtaattataattgtttatacttcaaataaaatttccccaaatgtgactatatgaggtatggcacagtaaatgctcttgattgtagtgtctctgataatcttggatattgggttgtttggaaaaaagcttgtattaagagttcttagcctaatatatatattatataacaatatatgttaagtatatatatttatatacacacacacagtggtgtggatcctgctgtttttcattttagaagtctgaagctttaggttgcttgagatctttaatacacaatgaggtacagcaaaattttttttggctgtttgaaactgtggttcaatactttctctatattttgccttttaaaaatttacactgttatgaatgcaatttatattttctactctttcattttatttttaacctggcttcccatcatttccttttactgactagttttcttaattgaaagtacaacttaaaatacagtatatccacaggattgtcatgaaaaggaggacattatgatttacctctggaaactcataatctgctgtctagttggattaaaggaactttggatggacgtttcttaaacctttggttaaatgtttaatgggactcccctggtggctcagatgttaaggagtctgcctgtaatgtgggataccccagttcagtccttgggtcaggaagatcccctggagaaggaaatggcagcccactccagtattcttgcctggaaaatccagtggagggaggagcctggcaggctacagtccatggggttgcaaagagttggacatgattgggtgacttcacttcttcttaaatgtttaatatactcaaaactgccagaatatattcttactatgtaaagaaatggtatggagaagagttagcttattatataatgatgatgaacatgaaaaaattttggaaaattgatatttacttaactattttattttgaatagatatcataaactgggaacaggatttaatcctaatacattagataaacagaaagaaaggcaaaaaggtttgccgaagcaggtgtttgaatctgatgacgctccagatggcaataactaccaggatgaacaagtaatacttttatttttaaatgactataagacattattttgaaatagtttattttttattcattgattaatatatttaatgttttgcacggcaggatgatcttaaaagacgttcaatgtcaatagacgatactccaaggggtagctgggcctgcagtatttttgacttgaaaaattcacttcctgatgctttgcttcccaatttacttgatcgaactccaaatgaagaaatagaccgtcagaatgatgagcaaaggaaatcaaaccgtcacaaagaactctttgccttgcatccatcaccagatgaggtatagaaacttggataaagaagcaaaagattatagatgttttgggagtatgaactgtatatattaatagttttatgataaatgtggggaataaaacttaatggaaatatagctaagctttttgtaaatgaaatataattgagcacacttataatctaatgactttagtttgaggataaataggccattcttttctttgcttacttgtgaagactaaaagtagtaggttaataaaataagttcttaaaaaataaattgtaaagggttgaaacatggtaagcatgttcatttgggtgttgcttgttaatttgcaggaagagccaatagaacgacttagtgttcctgatgtgcccaaagaacattttggtcaaagacttcttgtaaaatgtttatcactcaagtgagtatttattttgtttactatataacttttcttttttggagtaatgttttgagtaccagtaaaaaaaaaaatcctagtggatttgtgtttgtgttcttttgaaaagtattgttctatacataattttaaatgcttccaagcatttaaccttacctatgaagctgaacttcagagcacttttggctcacaggtgaagatgactctttgcctcagttatataattatcttaaaacttgaaaaaacattcactgaaatctgtagtatttatcagacactgttcttggcttgaggaataccagtagtatcttttttcttagagttgattttatatttgtttcatggtgtgtagtaggtcgcttcagtcttgtccgattctttgtgatgctgcggacggtatcccgtggggcttctctgtccatgggattctccaggcaggaatactggagtgggttgccatgcttttctccaggcgatcttccccacccagggatcaaatccacatctctggtttctcctgtataggcaggctggttctttaccactagcgccaccagggggtggacttcttttttaagcttttgaagtatgtgctaacagttgatttagactgtggaagatatacatggaaaagtgtgttcaaggaagatgggtagtatagatggtataacacaggtagataaaagtacatggtatagagagaatttatttttggaatgagaatttctctcgaactgtgtattttacatatatatttaaaactcatccttctccttcctaaaggtttgagattgaaattgaacccatttttgcaagtttggctttatatgatgtgaaagaaaagaaaaaggtaaggttatataatttgaacgtagtcttttgtcacaatcagaggttctgaaacctgtttctaatttgttttataagataatgattttttgagactattattaaacatggatattttttaaaagaaaatagaactgtgagacattattttactactgtaaaatagtttagttgacttattttttgtttcattgaaagagttcgaaaaagaagtggcaggagcaactttatacaaggaaagcatcttaggcaaatgatgtgtaaagagttagattgatggtgacagggacgttttgttgatgtaatttttaaattctcactagctattattaaaagatcatttatttatattttaaatattcttgtctaaaatattgctgttggttttgctgttatatctttgttacacttaggagtttttcagaggacttatcatacagcgtttttagtattctaagcctcccatgcagtagaaaggtgaaaggcctttagtgacttctgctgtcagcatattgtggaactctactccagcatcttgtatttactaaatcacatcttctgaaatgttgtttaagttttcaaagactcaacttggggtaattcatattaataatagtttctttatatactttatcagaagtcaaatttcttactaaaagagtatgggatatggttctttagaatatgtttttgcattaattctttttgttttgatttagatatgtaaagatctttgtatatcttcactgatagtgaaatgtatggtacattgtatgttagtataattgtttaataattgtaatcttttaagactgaatatttatggtttttgtgagtgtttataaaatgcacaggttttaaacttaacatatgaatatgtgttttagatttcagaaaacttttattttgaccttaattctgagcagatgaaaggattattacgtccacatgttccacctgctgccattaccaccctggcaagatcagctattttttctatcacttatccttcccaagatgtttttcttgtaataaaggtgagaataatgttaaatatatttgtttatttatgttatgtctgtgtacttgtctgcctgtcaatatcacaagctttttaaggtcaaagattttatctttgcctattttttcatgttaatattttttaacataatattggacgtatactataggtgctacctaaattcttcttgagtgggaagctttattagaattctctaaataagcagatcaataggaggaaggtacatatacatatggaggattgatatgttatagtcttgagaatccatctttgagaaaccttagtctttgtagtgttcttgcctggagaatcccagggacagaggagcctggtaggttgtcgtctatggggtcgcacagattcggacacgactgaagcgacttagcagcagcagcagcagtctttgttcttgaggtcttcaactaactggataaggcccacccacattatgaagggtaattgctttactcagtctactggtttaaaagttaatcacctctaaaaaaataccttcacagcaacatcttgactggtatttgataacttagctgcgttggcatattaaactaaccatctgtggttatttggatatggagctatactgtggttttatcatgtagttcctaaattatataaatattaaaattaaatcattgaaatcatggagcattatgatttgactatcaatcaattaagaataaggattacagatactaaaatttgaatactaagctacctagcttaggataacttaataattatttaccttaacttgaccttgacttgagagttgcctaaaatatagtctttaatcattttacgttaaaattatcataaaaaggtaatgaattttataataaggttataaagtagattgtcatgaaatgaattttatttacccacaggaataatgtcctaatttgtggatagattcctatgaattcaggttaagataaatcttagttacaatgaacaattctccaagcaaagatttagcagcagtggtcttcagaaagtcacttataagtaaagttctagatattaaaataattgacaaatgtgtatacaccattattttacatgggaaaataataagtttgcataaaatagaacatatttgaggggacgaactagaaagatagcgatgatgattggaatactgtctgcttgaaaatgagatggttcataccatatggtcccaattgtgtaaaatacatacacatatacctaaacacacataaaagtttgtatataaacagaaaaagacttttgtgtaatttcaaaaatatgaataagttaagatgtgtacaaattttaaagaaattatatttaaaagttttcttttatcatagtccagcaatataattttgttttttttgagaggaaattcccttggtctatatattagttagttattcctctacaagaacaaaacgacgaaagtctccgtggcacccagcagtcagcacttgtttagttcctgcgcctgagttgtctggtggccgctggtctagctggtactctgttaggtgcttgtgctccttccaggtgcctgcaggttggtcagttgatttccgtactccattcagtgaaatcaccagcgtcacagggaggcccagtggtaccgctgagccaccagggaagcccagggattagtgaagggcttctcaggtggctcagtgataaaaagaatccatctgccagtgcagccgatgtcagttcaatccctgggtcagaaagagtcccctgcagaaggaactggcaacccattctagtattcttgcctgggaaatcccatggacagaggagcctgtcaggctacagtccatggagtcacagaagagtcaggcatgacttatcaactaaacaacaacagcaaattgattaatgatgttgagtgtgttcgtcatatgtttcttagatacttgtttggcttctttggcgaaatgtctgttcaaatcctttgctcatttaaaaatcaggttatttgctattctcttgagttgtaggatttctttatctgttttggatattaattctttatcagttatatgatttacaagtattttctctctcattctgagaattgccttttctccctgttgattgtgtcctattatataaaaaagttttaaattttgatgtaatccagtttaatgatttttacttctgttgcctttgcttttattgtgtaaaatccaagaatctattactaaatttaatcacatgaagcttttcctttatttttcttctaggaggtttatagttttagggttcttttttggggacggtctttgatctgtttttagttaatttttgtatataatgtgagggttcaactttattcttttgcctttagaaatttagggattttttaaacaccatttgttggaaaacctattctttccccattgaatagtcttggcattcttgtagaaaattatttaactctacagttttcagattacaaatctttcagctttttggtttatacctcagtactttattctttttgatattataaatggaattattttcttaatttcctttttgaattgcttgttagggtatagaaatacaacttatttttgttcattttgtatccttcaactttgctgaatttatttatttattagttgtaaagagtaagatcatggcatctagtcccatcacttcatggcaaatagatggggaaacagtggaaacagtggatggttttatttttctgggctccaaaatcactgcagatggtgactgcagccatgaaattaaaagacgcttactccttggaaggaaagttatgaccaacctagaaagcatattaaaaagcagagacattactttgccaacaaaggtctgtctagtcaaggctatagtttttccagtggttatgtatggatgtgagagttggactagaaagcaagctgagtgctgaagaattgatgcttttgaactgtagttttggagaagattcttgagagtcccttggactggaaggagatccaaccagtccatcctaaaggagatcagtcctgggtattcattggaaggactgatgttgaagctgaacctccaatactttggccacctgatgcaaagagctgactcattggaagagaccctgatgctgggaaagattgggggcaggaggagaaggggacatcagaggatgagatggctggatggcatcaccgacttaatggacatgggtttgggtagactccgggagttggtgatagacagggaggcctggcatgctgtggagtcgcaaagagtcggacatgactgagcgacttaactgaactgaactgaatcattttttttggaatattagcattttctctgtaaaagatcatgttggctgtaaatagagataatttaaattctttttaaatttgaatgtttttgtttcttttttgggcatcctttttcttgtcacattgctctggctcagacttctagtcttttgttcaatagaattggcaaaagttaacgttcttatcctgttcctgattctaaaggaaaagctttcagtttttcaacattgaataagatgttagatgtgaacttttcatagatgggctcttattggggtagttttcttcttttccaagtttgttgaattttttttttaatcatgaaagggtgttgaattgtccaattcttttttctgcaataattaacatggtcatgtggttttgttctgttattctgttaatgtgatgtattaagttgattgatttttgtatgttgaaccatccttccattccaggctgattgcttttatttttaagcttaattaatctttcctttttttgcctttgacagctagaaaaagtgcttcagcaaggagacattggagagtgtgcagaaccctacatgattttcaaagaagcagatgccaccaaggtagaatttcatgcatcttattccccccactttcatcgtcattagcagtcactctccattcccctgagatcaccaaacccaaccctaaatagtctctgatctccaaaatataatctgagaggatactatactgagcatattaaataattttactactgattttactactaaaattttcttttttttctctggtggcctacttgttttctttcttctttatttcctttgtcatctagtttgagtcatgtgctatgctattctttgacatctccccaaccccaaactagttgactcttaaattttttttttcttggagagaaagtaattcagtttaattcctaaataatgaaaaatgttctgtatttacaaaatagtgatttttttttttttttggctacgctttgcagcttttgggattcccagccaagaatgggatccatgccccctgcagtggatttatggaattcaaaccactggaccatgatttttttttaaccaaacagtgatgttgatgaaactttttctagcaaagcagatgaattttggatatcagtctagtggcagataattagagaatattgtaaaaatagaaaatatattctcccctttgccaacagataacaaatttatagaatttggataaacttatgaagcaaaaatagttgatgaataattggtaccaaattctaggtactctgagttagctataagagtaaaaggtgatttttggatctttgaacacatgatttaatgtcaaacaggcagaagtatgcttgaggagtattgaacaaatcatcaaaatgtagaaaattgttgctttctgtttttctgagatttataacaagaattgagccttttttgctaatatgggtacatcggagcacatgatgttctctgatgcctagatcctagatatctggttgcaagtagggttaaagtattctggctttccccaggtcgtcattttacaaattaacttttctctgtcgtatgaaactcataggtgtgtcactgtggcttatttcactcttcccttacgtatttacataatttcaatgtgggtccttaattctctgtaagtactcctaaagcaaggacctgttttggaggtataatagacatagtaaaaaccattcttatcatttcggtatcgcttcatcttttctcagtcctgagtcccatggtaggacactgccattagagtatgacctcactgatatcttatatggaaggagcacatgagagattttggtgtagattttcacccttgaactatggattgactattgtaggccacattagtgtttgttttaggaatagcctaaaagttgagccagcttcaggttgtcttccagataagcatgtactgtttggattattaatctttttcaagggtttagtccccttgtactttttttgtttgcttctcttatcacaattctggacatattattgttggtctgtttgtgccctacctacttctacatcataattgtcgtaagttattgattatttcaaagtggcccaaatgcttccatttttttatagaataaaaaaattaataagtcataacctagaatattttgtgattgacagttgatgactggaacatggctgtatttctttcataaaatagtacatgttgtatattaacgtgcttgacacttgctctcctttcttttatcccaaaataagatcatgacaaacaaattttaaagacttttagatgcatttgtagaactggttaaggttcttcactccagtactcttgcctggaaaatcccatggacggaggagcctggtgggctgcagtccatgggatcactaagagttggacacgactgaagcaacttagcagtagttaatatactgttaattggggcttccccagtggctcagcagtagagaatcggtctgcagtgtaggaattggcaggaaatgcaagttcaatccctgggtggggaagatcccctggaggagggcatggcaacccactccagtattcttgcctggagaatcccatggacagaggagcctggcaggctacagtccatagggttgctaagagtcagacatgactgaagcaaattagcatgtatgcacacactgttaattgattgctgaaaggtatggattgtttttccatcttgctgagaattgaaaattgttaacctttatattttcctttatatattatgatatagcctttaattcatttcttttgagcataatcatataatgtataaagttttgttttacagaataaggaaaaattggagaagctgaaaagtcaagctgatcagttttgtcaaagacttgggaagtatcgcatgccttttgcttggactgcaatccatttaatgaatattgttagcagtgctgggagtttggaaagagattctacagaggtagaaataagcactggaggtgagagtgttttatataaaatagttctatagtttttacttacataggcttgttttatttgtcaactgtgcagtgtaatgaggcattgaaagggttttctttttctccttaacaggtttattgagatgtaattcacatataatttgcccatttaagatttctaattcagtgttttttgttatattcataaggttctgcaactgtcaccacaatctaattttgaaacactttgatactcactgatggtcagtgttcatcctcttcaagtccccacactcagtgctaaccaacctgtaatccgtttagtctgtatggatttgcctgtgccagacatttcatattgatagaattatacaatatgtaatcttttgactaccttctttcacttagcataatgtttgaaaggtttatccatgttgtaaatgtatcaatattttgtttctttttattgctaaataatagtcccttgtatggatatactacatttattatccattcatcagttgatggacatttggattgtttcaactttctgtttattataaaaatgctgcaaggaaaattcatgtacatgcttttctgtggacatatgctttcatttctcttggacatatagctagaaatgaaatttctggtaatataattctttgtttaaccttttgaagaactgccagactgttttccagtgtggccacaccgtttaaaaattacactagcagtgtatgaaggttccaatttctccacatctttaccagtacttttattatctgtcctttgaatatagccatcctagtgcagatcaagtggtatctcattgtggtttggaatcgcctttccctgatagctaatgatactgagtttcattttgtgtgcatttattgtttgtatatcttctctggagaaatatatatcttttccccatttttttaatgacttttttcttattatttacttgctcattttttaactagctttttttgtattcttatcattaagttataattaatagttataatttataaatgactatataaatagtcatttgtatattctagatttgttgttcaatcgttaaatcatgtacaactctttgtgaccctgtggactgcagcacgccaggcttccctgtccttcaccatctgctgtgagattgcccaaactcatgtccattgagtcagtgatgccatccaaccatctcatcctctgttgctcctttctcctcctgccctcagtctttcccagcatcagagtcatttccaatgagtttatctcttcgcatcaggtggccaaagtattggagcttcagcttcagcatcagtccttccagtgaatattcagggtttatttccttacgattgatggtttggtctccttgttgtacaagagactttacagagtcttctccagtgccacagttaaaaattatcaattcttcagtgctcagccttctttatggtcctgctctcacatccatacatgacaactggaaaaccaaaactttgactatacaaacctttgtcagcaagttgatgtctctgctttttaatatactgtctaggtttgtcatagcttttcttccaagggataaatgtattttaatttcatggctgcggtcatcatctgcagtgattttagagcgcaagaaaataaaatctgtcactgtttccactttccccccatctatttgccataaagtgatgggtctggatgccatgatcttcattttttgaatgttgagttttaagccagctttttcactctcctctttgaccctcatcaagaagctctttagttcctcttcagtttctgccattagagtgatatcatctgcatatcagggactgttgatacttctggaaatcttaattccaacttgtgattaatccagcccagcattttgcatgatgtgctctgcatataatttaaataagcagggtgaccctatacagctttgacatactcctttcccagttttgaactagtgctttgttccatgtccagttctaactgttgcttcttttcctgtgtattctggatacaagtcccttatctaataaaggatttgaagatattttcttccatcctgtgattgtctttttactctcttgatggcattgcgtgaagcactgaagttttatattttgatgttcaatttatttgatttttttttcttttgttacttatactttttctattgtacctaagatagcattacctaattcaagactggaaaggagctacttgtatgttttgactcttgtctaagagtttcataactcttgtctaagagtttcataactcttatctaagagttttacaactcttacatttgggtatagttcattttgagttaatttttgtacatgataagaagtaagggttagcttcatcttttctaagtagatatctagttgttcgtacaccatttgttgaagagatcattcttgcactattaaatggtcttggcataattgttgaaaatcaattgactgtagatatgtagctttatttctggactctcatttctgtttcattgatggatatgtctaagcttatactattttttattctgtttttttaattttagctttgcagtaagttttgaaattgggactgtgggtcctccagttctttttcaagattcttttgattattttgagctcttgtattttcgtaagaagtttagaatctgttattaacgtctgcacaaaagcagctggaattttgatagaaattacattgatttaatagatcaatttggggagaactttccctcatagcagtattaagtcttcctgtccatgaaatgtttttccatttatttaggtcttaagtttttttaaatggtgttttgtagttttcagtgtacaagtcttgcccttctgttgttaaatgtatgttcatgtgtttttttgttttttgatgctattttaaatggaattgttttcttaatttcatttgtataatgttcatttctagaggttgaaatacagctggctttttaatattgatcttgtactttgaaacctttttgaattttttaattctattttttttttcttctctggattctatatacaagatcatgtcatctgcaaataaaaattggtttacttttttttttccatttcaatgtctttatttttcttttgtaattatcttgataagaacctagtgtataagtttttaaaaagtggtttagtttttccttttccattttaatgactttatttatttttcttttctaactatcttaataagaatccttattcctgacttagagggaatgcattcagtcttttcactatcaagtatgatgtttgctgtaggttttccatagatgtaatacagtattttgaggaagtttctttctagtcctaactttttgagtgtttttatcagggaagaatattggattttatgttaataaaatgctttctctccttttattgagatgacttgtctggtttttgtcctgtagtcttttttgtatggtgtattgcatcaatcgattggttttggatgttaaactaataaatttctgggagaagtcccacttggtcatgatatatgttaataatttttataggtgtttatttagaacctgtttcctagtattttgtatagtgattttgcttctattaatatgttcctgagggatactggtatatagttcttcttccttgtaatctctgattttggtatcaggataatactggtgtcatagaaatgaatcgtgaattcttatttctgtttttggaagagtttgtaaacagctggtgttaattttttattgaaagtttgaaagttttcagtagtgaagccattttggcttggtcatttctttgtggtaagtattttctttactaactagatcttttattttagatctgttcatattttctctcccttcttgagtcagtttcagtaatgcatatctttctagaaaaatactcatttcattcagattatcttattgttgtctaatctaactgttgacctacaggtatttgtagtattttaatataatcctttttctaagatttgtagtgctgttccctctttcattctgatttaagtaatttgagtcctttttatgtattttttcttcatcactttaaagttttaaaaatgtttcctttttgaagaatccatgtttggtttcaatgatttttttttttgcctgttgttttcttagtttatatttcatttatttccattcaactgttgtcttttttgataccctttctaatgtttgctttggatttagctttctcttctttttctggtttcctaagatgtaaatttaagttactgattagagacctttcttttttaatataaacatttgcaactataaatttccatatgagagcttccttagtgatatattaaatgtttggggattttatattttcattttcctatatcttaagtgttttttaatttcccgtgttattttgtctttgattgtcagttattcagaagtgtactgtttaatttccacatgcttatgaatttcccaaattttcttttgtgattgatttataggttaatttctgttactcttggaaaacatatcttagatgatttcagtcacttggaatttattgtattttgttctatagcttagtgtaaatagtcttgtcttggagaatttcctgggtgtgcttgagaagaatctatattatgcttttgcttagtgtagtatatagacggtagataactttttgatctagtttgtgtatagctttgtttgttttctatttccttgttgatcttcaacatagttgctctattggttttgaataataagtttatcttgcaaagactttgaatgcaagttatcataaattctgtttcaaactcaagtgctaagactgcgggaccattataaggtgactaaaatttacattatgtgaatattttctagtaaatatgtagtgcctctctatgtgcttttcatagctcatctttggttatttgcataatctttacgtggtagcagtttattttacactggagaagttttaagagagaacccaaagatttaggtgaaatgtttccttacagatctctccagaagttaaatttttctactgtaatgagtatgctgaagggacagttttcaactttagtggatattttcctgtgtttgtaaagctgatacgttttaaatctcatggaaatgaatatcttgctttttttccttggtagaacgaaaggggtcttggtccgagaggaggaattctagtattgttggaagaagatcacttgaaaggacaacaagtggagatgatgcttgtaacttgaccagctttcgacctgctactctcacagtaacaaatttttttaagcaggtattgttctgtcatggaggaattctagggggctacttgcacataaatttttcttgactccagaaaaatcataattgtccaagtagcacatgtatatgtaataattgattgtgctttcaagaagttaaaaaagcattaagaataaaaagtataagaaaatacctgttgtttttataagaaaaaataattaattttatacctgttgttttatcatatttatttaaatattgatattgactagtaatgcttcaaaatcagtcatctgcatctgtatcctatttcttaattttaatattttaacttttcttaagcattgatggtttatgaattttcttagtcaattaaacttggtgggattatgtctatcctcaccacccaagtttttttttaacctgaaataccacatccatggtatatggaatagaagtttcaggctctagtagtttatttttgtgctagaattatttttataggtgagtttataagtttaaatagttcttgatcaaagatattttgttctttgcaagtatattttctgtacttcaacttgtgagtcagatccatagttttcaaatgctggtcatgatccattaatggtgatataaatttagtaaataacactcagcttaaaaaaatgaaacaagttgaataaaaaattaatagtgcattgcacttcatgaagttaagtattgcttcagtaggcttttttccctctaagttttacatgtgtgcatacctgtctgtatgtccttatgtgatgtgtatgctactggattttgatgtaaaatgaattttatactctgaattaagatcagaaaattttggaagtctgtctaaagtaaccagataaccagaactataataagaatgggggaaaatttgtatttgtgtgacacactgttgaagggtaccatgcatatattttggagcagattaaaggaaagggctaagtattgtctcaaaatttctcctactgaggtgttactctaaataggaagagaaaatcctggctttgtgacaccttgtaacttgagaagacaaggtgtttagggcaggttgtgttgtgatttgacaggtagtaacctacttgacagagaaggcaatggcaccccactctggtacgcttgcctggaaaatcccatggacgcaggagcctggtgggctgcagtccaaggggtcgtgaagagtcggacatgactgagtgacttcactttggcttttcactttcatgcattggagaaggaaatggcaccccactccagtgttcttgcctggagaatcccagggacgggggagcctggtgggctgccgtctgtggggtcacacagagtcggacatgactgaagcaatttagcagcagcagcagcagctacttgaagcccttttcacagttatgtatcagtagcattcacaggcagctgctctgagagactcaaatggagaacaaagccggtgagaagtgtctgaagtggtaagggtcttcttattgtggtaatagtgcaagaaagagtctagaaaacgccatagtgttacttggatgaggtaataggccaaacttaactgtggaaagagggcagtagctgtacttgttacttgtttacttgtagctataacatttctctttttccttcttcaactggagttccacttctgccactatttcctcagttcctttttggtttaattcagcctactttattattgaactgctattgtaatcttaaatcaacaagtcatccaaccacccacccacctgttgattcaacagatgctttttgagcattcaccatgtactgagcatcaatccacccacctacctacttatccaatacatattttttgagcattcatcatctacagaaccctattgaagactagtaactgggaactggaacaaagtaattataaaaaacttaaaaaatgatggcttctggatatatggagaaatggaaaacacacttttgtacagttctgtaatttttagcttaacatgtatgatttttataagcatttttataaatagcttaaatactgtgtatcaggcaagtgcaaattaagtaaaaaagcagacattacaagtttaataaagtagaactcaaggtacaagtttctcctaaataagatacagaaggcaactttttttctcattttgtttttttaattgatgagtgattactgtccatgatttgatatagttatcaggagtgtttatgtacagatttgaaatgtgtcaggccaatatgattagaaatgtagaaagatttaaaaccaaaaattaaatccatgcattataaggataattgttctattgttgacaggtatagaagttatatgttgcttcaggagcacatagcagtgaacaggcagtgtggaggaatgagtgtcagcctggcttattcatgtgtttggagactgataagagtcagttgatctagaacttctgctgggaagactgaaatgattcagactttttacatgttgctcactcttaacatctagcaggccagctgggtcgtgttcttatggcagtgacaagttccagagaggaagcaagcttacttttgcaagcatttttcaagtctctctaaaatgtttgtttactggttagaacaagtcacatggccaactctagggaagggaattatgtcccatgcagcaaaaggcatggaaacggagtaaaaagaatggaagtcattaatataattggtttaacaagttaagtagacagaaatgactgagtcttgagataatctgaatgtattctaaataagggccatttaaatttaaagatctatattaatttctatactcaaaaggagagaataaactgtttcggtgactgatagaacatttataatagtttagtcgtatattaggtcactgaagaaatcttcatgaagtcaaattctctaactataactcagtaaagctaaaaaccatttatacaagtattaacaaatatttctaaccacttagaaggtaaaaatcactatttaaaataatgggataaaagaagatcaattttgtatcctgcttagaatacaatagtgaactactgggatctggctcaggtgaactcacagtaataaaggagccttaaatatatttattaccaaataagataaaaagatactatatgaactatgcattaaaaaaataagatgtcaaatgcaggaggtttggattaataaaatctaaagactgactcttaaataaaagaaaaaagtcaatcactgcctattttaactgaaagaaaaaaattacagtaaattggaaattctttgttaattagacctggtcttgttttttgtgtgtgtcttcccattgattgaggtccttttagagttttctttttagtcatattatcaggatagttatggttttttttaagtgtagttttttgtttctttctttgcattttcaagtttagccagtgctctatattttgcttttaagaaattgggcaatataaacttgcaaagacaaatgaaaatgcaagtggaacaaatttaaagacaagtttaaatttatacagatttgaaatgtgtcaggccaacatgtacatatacacacatatatgtcttttctgtctatattcatatttttcttcatctgcttctaacttgcattgatttttctatattttggaatgccctgtagtaccttataaacgtagataatgagccgtaaatctataaagttaaaacatagatagcagtattatagcttaatacaacttaaaagcatagaaagaaaataatttagcatatttatttttaatcataattgtgttaatttaacttttcattcagactaaattgaaggaagaggggcaggattaattaacaggcaatataaatttattttcagtgtactatatttttttgatcaaatactttttcctctatttttaatattaggaaggagatcgcttaagtgatgaagatctgtacaagttccttgctgatatgagaaggccatcttctgttttacggcgactaagacctattacgggtatttaaacatttttgtgtagacatgatgacagctattatcattaaaaactgtattttttgtaacaatgtgttcttttttctcatatctgaccataagtctcttgtgctcaatacctgtcaatcttcttcattttactgttctactctcatgtagtctaacagtttggatgcaggattcagtacctttgataatttgagtactgaaatgagaataatgaataatactgtggcttaacattattttctagagggaagaaaaatacatgtaatggcagatattcagaaataggtttatattgtgatcagagcaaagtattccagagtaaaactattttgaagtctaccaagtttgagcaaattccgggagatggtgaaggacagggaagcctggcgttctgcggcccatggggtcgcaaagggtcagacatgactgagtgaacaaccaagttttgtttaaagggacacttctcctgtggcccagtggtaatgcaggagacacaggaaatgtgggtttgatccctgggtcaggaagaccccctggaggcgggcatggcaacccactccagtattcttgcttggagaatcccatggacagagctggagggctatagtccctagggtctcttaagagttggacatgactgagcatgctcacaaaagtttaagctacatcatttaatctttgaaatgttggcttgtttccctataagattcctgtgtttttttttttcttctcctttgcctcttccttcctttccattcattcattcagtaagcatttattattttatctttttatatctgtattagtagttttagatttgatatgatgaaataatttagaggtctgaggtggtagcagttttggtttctttccaggcttcttgaagaaataggatttaaatccttcccaaaattcttcagcatgaggttatttattatttttttttattttatttaaatttttttattggagtacaattgctatacagtgttgtgttagcttctcctgtacaacagtgtgaatcagctgtgtgtacatatatccctgcccttttgagcctccttccccctgaccaccactatcacagagcaccgggctgagttctctgtgttgtatagcaggttcccactatgtgtttacacatggtagtttatgtcagttcagttctctcagttcgtttcaccctctccttccctactgcctcttccacgtcacatgtctgttctctatgactgcatgtcttttcctgccctgcaaacaggctcatctgttaccatctttctagattccatacacatgcattaatacaggatacttgtttttcttcttccaaattacttcactctatatgacatgtttacattgtttctataatgtatttttgtatgcagctcagctgaagatagacatttctcctgcacctgaaaatccccattactgcctgaccccagagctgcttcaagtgaagctctaccctgacagtagagttagacctactagagaaattttggagtttcctgcaagggatgtctatgttccaaacactacttacaggtaatggcattttaattttggagaattcctgaagtaaggtacagtatgttctactattaatatacaatgaaagtcttgcaaaatcctttgtcgctttgctacttatttcatttcttatttcatgattttactaatagctgtaatgcatttagctcttactgtgtaacaggtctgttaattaccttacatactttatcttatttaatcctcatagcttgaggtaggtattaccttcattttagaagtgaataaactgagagagttcatacctgtgttggagctagcatttgaattgtggattgctaggttaaaacatttgaacttctagttactgtatttcctcagatgttcttattagcagaatctaacattacacatgaattaaatgtatgtacctgtactatgttctaatagttaatcaacactatttgatataattctatattataagatcccctggagaaggaaatggcaacccactccagtactcttgcctggaaaattccatggactgaggagcctggtaggctatagtccatggggttgcgaagagtcggacttgactgagcgactttgctttcactttcacttttattactcagaatacttgacatgaggttgttggataggattttagactgaatgctgcataactccaggggtaccatttacatgttctctgtactaatgaggctccctttgtgaatgctgagaccaggacttgacatgtctgttgtgatatccagcagggcacctcagacacaagtttctgcctcaacttcctcactttagtatatttcaccacctacccaattcctgaggcaaaatgtttggaatcaaaatgatttctcttcttttctcttcctacatttctcctccaagaagttttgtaggctctgcttcaaaatgaatcccaaatctaatgctccttaacctcctccacctttgaaattctacttgtcaccatccagatcagcactgtcaaacagaaatataatgggagccacatttgtaattttcaattttatagtttctacactaaaacaataaacaagtaaaattaattataatcataggttatttaatccagtatatctaagatagtatcattataccatatagtaaatgtcaaaaattcttttgctttttgccactcctttatcttcaaaatctggtctgtattttatacttaaagcatgtttcaattcagatgtgctacatttcaaatggttgataatcaatagaactagatactagaatactggataggtgctgatctagaattttgtgtacatttttatatttgatcctcttacttctacccatgcctcagtcagttctcaacatttgtagtcagagagattttttttttttttttcacttatttcttcagagagatttttaaaagatataaatcagatcatttggtcctgtgtcttaaagtcctccaatgtcttctattttaaacagaaaaataatgaagactataagactatatgatctagctcttgcctttctctaacttcatatcctactaatctctatcttgctcattttagcctcaatggcctttttgttcatccttgaataaacaaaattctgcccaagatttttttatttttttcttttctttgcctgttgtgtttttctccagatcgtcacatgacttgattccttattcagtcatatatctgtctacttaaaggtcattctcatcaccctacctaaaagatccattgcttctctcctccagcttctacccttccttatatttatcattatctggcattacaatatgtattgaattgttacatgaatgtaattactgtcaagggcaagggcttgtctgtttgtttaccactttatctccagcatatagaatagtgtgctagcacatggagagtacacagtaatacttattaaatgttttaagaaacacgacactgtatagtgttatgaatgggatttagagtcgcacagatatgggtacaatatctgactccactgtttactgtttagtagcttagaacaaatgacttagtttattggcactcagttttattcaaatgtggggatgataatacctgtcttcttttgtgagagtatagagcacaaactattgcatgtaattggcatttaatgtgagtaaaactcctggaatataaggtaaattttatataaactgcttttaaaagaaacatgtgtaaaaaaaaaacaaaaaacaccaggtttaaaaaaaaagaaacaggtgatacaaatattctcctataagttttcagttcagttcagttcagttgctcagtcgtgtctgactctttgtgaccccatggactgtagcacaccaggcctccctgtccatcgccaactcctggagtttactcagactcatgtccgttgagtcagtgatgccatccaaccatctcatcctctgctgttcccttttcctcctgccttaatctttcccaacatcgtggtcttttcaaatgagtcagttcttcacatcaggtggccaaagtattggagtttcagctttagcatcagtccttccaatgaatagtcaggactgatttcctttaggatggactggttggatctccttgcagtccaagggactctcaagagtcttctccaacaccacagttcaaaagcatcaattctttggcacttagccttctttatagtccaactctcacatccatacgtgaccacttgaaaaaccatagccttgactagacagacctttgttggcaaagtaatgtctctactttttaatatgctgtctagatttgtcataacttttcttccaaggagcaagtgtcttttaatttcatggctgcagtcaccatctgcagtgattttggagccccccaaaataaagtctgtcactgtttccactgtttccccatctatttgccatgaagtgatgggaccggatgccatgatcttagatttccgagtgttgagttttaagtcaactttttcactctcctctttcactttcatcaagaggctcttcagtatttcttcactgtctgccataagggtggtgtcatctgcctatctgaggttattgatatttctcccggcaatcgtgattccagcttgtgtttcatccagcctataaattttatatatattttattatatataagtgagccatggttggtattgaacaacttagatgttatcaaccctatctcttatctagtatatgactctcatgtaaaacattcctaacttgtgtgtatctatctttcttctacttggattatttcagagacaggggaaatgaaaattggggactttgaagggtcttttctttcattttcctatttatcttttaaaatttatttacatatatagattttaaacaaattatatgagtgtacttagagtttgtgccatcaggcttaacgttaaaaacagaggtccttcatcttgttggaaccatcctttccccaccttgatgtctaatctttattgtcagtcactgctgtcaatagtgactttatggtctgtcaatttttgctccttcttttgttgttttactccttgtttttaaataatatggtcatgccgctatttcttgattctctttcaatttaaaatacctactgattgctatagaaggtgaagatttaattctgataccctcttccttaagaaaatacatacacttgcataaactttggaaaaaaaatacttgtcatctctgtaaagcttcttgcaatacagtaaaatccatcagattatttcctctcttgtaccttccttagtccctttgcaactaaactataagttagtatggcaggggaagttttcaagttacttggcttactgtagagttgttgtcttggagcctgttggcaccattttcctagaaattctgtttgcatttgttttgcaacggagttcttatttccgatgtattttttgttcttggtttactcattatactgagagccttcagtatctcctggattaaagtgttggaaagtacctgccacatattaaatgctcgataaaagttagtcattagtgttagatttagttgcttatttaaagataaacagagccttaaatcttttaggttgtaggttattgctttgtcaaataaacgtaatcatgttgttagatgtatgattgtccttgggattacacatatgaatttagaaaaatagtttttatgtttgagatggaatcctgattttatattttctaaaatgtcattgaaacctcattttataaaggcttactagggagattgttaatcttattttcatgaccttgaactgcacatttcacaccagttgagtaattttgccctgtttgatttgccatgaaaacactttggactttgataaaaaggccaacatttggttactttcttttccattttcagaactgtgttggatgatcacttagtagtaaatgcataagcacagtgcttgttgttcttatgggaaaaaaaaagacatttgattattctaacagaatgtggaatatgtaacaatatatttggaacaggctttataaggaagtaattagatacacaataaatactgattcatgaatgcatttttgattaatgaataagttaatcaattaccatgagttatgctattaggaagaaaaagtacaagcatgaaaacatgctgatgctagattgacagtgtgtcaatagattatactacagtaagtaaccctgacacaagaaatgtatatacttgttctcagtaaagtttatactagttcagtgtaatctcttggtatagacattttgtagtaattcactaaaagcaagtaaataagctctctttggtgctcttgggatttttgctactgtttttcactattttagttttaaaatttgctagatttattttttctgtctttaattgctaagtgccagttgaaggggtccagacagtgatgctgcaaggtttcagagaaaagcctccatttactaggatatttgtggaagaagtgagattatctttgctttgttgtggttcagttgcttagttatgtctgactctttgtggctccatggactgcaacacgccaggcttccctgtgcttcagtatctcctagagtttgctcagattcatgtctgttgagttggtgatgctgtctaaccacctcattctctgctgtcctcttttccttttgccttcaatctttcccagcagcggagtcttttccaaatgagttgtttccttgcattaggtggccaaagtattggagcttcatcttcagcatgagtccttccaatgaatattcaggattgatttccgttagcattgactggtttgatcttgcagtccaagggactctcgagagtcttttccagcactgaatttagaagcgtcacaggaggcagtgaccaaaaccatcccaaagaaaaagaaatgcaagaatgcaaagacaacaaaaaaaggttgtctgaggtggctttacaaacagctgaggaatgaagagaagcgaaaggccagggagaaagagaaagataatagaatcttattaggattttatcttaaatctaagaatcttaccttaaaattgcacatgaattctcttttctaattcataaatccacttaatataaaaatagttatttcctccctaaaacgacaaagtgatattcctgggagatgtgtcatgttaatcccatggacttgcatttgtcatttagctgtgccctcttaagaatgtgtaccccaattagaggcacataagcctacaaagcaagatccagatctcttccaggtattcagggtttctaaaacctgaccccaaaatacttgtttaaccatttcctgcctaacacaaacccttggctctaatcaaaattatttattttgaaaccccactgtatactttcctaatgccattttgttttttctagaatgcctccctaaacctttctgcttggtaaggtcctatatatacttcaaggtagcacaggaagactgtaccacttatattatgacatgagagctgtgtaattaatttttcttaaactaggttatcatatgatgataggtctccctttagaactggggttcttagtaccctttgccagtctgtgaatcctctggaagtatggtagtgccattaaggtatataaagaaatgaggagaatgtgaaaaaagtaaaagggaggaccagcagaggcagtaaggttttgatggatttgttatttaataagttgagtttgaagaggctataggatatcaaaaggagaaatggcaggtggcagtggaagaaggagaagaaggttaactggagagagagagatacctgagttgggaaatgtattcatggaaaataaatgaatccatgagagtagatagaatttctgaggtccgaatagaagagatgtttgaatattgtatgtgggtccacagtgctaaatactaggaagaaatagggcattaaagatggactcagggacttgcctgtcagtccagtggttaagactctgcattttctactgcagaggaagtgcagaatctgcatgctgcgctggctcagccagaaacaaaagcaaacatggggagtagtagtactgtggaagcaaactaactgaaggtcaggtttgagaagagaatattgctattagtaaatagtaaagaaatcaaagggaatgtggactgagaggtcactggattgacagttgtgttgatggtgcaattagaacccttttgggaaattagtgaggaccgaggacataattttgtgaagcataaagaaaataatcctttctctaacagaattctctctcaatctgagctttatatgcaggaaaaaactcagtattcctaaaagaaacaaaatgcagcacattgtatgagaattttaaaaaattggaaaacagagaaaaaattgttatattaaataacattattttgcatttgaaagcttcctacttttgggggggaaaaaaggccattttggcactcttgctttcaaaggtcaattttgacagcttgaatgtggttctgaaaatgaaaatgaattcctgcctttattcctttgtatgttttggaacaaaatatttatgtaggatccacatagatcataaatatttgaatgtgtcatatactaaaaatatatattgaacaatttaaaatacctaatggtgaatatttattgattaatgtgagtcactacataacttggacacaacaactgtggaaaatttttaaagagatgggaatatcagatcaccttacctgctcctgagaaacctgtattaagtcaagaagcaacagttagaattggacatggaacagtagactggttcagaatgggaaaggcgtacgtcaaggctgtatattgtcatcctgcttatttaacttatatgcagagtacatcatgcaaaatgccggcctggatgaagcacaagctggactcaagattgctgggagaaaatatcaataacatcagatatgcagatgataccacccttatggcagaaagtggagaggaattgaaaagcctcttgatgaaggtgaaagaggagagtgaaaaagctggattaaaactcaacattcaaaaaatgaagatcatgacagccagtctcatcactttatggcaaataggttgggaaacaatggaaatcacagcagatggtgattgcagccatgaaattgaaagacccttgctccttggaagaaaagctatgaccgacctagacggcatattaaaaagcagggacattactttgtcaacaaaggtctgtcctgtcaaagttatattttttccagtagtcatgtatgcatgtgagaggtggaccataaagaatactgaatgccgaagaactgatgcttttgaactatggtgttggtgaagactcttgagagtcccttggacagcaaggcgatccaaccagtccatcctaaaggaaatcagtcctgaatgttcattggaaggactgatgctgatgctgaagcttcagtccttttgccacctaatgggaagagcccactcattagaaaagaccctgatgaggggaaagattgaaagcaggaggaaaaggggacgacagaggatgagatggttggatggcatcactgactcaatggacatgacattgagcaagctccgggtgaaggaggtgatggtgaaggacaggaaaccctggcatgctgcagtcgatggggttgcaaagagttggacatgactgggtgactgagtgacgatgacagactttggcactatccttttttccttttttaaaaaaattagtctttaaaaattgaatttaattcaagattttatttctctttgatgatttttttagaaacttaaaaaaaataaatactgacaaaagatattatggtcagaatatcctctaataatccttgagtatttagaatttaaattatttaaattagaaatagcataatcatactcctattagatgtcaataaagaactacaagaatgtaaatgtctgtaatgtagaggactcagtctttaatgaatttggaaatgttaatattcctcagactgtttgtttaatcattcagtaactttttatgattcttaattctctttgaaaacctccaaattagtgttagactcacactgtgtccaagggaaataaattattaaactttaatttgatgtcacaaacacattctttcttactgtattttgacaagatcaccttaaaattatttgtttttcacaacattaggagttaaaatatgtatagagtccagactgtatacagtgtgggagaccctggtttgatttctgagttgggaagatctgctggagaagggatacccactccagtattcttgggcttccctggtggctcagctggtaaagaacccacctgcggtgagggaggcctgggttccatccctgggttgggaagataccttggagaagggaacggctaccctctgtagaattctggcctggacagttctgtggactgtgtagtccatgggatcgcaaagggtgggacatgactgagcgactttcacgttcactttcaggagttaaaatatgtatagagtccagacaagttaacaaataaggtacagtgatacttgatatttaaagtcagtatgacttagcagttatgatctaccatatttaacagtgtgagcctatttcaatacagtatttcatcctgcttcattttgcctcataaataaagcataccgaacatttactccaaattattttgttgcaaaattagtatcaattttaaaatccatgttactgattttcacatgtagtgtcaacttatttaattttagttttgaaattaatattacatcatttaaaaattgtacaattattgtttatatttattcaagtttagaattttagcaagaaaagtatttttttaactgaggaagttgtgcagttagctaacatgatgactgtaaacataaatttttttttatgttgtttatttagaatggttatttgaaatttcatccattggttaaaatttagaatcagattctaaaatttgattcacacatcacaaaatatatgaataaatgattgtcataaaattttgactgagaataaatggtgttctttgaagtgatgtgatgatgtttaatattaagttggtagtggctttaatataaagaatttatttctaagccttctattagaggtttaatactggatttctaagccattgtaatatgggatgagtttaatgtttaatttattggcttttacatttgcctcagttcattcataattttctgaatctgatggatgtatcagcattttggttgctttgatggagtacagccttccatcttgagacttccagcatattcctcctttcctctctggcttagcttttgctcttggcttgttgtatttaccatttaggttgttttccccacatacatcatggcaccaccagcctcctaaaaaggatagatacacagtttaagagatacagacgcatatacagttgctgttattatatttacctggtgagtgcatctccagttatatgcatagtttccaattttaaatgatttatgtgtctcatacatctgatcaaaaataaaatatctgagaaaggttagaggtgaaatgcataattgaactagagtcaaattaccacatatgttatgagacatttacgtatagagaaaatgtttactttggatgcatattttaaagagttgacattgaaagatattagctattactctggaaagatactttgacgatatgaaaataaagttttgatattagaaagaggatacctgaattactttctggacagttgaaatgtccttttgctttgtgatcccacgtagaaaacatcaagtctttgtgttccggaaatgccttgggcccattgccagcaatctcagctagatgtagtgtatagttggtttcatgatctcccaagtgaaaagagtattcagcataatacttgtcttcccagtcttccagctcgattcgcaagatatagttagattgctttactatggagtatatcttttctaaacccaaccaaaattctcctgaaaaaaaaaaaaaaaagttgcagaaatctgtggattgttaactgtagttgaggcagtgaccgtttattttgagagtttttgttttaattttttcgctgtaagtagcttaactgttttcatcttgaatcctttagagtttcttaaaatatttgttttaaaagcagttttattgaagatagttatattacaacaactgtgaaaatattaatgggcctacctagagtatgattatcctttctaaactggatattatcaggtatatttcacaggtgaaacctattagactattataagtatttatagggttggtcattggtaaaatgttatctaacttttgggtccttatgtatactggctttataatcagctgggtttttttttaatacccatatactatgaagagatttttaagtatttctagagacttggataataatgttattttcctctcacatagtcttggcctttgacattttcttggtatatatattttccttgtagaaaaagaaggaaataaattaaaaaaaatttaaataaaaagcattattcttaataactttttgctgtagtttaaaaaattttatttggaatgaaaaccataacataaatacaaacagttctctttaattaccacaattaatctctctttaattaacccttttattaaagaatttaagggaaaaaagtcagaatttctttgctgctgttgaatcagtatatttcattttaagagttgcaaactacaaatatcttacttccttgaagaaataaatgagtattctggactgtcactcttaggagaagacttgagcctacaaagcgtatcagtgattataccttttagtttgggatttaattggtagtttgaatctaaaactgtttaagtagtcaaatagtcttgaatatttaaaaacttgccataataatggatgttacccattttatgaatgagtacatggcataactcatggatttttataatgtgctttttggattttaaacccatatcttatttttaattagcttattttattttttagtttatttattttgtgatcaaaatataataatttgcattgaattacctaaatttattttaaaccacacattgtataatatacgtttataatatttaaataattgaaatctaaacattttctttagatctgacagttgacagcttctttgtaccttccaacttccaaatagttgatatctaaaatgttaataagaaagcagagtgaccactgataaggatggttttctttgtagctcattcatagcatttactacttatttgaaacatatagtactttaaaatcaaaattatcttttaaaatcataattatgataatcagaagccatccaattaaattgtgctaagtatatacatagaacagacatgtaattatggaaagtataattcagaaaaagacaattgtaataagttcagtacttacaaatgtgtaactatttgctaataatttctaagaaggctgggactgtacctcattcattgtatttctaatgccaaatccacaatgggctttattaatagattcttaataaaatacgttttagttaacaagtgaattaatgtatgaagtcatcttaccatcaagtctcccaaaaccatacttgtagttttcccaggtttcattgaagttttgtgatccatctattcgctgttgaattaatgtccatgaactacctgaatataatgaacaaattgtattttcagtagactgatgctgatagttgtaacaaaatactgttttttttgtttggtttttattggtggctgtataaggtagttattaacattgttatggtaatattttattatttattgtgggcccaagaagttaaatgaagggcaaccaattaatttgtcttaataaacttattgacagcagtcattttagataattttttagataaaaggatggagaacattgaatgaatgcataagtaaatatataaataagacaaatgtatgtactagatctagtacacatatatgtactaggtacagatataaagatatatatctgtactagatacagatatatatccttcactttcacttttcactttcatgcattggagaaggaaatggcaacccactccagtgttcttgcctggagaatcccagggacagaggagcctagtgggttgccgactatgggcttgcacagagtcgaacacgactgaagcgactcagcagcagcagcagcagcagcagcagtcttactaataggtagtgagtaaccttagcttacttactattgtgtatttgtcttaggctggttttacctgatttaacatcacagtagacattaaaaacttgagagttgctaggtctaatggagtagatgccacttgtatgtttgccttggttataaatgatggtacaatcagcaggaatgtctagaatcaacaaaatgttattacataaggtgcatttagtaaagaatggtatctttagagcttgagattttagttgaaattctatggaattgtgactgtcgtctttagccttttttagtaatgtgttattgaaaaactgttttatgctaaaacatttttattagatggcatgttatatgaagaatatcaaatagttattatcaaactgatttctttttgagaaagcgacaaaatgagaattttaagtgccctttcccctagacctaggaaaaacataaataaaattccacgtatgagatattagtatagtgcttggtgggtactaggttgtcaacagattaatgtagaaagagtgaacatatatagaagaaactaacaaagaactttttttcctctatgaattacattaaaaataaatgtgttttgaacatatatcattttgttgaagcttggttgagaatggagactttgtctccccatctttttgctttttgtatggaaagtagaaaccttgaagagaatgccataatctttccatgcatattcaacaattgttaatattttaccttattgctttataaacaaatatgtacaaatatgaattttattgtgctatttgaaagtcatttgcaaacatcatgacccttaatcccttagatactttggcatgcatctcttaaacgctcttaaacatgagattattctcttacataactgtaatatcattttctatctaagaaaattaatgattattacctaatagcaagtctatattcatatttctctgattgtcttaagaatgttttattgggtttaaaaaaatcactaagatccagtttaggttgacacatatttgttgaatgtatctctttactctcttttagtctagaacaggccctgagaatagggatttttaatggaaatgtcaaagatagaagaaaaatttgatagtaatagcttcaagacagaaacacagcaaattatcttaccgtcatgttgtacattttttgtttcattcaagtgaaaaaagggagtagttcttggtgctcttggtttagaagaaagagaattttctgtggattctttaataccagttcttctcaactgataaaagaatacaaatctacttttaaaaatttgaatatttaattaggggaaatctgagttcataatatgttattgttttcagtggtaacagggataaataatgctgtatgtattatacagacttcctgttctcaaaatatttaatcaggcacattatttaatgagtttaaaaaatagagaaagatatcaaggcaaaaaacagaaattgatcaaaaaacagcaagaccaaaggcagagactttggttaaagtattttaatatgttctatttatttatatgaatgtaatatatattctgttcagtgacagaggcagatttcaaatttcataattctcagttgtaggtcttaagatataataatagtaatttgagcaaggttgctttcttgatagtttttgatatgtaaatgtatttgtagaggtagcaaattggcaggtttatttgtttgcttttcatatattcaatatttcattgtctgttgtgctgggtttgcaatttattgactgatagtttgtgttattgatgacttgagaaaagcagagtatgtaatatcttgtgttaataatgttagttttttgatgtcagcataaatggcatttcttaggatataattcactaggctctcttgtaaagttcacttattgtatgtttgtcttttctactgagtgactgtggtcttagaataacttaactttagagtttggtttgtaaatttaaatttgagtaagttgtgtcagatgatctaaggcttcttccaacttagaaatttattgttttaaattcttcatacattttattactagacaagatgtataccattttataatagtgacattttgcttttgtaagtaggttcatttactcatagtaaaatatgtaggaaaaaagagaaaaataacatacagtaagaaggaaattgtggaaattaaaactagttggaaaaaacccctttttgacaattagcaaaaataccctactaaataatgattgataaattagcaaaagtaagttactaaaattatgagtcataaaattactaaaacataatgtctttgttttgtggaaattataatatttgttttatagtccttggcatctattttttttagccagtttcttcaagtctatattatttttgaaatttctgaatggctgtttaatagcattattactaattaatatttttgaactatggtagtatatatatattggaatgcttagattttggcatggctttattctaaacaggtatctcccttcctcacctagccagttatttatattgtagattaaattatactgttgggtattaaactttaattattaggcatgtagcttctaataattataatcacagcaagtttttattgacttgtttgtactaaatgtgacattacctttattaactcagcatgtattgattaagtgtttactatgtatcagacagtgttctatattttggggtctacagcaattttaaaaaaaaatgagaaacttctgtacatatggatcttacattctagtgcagggacagacagaataaataactaaatatatatattatattaaataaaggtaagtgttaagagaaaaaagagagtgatgaaagaggtagcaggtttcaagcacgggtgtaggggattgtaacttctgattaaattatctgggaaggattctttgaggattttgtatttgagaaagacctaaagggaataagaatgggccatgctaataccaagatgaagagcattccagacagagagccacataggcaaaggccctgaggtagcaacttgtttgatgtgtttgagtagcagtaaaaaggctagtatgactatagtagaggaaatgaagtcagtgagatgattaagaatcatctgagtctttttgggccactgtgagtgagatgtgaagccattgtggggtttcaaagagagacatagtgtaatttaaattttaaaggaatctctttggctgctgtattgaggatatactttgcatgaattctttcttttttctcacagccatcctataagacaggttctcttattgtctacctagagtatgtgaggaaacagagagggaggaaatagagaggggttaaataatttattcaaggtcacacaaaagttttagaaccaggattcaaacccaggtagtttactagcttcagagcctgcaaacttaacagtcatgctgatgtgatccttttattcattatccagctataattattgtaaataattttagggtctgtattttcataaaccttatttttatgtaaaagattggacatactattaagatattgacttacctgattttctatttcttttatttgactttgctgttggtttaactgtctgtattgttcttccacaatctgaagaaggtctttaatgctattatcttgctgttctaccaaagtctggatatagattgtaggttggttagagatttctttctttcctattaaactagacttttaaatttcctatagcactgtcacagtctaattttttaaactaatagtatattagaaaaatgaatactggcaaaccttttcccctttcatgcttctttcacatagcacatacttctgtttttgttttttatttaaaccgtaccatctctaaaatctgatttcctgaactttaaactacttcaattatatggaggaaaaaaacctccagcattttagtgttttccatttactgtattacttttataaattttaaagataaaatcgttacacaagttatattcctttagctttttacttgcctccagtaattcacaatattgtaatagtttagtgttctaaatttcattgcttaactgacttgtaattttcatctgatattcaaagttcagttattttcataaatttgttagggaaacaaaaaccagcttgaaattatcatgggaaaatttatttcctggaggctttttttaaaaaatgagaaaaatacagtgtttcagcagttcaactaagtatttcaagtagtatgtcttaaaatatttttttgaaaagatccacattgaaaacttaatcatgctctttagtttctacttactttaagtgaagttacttccaggtgttcctgaatttgaggttgatttttaattaaattggttaattggtcctctaggtatctcactttctgttgcagtagaattttctcttcaaggagactttcaagttttgagtcgagttcaagtgacatgttctttacttcttcatttttgacttgcagtttggatgtagctcttctaagttccttttcttcttctttgatttcattggtttgcagtgataagtcataaaaggactgatcaaatatgttgagtttttgaaatatgtcattaatttggcccttagtcttgtgaacaaagtctttaagaccatgtcccaactgaagtaggccattggctaaaatttttacatcatctaacatagcaaatcttgattttggctctggagatatagaatcaagtgatgtatagtcttggtcagttctggaagaaataactagaggagcaataaaaagaaagagcttgatagtgtacatttttatcctaattactcactttcaagcgatttggaatttgtttttttcctgggagcataccaagacttctgaactctctatataacactatttgccacagacacagtaaggttggcaggtcaatatagttaatcattaagctgtgtaaacttgtatgaatgtaaccttccagactgagttagatcaatgctaaatgaaatcaaagaaatgagcaacaaccttaattgattatttaaagtggttattgtatttaattttgctatattgtaaactgcatttttagtgttaggagatctacctatttttaaaagctcattttaatttgtcatgatttttaaagagatttacaagtaaatatcaaactcttttgacagataaattcatcattaaagctgaggaaaaattaatgaatcaagtatgcatttcctaaattgtattttagtttttttgaaacagtgatgatcctccaaaatatgttctctgtgaagccttcctccacatctgcaggtgatgttaatgctgtattcctatgctactctgtttgagctaatgtatggttatttattccttattatttgtcactataattatttgtttgcatatttttttcttcagatgatctatctaaaccgtgtttgtatataatcacaaaatcccatatctaaaaggtatttcatcctttttctctgttatattctctgtctctgtgttctagcctctttcccctgtacccactggaagaccaatagattatgtggttccagtgtcaagaattatttgcccattataaatttttctgtagtttgtgaacttgggaacaatattcatgatctaaatttaataaaacctttcttttgattatttagccttaagggcttttggatagaatggttacagtagatgtagtaacccatcgtggttaagagtttcattctggagagagactggctgaattggaatcctgactctgctgttctttagttctgtgaaattacttagcttttctgtatcccttttttcttgtctatcaattgaagataatatatactttctatagtttaaaaattaatattttaaagcacttagagcaatacctagtgtttagtaaatacaacatggtattatgtaccagctattcttttgtaattagaaagtcaatgcatttatgtagtagtacagtaatattttattgataaatattatctaatcttatgttaagatgacataaattgggaaatttttctagaatctgagttttcttactttggtctcttgaaccttggtaagtacaaggaattatttcttttgtttagcttgtgtatactttttctaagtgtccaatatagaacaatataagtatttctgtttgtaagagaaataaagaatgcaagtaaataaaagtatacaaatacttccagtagtgaagaagaaaagcaaaacattttccctttgttttcattttcattttacctttaccactggtacatgttgtgaaattatagaagtgtatgttgaactagtgaaaaaatttgaattttcccccccttttaaaaggaatatgttagtgttgtgatcattggtcatgaagagtgtgtttcgaagcttgtcttaattgaactctctccttttcttgcttgaaactattgaccctgatatttcatccaccttttagttgaggggcaattgaaatgggccaacttcttgtctctgttgtactctaagctgtttattggtaagatctgtatctgtttttaatttatattccatagagcacttcagtaaattccttacatgttggagaaacaataaatttttattgaacgaataagataatgataattcttaacatgggagtttttcaaacataaaatttgcatgtaatagatactcctttttagtattggaggttctttacaatgaaaagaatttgaaaagtagtcccttccagtgcatgaaagtaactggataataataccaaggaaagactatgtgtaggaatttctttttattttagttaatgtgctggaatattaatactttctgttgaagttatggttgtaatgcctcacatataatgctaagagagattagaggcagtggttgcatattcttggtttataatattgtctttgggtagaaatatctgggtaatttttttcttatagtagtttgacatgttatgaaatataattaaaataaataaattgtctaattacaagctgtggaagagtgtcaacatgggaaatgtaatgtgtttaaacagaaccctaaccagatataaccagtaatgttataaaaacttaaaatttttatgccaaagaaaataagaaactaagcaaaattaagacctaatttaaggattcccagtttctattaactaatactcaaaacttcttagctgcatggaattataggacatctaggatctttgtttaaaaagtgacgcaaagtcctttatcctttcccaggttgtgcaatcttatggagatttgacttccaaataaaacacaaggcattttggatcttgtatccctgttactttgaatatagtatgtccctactaattttttcctttttaaatgtgatcatttgtttttgaattaatatgtttggtagaaagactaaaagtaactgagaaaaatattgataaatagaaatatttatatgaactaatgaaaaagtaatatattagtttccttttcttctagaatagtactggccaatggaaatacaatgtgagttatttatgtaaaaaactgaaaagagatgagtgaaattaatttgaacatatgttttatgtatctgatatatcaaaaattaccattttaacataccagtatgaaattattaattaggtattttatgttcttttttcatactatcttccaaatctagtgtgtattttatactttcaggatatgtcagttagaacaggtacatgtaaagtactgtgtagtctccaggcaaggatattggagtgggtagccattcctttctctaggggatcttcctgatcccagaatcaaacctggtctcctgcaacacaggcagaattctttactatctgagtcaccagggaagccctgtactctcactagactgtagtattggacaacaaaggtccagaaggtgagtgacctttgaaggaatcattttatttatcttagcattttttcccatgtccattaactggcattaataaatgtttaatttttatactaaaagtacttaatgtggaaacccaggtgttagaaaatctttaaaaaaataaaaatcctcactcttcactgttaacattttagggtctgtcataccagttcccttggatgactggctaaatgtaatttttatttaacacaaatgagagtatgttatatatagctcatgttttttatatatgtacattgatttaagactttaacattttaaaattcattttcatatgagtgcctatgtatttactatatccttttaagtggctgcacagtgttttattatatagatgcaccttaatttaatcatctccctatctttgatactttaagttgcttgtaattttctgattataaacaatatgcatagaaaatatatttatattcgtatataaatattttcatatgataagttcatagatgttaactttcaaagtagatttctctttgcagattatcctaaaaggattatgccggtttacatccctaccaaaaagagatgagagtttcttttttctcattaatttttaccagtattttgaatgagcaagacaaaaaatattgctaaacctggtaggcaaatatatctagttgattttgctgtctctctgtcttgctctctttgtgaattatctgagtattgtctaagtctccctctccccatcaaactccctgtcccatgtttgtttgtctctttctgaccaattttaggaattatttacatgtgatggatattaactctttgtcatctatgtaacatcagtgttcttccagtttgtcctttgtctcccacttgtgtttttggtatcccctgctctgtagaggctttaaaatttgtcttttatgattttttgtggcttatgctcagaaatgtcttccttacctatagaatatgatctctttaatgctttcctgttagttttatggttttatttttattatttaaaacttggatttaatctagaatttattttgagaaagtggtgaaataggaaatcagccttaaaaaaggctagtcaggtatctcatattatttaaaacttggatttaatctaaaatttattttgagaaagtggtgaaataggaaatcagccttaaaaaaggctagtcaggtatctcaacaactcagcactttttattgatctaccttctctctgctaacttaaaattcctctgaaggaatattacaaatgcaggataaagacttactaggttaatgtggaactttattagtggagttagtagtccaaagaatgaaaaagaatctggtctaaatgcgtgcatttcaccttcagagacaaattgaatttaaaattgtattgcttatatgagaaattaagcatagcttaatgtttagttaattcccatttcacttgaaaatccaaactccagaagagttaagtaactatttatgtgagttctgtactattcattcgttcagtcaatgatttattcataggagaaactatcctaggcattggaaatagagcaactaactagatagataaggtccttgcattcatggagtttggccttaagtaaaggagatatataaacaagaaataatacataaacaagataagttaggattattttaagcagattatttgagttgcaaatggaataacaaagtgatgtgatgtttgagagggaaagtgagcctttctaaaacttgaaagatggaaagggactggttatgtccacatccacaagctaaaacagtagtaatcagaatgcagaaattgaggggtaggaggaaagcatgatgtgttttgctgtgccgtgcttttgcctgtctatcttaaacttgcaattttctcattgaaatctgtgggcagattctttagtttttaagtccccttgtgggcccccaaagacattcagttttcataacatttattgttctgcattataattatttgtctgtttgattctccctccagacatgagttctatgaagtcaagaactcccttattttgagtatctagtatactgtctctcaataaatgtttgtcatagtgaggaattataagcataataaaggccagtctgttgtcaagtgctttggatcctgttttctctcaccatttcaggaatcttacattcttgtctatgtgtgcaaactctgtctcacctacattctttccattaggagttaatcacacttcaacctttccagtcttaaaaagcttcccgaatccccatgttttgtctccaaatatctttctcctcttctcagctctactcttcagaattttacttgcttcatttttttcgtgcctactactcttgaatcttacttttgtctgttttcagcctaaaattatcagtgacttgtgctcagttgctcagttgtgttcagttttctgtgaccccatgcactgtagccctccaggctcctctgtccatggaattttccaggcaagaatattggggtgggttgccatttcctcctccaggggatctttccgacccagggactgaacccatgtctcttgtgtctgctgcattgcaggtgaattctttaccactagtgccatctggtttgattaataatttttcctgtagtgctaaaagggtaagaacttcaagagcatacctatggtgctttacacttctaccagttatttcagaaaaaaggtaaagagttggtctatgaaagccttatttgcagtagccaagatttggaagcaacctaagtgtctatcagcagatgaatgggtagagaagctgtggtgtgtttatgtgaatttgctgaattcagttgacatttttcatttctttcctcatgtggtccctgaatagcatttgatgcttaactctttaattctgcttgtaatttctttcttttacttccatgtcactatactctcaaggttttccttctgcttctttgtaggtgactgatcagtctttgtaggctcatcctctcccggatgaccacaagatcttggagttccttaagactcctttgtttgaataacacgcaatgagtaattaaatgatactttagttctctcatagttaatgtccttggcagtgattttcagcataggaaaaatggtatagatgcaaggtagaaaagaagaaataaaagccttatagtcttgaatgtgaattatcactatgaagttaggtatatttcatgttaaaagcattctcctaactctttcaaaagaagaaacaatgagtaacccacaattagtggcctggaaaaacattttccactttataagccacagctccttggagaaatagctgattccaggtttggaaagaaagtgtataagaagaacctgaaacaagaagagcctggaattagcaagaagctgtggaagactagtatgactgaatcaaagggcttatgagccagtttgaattgaccttttcacttgtcaaggatgatgcaatttgaacaccaataaagatagtaactgcaaaatatttaaacctgttaatatgtttggttcattaatttataagtgatgctttaaaaaaattgatcccttttagaggaatgtaatgtaccaactgattattttgaaaactggcagataatggaaaagaatgaagcatttattcttgcttctcatataatgaatggctcaccggcaaagcaaatagtagataaggaaaagtgcttttcatagagatatttcagcttataaatatagaaacagtgatagaatattaccttttggcaacccttaatgagttaacgtatttaggcatggatcatcattatctactaattgcgcagaaagagaaacaacaaccaaacattttcctcctgatagaagatacaatatcgtttatgtcgtatccctgacgtttgtcctatcttatgacttaatgtcttatctctgaaatttgaccaaaggtctagattcaactttcagtttatagaaaacacagaggcacatgttaaatgttactacagggtgcagtcagtaaaatctagcctttggaaaaatctacacaaaaataattccgtttcttcagcaaatgccatagcagtggtagaagatgaaaagacgtcattgtgatcagctcagtatctgtctctttctcccatagctactgcatacttctctcacaacacagcactgttccgaaatgttcttgcttataggtatttccctgccactaaatgtgtgatgataccttttcctcttttgaatcttgtcatttttaacttttgacattttaagtatagtgtgtcttgatgtgggtctctgagttcgtctttggaactctctgaatgtcctagaactagatgtctatatctttcctcagattggagatgttttctgccattatttcttcacaattttccataagtaggttaatgccactatacatcctgctttggaacctgcttttttttcattcaacatgctgggtatctctttctgcactaataaatactgctgtacattttcattttggggattctgatacgtatttgtcttattagtatgtcttaattagcccagtactgatgaacagatttctttataattatttataactatttcctaatataaacaatgtcatgagtttctttgaacacatgcatttgtacatatgtgtggttctttccttagactagagatggggttgttaggtcaaagagtatgttcatttaaaatttctgtattaccctaccaccttccagaaaatttagacctattttcattgccccagtatttgattaggagggttttattatacttgaagttctgttcatctgctgtcagcaagcgctagccttcaggtaaagtaattctcaatctttttttcttttttaaaaaaaaatcatttttaattggaggataatcattttacaatattgtgttggtttctgccgtataacaacatgaatcagccataatctattttttcttttcttttgaagccctctattttgatgctttttcttgaattatttcttatctctgtattggcagcaggtactgctaccagcagctgtgtaaggtgcaactgggcttatgtcaattgattgtagagtaatatgtgattttcttatagtagctatctaatactgttatacctaccatattgccatatgtgttttttgaacaataatgtagaatattatacctcttaaaaccttgatcacatttatacaaaatgccttatttataaatgtcatcctgtaagataatattagaattgtcttttaatttcttaataatgtttctatcctcacttgtttatttctcagaagcctcttttagaggaaataacacattttgaagtctgactgaactgtattctgatttcagctttgccacttggttgtatgtgaaaatctcttaacttttctgggcctcaattcatctgtaaagtaggggtatatttgattgctgtctgtttgaatgattactctaaggatcaaatctaacattgtatgtaaaaatagcatagtgtctgtagagcaaatgctgataattcagtatttgttcatttgtttcttttgtagtgtgtagtagtgatacatagtgttttcagatatgttcactatcatgtatactattgctttcacagaaaccttctctacatataccctcagagtctcaattttgccaaccgtcaaggttctgccagaaatataacagtgaaagtccagtttatgtatggggaggatcctagcaatgccatgccggtaagatatgctctttacaatttctgttcttcatatgtggttcaaatggtggtggcgggggtatcacttggttggcaggtctaaactggaaattaatgtgatcttgtaaaccgtatttctgacttcattacttcctgtacaggtagtaatgagtttactagaagtcttgtttattgaggacttggtatatgctaggctcttccagagatacaaagatgaataagacttgtaatttagaggatataagaacaacacatgagattcaaaaatagtgaacttcagaagagggccagatcagaatcacctaggatgctcttaacagagcacagatagctcttctctttgcttgcatctgtgattctgattcccctccttcggaataaaagggcaggtaagggaggtggaaagtggtgggcagtaaatgggggctgaaaatgctttctaataattctaatttgtatgtttcttctcaccttggttgagaacctctggcaatagttctcagctttggctgcattttacactcacacaggaagcttttaaaagtgctagtgcccagactgaatctcattccaattagagggacaccaggtggataccattattttttaaatccccccaagggattacagctttcctggtagctcagacagtaaagaatctgcctgcaatcttggagacctgggtttgatccctaggtcgggaagttccgctggagaaggaaaggcaatccactccagtattcttgtctggagaattctgtgtacagaggagcctggctggctacagtcagtggggtcgcaaagagtcagacaccactgagggactaacactttcaagggattaaattttcagctaatactgagaacccaaggtatgtgctaattattagaagattgatagtatatagggattcaaaggcctagatggtcagaggaaggagaggatgcctgagaagtggttaaaatgttttaacagtgggtctagaccatggggaaaggaagaccgttcatgctggagaatgttcttcagcggagatagaatggtgagttgccagtgagctagaacaatgcaagataagtcagaaatagtaaactgaggccagactagggagggtcttgactgcccacatggtcattaaggacttttgggacactaataaatgcaagttccatgaaagcagatttttaacttatggagtaggagcatctgcagatgttcaccctctgagagaacctttgtggattgaaaatgagctaagaacaggtgcattatttacagttttattttggccttctatgtgagtcatttgaatgaagtccttttgattttctacttactaagaaaactagtttcatttccactatagcctcaatttcatcagcatttacacaaattattcatctttgtattcttctatggcagctttttcaggtctttgcatataatgcatgctgagcaaatatttcaataaatgtagaatttactcttgaggtttggaatgagcaattcatgcttttaactagctcttcatttctgctgaaggactgaatgtaccgtcattgttaatgaaaagatactggacggtgaaaatagatgctttattatcctgtatgtgaatggtcatatgaatttgagcttatgacaaatgtagtgtatgtaaaataatttgtttttattttttgcctaacaaactcttccttgtcttagcatatatatggcctcctctgcagcatcccagctgcatccagccacattggtggttagaccactctttcttttggtgctgccatagtgtcttcacacttcttttacaggctgcttcatttatgattatatgtttatttctttaccttgtccactagactgtgagctccttgagggcagggaccatatcttactcatatctgtatcttgatgcctgtcatagtgcttgacataattgatgctcagttcatgttgatgaatgattacaaatacatgttaaatggtcaaaggaacactttccactttatttcatgcatgttatgaaagtaaattactttgtgaaaaacaatagcttctcagaggggaaaaatgtactgcattccattcacttgtgtattaatgttatgaaactataatgcttttatgtttatatgagtggctggtttgaaagaatatataaccagacatttgcttatttttgtgtttgcttattttttaaaatgactgttaaaatgggtcttaagataaattttgatcaaataacatgatatgataaaatcgtaaatttcataattctggcactgaagcaacatttttattaaaacatagtaaggtattcttagaaaatttttgaaattagacatatctaggagagtcataattattctacttttacatactcttaaaaggacctgcaaaaagaaacatatatacctgttattatgttctttttatttgaggatggtgccagttaaccccttctcatgaggagtaaactttgagttatttttaccacttgtgtgatagaagtgtgatgacctgtccacatacctattcatgcatgtgtagaatgactggccagacttaaaagtttaatttgtgactagataacattgtaagcgtgccacattggaatcatagctgtgaccttgacatcaataagacatttatctagtcagctgccctaattaaccatagcatggttgggtagaattcacgagacggatatataagactgaattattttacctcaaaaatgtcgctaaaacttttagaaacatccagtctctaaaagtggtaatttttttttttaagtggtggattaaaaaaagcataagtaagaatagaagactggagctcctctttcattgtagagtagcttacagtaaggatacagagcttgaccaaaattaggatattttaatataaatcatttatatttgacatttagaattactgttgttttagtagagaagccaccgatttgtatagtagatatatgtcaccattctaggattgtactcttatataaattccaaattatgtactacagctagattttaaaatgaattctttaccttcttcaagaaaaaggaaagaaatgtaccttattgcccaatagatataatggatagaaactttctgaatgtttgaatgtcagatgggtgtgtagttgaaaagaaatttacagttaagcaattgaacttataggcacatgttcttcattgggctgattttgccctttgttctcagttattaaatcagaccaattcttacatagatatgaaacatctagcatttattacaacaaagtttcaacatgctgttatttgttacaggtaatctttggtaaatctagctgttcagaattttcaaaggaagcctatacagccgtagtatatcataacaggtactgaattcaaatatttctttcaaagttactcacttctcagtggcattgttagctctcacattagtgtgtttactgaatgctttgctgcactgaatgtgcaaattcaagacagccaacatcagagttttaaatttcaacctgtagatatacattctctccacagacatctcaaagttaagactttatatacaaaacatcttttctgtcaaattctctgatcctttcattttttattatattgttgattaccattgtggcctctggtcttttggtctctcgctgttgttttcacctacactttgtagttttacttaaatctctactaagcttgcacccaagtgcaacatccagtaaattggtgcagcatccaataaatctttgccttagtgactttccattttagttctttggaaaattgattgttaactctggataacgtaatttctgctttctttctcctcctcctttctgttcttcctcctctaccttctcctcctcctcctcttctaccatccccacctcttcccctccctcactcaccttcccctgctcctaccctaacccctcctttttctttttttttattactgggtgctattggagaaaaataaaaattgtgcccattgaggccgtcacgacttactgttattttatcacatgatgaggctacagtattttaccttctcttggccccactactctttggtaaatttagttggcatcacttttttgccctctctcccgtttggcggtggctattttaagcttttcttccccttcctgcggctcccacctcttttctgtttgctactcgtagtgttcctgccttacgaagtcgattgagaccatctaacttgatatctgtgaaaacctctatgcttttcatcccagattatctctgtgtggatctgcctttcctctgttatgaagttggtaatggtccactccctccttctgtggatcttttcatctctgctctcaaagaatcttctccagcctctgcagagtgtgactccatcagtgactcctttccttaacatcatcggccttctgctccattcgctccgtctcttatcgccacagaatttgtttcttagatacttacaaaagcaaaagtctttattcactgctgttatatagcatggcttttccttaccctccctaaagctttcttctttcttacctttattttatggccctctctcggtttacttttttcctataataattattctaatttttctttaaaacatacgccttccacacaaaacactaaaattttgcctttaaccttctttttctgtagtattctctgcctaagtaatcttgtatgtattccagaatcaccttcaatgaaaccgctactactctacctttatgtggcttgttctcactctttattttccgtcctaaccttctttctgaggtatagacgtgcattttcagatcttttaggtgtattcatttgaatgcctgcttccttcttaatttccatgtgtttattcttgactctcttcctaaaccaatctctccctgttcttattaatggtaccaccatttttccagttgctctgactcagaatgtaaaccattcttaacttccttcttaatgtctctaatccagtcatcttttacttcttaatgtttatatttctgctccattacaaacatatcctgtgctgtcctgtttctgggcctttcttggatcttttttcttttataatactaattccctctatttattgaactactcatagtttaaggcccatatcatgtatctcttcctagagacagttccttgatcccaaacttgaaataatctgttcagctcttctcttgaaacacttaaccttatatgctctataccaggggtcagcaaacttttctaaaaagggtcgaatagtatatattttaggacttgtgcaccatctgctcttttgtaactgctcagccctgttgttgtagtgcaaaagtagccatgcacagtaagttgcaagtaaacgggcatggctgtctgccaataaaaatttttaatggactctgaaatttaaatctcattcagtattttaagtgaaatattatttgtttgaatttttaaccacttaaaaatataaaaatcattttttactttgtaggctgtacaaaaccaagtgatgaactggatttggcctgtggccgtagtttgccaacccctgctttatagcatagctgttgatatatgtttgtcttacttatacttctgctaaatatatattttttgagggtttttaaaaaatattcatctttaaaaccaccgtaaaagtcacacagtgcttattagcctaatggtgggtaaataaaaatacttattgatgaataactcttagatgtttaattttccgtaagaaccttcacatactgatttcaggaaagaaatgaactgaaacactaaataccaggaaacatggagaaagaaggttgtaatttcagtttgtggctgagtctttattttgttcctctcagcattagtagaattaaaatgatagagtcgaacactactagtaaatacaactctctcataattcaggggtgattagtaagtaatacgatctatagcatcctatattcactgaagtcaaaaaattatcaaatggcaggcattaactatctttctttaaactttatgccccttacctgttagcatttttgaagcttatttgagatggaagaatatttgacgtatttagcatcagaggaaaatccctagttggtgggatggctttcactttaaagataattggagccatacagtttggatgtattttcattgtagataactctgagagctactaaccaaatatggaaggttgggatactaaggttctctctcttttaactctatatcataaatagcagtcatgatgctatttatgatataccatagaaatgcatatgcttataccatagaaatgcccatagggccactctcaataaatattgagatgcaggttctattggtttgatcagatgtgatatttgttgtattcctatagtagctgtgtgcactttcaagcagtgggacacatgcaattttgggtgttctctgattttttttttctgttcttttttctcttttcctttttttttaagctgtcagtcataactagtccatgtttttggtaacattatttctttggcaatgggataataaatacaagatagtctatagagagcccatcttgataccagattgtctgaacctatcatttttcttttttaaaaaaacagaaagataaacaaattagtcttaatataaagctgtactcctataaaagaaaaatgtttttctatggtatggttatgagatatactataaaaaacttatttttctatgtaatacatatctagattggttataaatatagaaagccttgccctagttcctctcctatacagtttccaatctaatgaagatctgagcatcaaggtggtgattattaatgaattttcaaatagtaggattactcaacccattaatgaaaatgggatgagaaatttcagaaacagtgacagctccctcatctggaagtgtaggagttagttacttagagtttggaaataaaaatactttggactagaagaaaaattaagcacgaatcatgaaattaatttaaaaattactcaggtgtacaaatgcagtaattatttattttgaacacattattgattattgatctgttttgttttgtttttttgtatgaaggtctcctgattttcatgaagaaatcaaggttaaactccctgctactttaactgaccatcatcacttgctttttactttttatcatgttagttgtcaacaaaaacaaaatactcctcttgaaactcctgttggatacacagtaagtatatttttgttatttagctctttgatcataaaaataattacaatatttaagatatactttgtgtccattattatttgaggattccttatctgattctccacattggttaggaagggtaatcataacaagaagatgctcattaatatagttaactaatgtaattaattaactaacatgtttaaacacttaggtgttggtcctgattattgtatatttatccaacattactgtgtaaatataacagttttaagggttcttcagaagaaaatggtttgaatgtaacataactcaaagagacctctggtaattaaaacccctttcagttgccttagttaaagcaattaaaacccgtgagtattttttgaaaatcattgcttttgaattataaacctaagatgaatacatcatactgtgctaatcacagttttgtcagaaaggtgtgccttcacccaaaagagaaaaactaacatttgattcatattttttgtcttcagtttatgacatgaattttgctaaatgttagaaaataagtttgtcatactctttagttttattttcaacatttatgtctaatcaaatctttctttccctatttacattggcacattaccccagtttaaaattgattcactttatggcctttttctgctgccaactttcctttgcctaagaaggacctactatagatttaaatattgcatagttagtaataatggcttggggatccttctcaagccatggggaaacttctaaagatgaaataaaggcctaattattattattacctacataattaaatccctcggtatttagtgatgtgagactaatttggcttttaccatgttcttgaaacagatttttgaagtaatattaataacaaacatttaaattactgttatttcttttttatttaaaagtggataccaatgcttcagaatggacgattgaagactgggcagttttgcctaccagtctcactggaaaaaccaccacaggcttattctgtactgtctcctgaggtcagtatctctcacgttgaaattctccagattcagtgaaatgagtttttcattacaaaggtagttttctcaaacttctaagtatatatatagtgaagtactgttattttctcctataattaaaattactctatagaatactctgaagcatttatatgctgttgatttttttccctaatctcgtacacctttgaaaggcagtgtagtatggtttccaagacttcaccgctcagttatgtgacctcaggtaagtttcttactctgctaaattgttgaagtcctagaccccagtgtgatagcttttggagatgggggcctttgggaggtaattaggttagatgaggtcatgagggtggggcctcatgcttggttagtactctgtaagaagagacactagagagctttctctctctcagctgtgtgaggagacagtgagaggtggtcatctgcaagctaggaaggcgttctcaccagaaactgactatggtagcaccttgatcttggacttctattcaggctgtgaggaaataaatttctgttacttaagtcaaccagtacatggtattttgttatggcaacctgacttaaggcgctctctctctgcctgaattctcttcatctgtaaattgaggaaaataagtaatgcctacagaaaggattgtgttgataactgaatgattagtagcacttagaccttgggataatgccaggcacgtgaagcgtactaaagaagtgtctgctgctaagtcacgtcagtcgtgtccgactctgtgcgaccccatagacggcagcccaccaggctcccccgtccctgggatacttcaggcaagagtattggagtggggtgccattgccttctctgagctcttactttagcatgcatcaaaatcacctggagtatttgtagtattaccagttgtttaaacttagccctagagtttcttattcgtaaggtctgggctggggtttgattattttcatttcttacaagtgcccaaatgatatttatgctacagactgtttttaacgaagtatgtgttcacgggttacttgggggtcctattttttaaagctgaaaatgagtattttgcattgtaagagctagtgctgtttcttgcattgagtagttacaatatactccaccagcttttttttaaaaaaaagtttcaaagcctgtattatttacctcagtaaagataccacatttcttacctacattaattaccaacactaattcaattagtgttgaattgtaatagaaaactgactatatttggttttattttcttcatataataaaaataagaaaccatgggaaagaaagcctatctgcctattttgttgttgttgagacattctgtttttttcatttgtttcaaggatgtttgtaattgtttgtgtagcctttttttccctgatggctgctttaaactcctgtcagatctgtccagtatctgtgtcatctaactattgatgtctgttgattgtcttttctcatttaagtagaaattgttctggttcttgatatgatgtgtgatttttttgttctgtgttttagcagtactgagaagtcctattgccaggtggagagaaagattcacactccccactctgcatggggcttcccaggtggtgctagtggtaaagaacccacttgccaatacaggagacataagagatgtgggttcgatccttgggccaggaagatcccctggaagcgggcatggcaacccgctctagtattctttcctggagaatcccatggatgaaggagactgttggactgtagtccatagcgttgcaaagagtcagacatggaggtggaatggggctgcggtttgttttcttggcttttgccacattagggcaattgttgggtttggctagagggagcagactttttctcttttccttttagaatttctgggttaccagcttctctagcaaactagtccaggatacattggagaaaaataaaactcaggaaacactgccttgtagttcctttgatcttgaggtccctagcgcatctgctgcgtcctttcccctttcagtctctgtttcttttttcaagtatcatgttcagggtttttagctgtacttaccaggaagaatagagagaactgatgtattgtcttttaaaaataatgttttgtgatatgattttaattaacatcccaagcaatttatgtcagaaaaaaatgtttcctaatccttaaaacaacagacttcctttgcttatgaatattttaaagccaaattaaaatatgagtttttaatataaagaaaataggatattataaaccaataagatattatagttgtgaatttattggcattaaaagagattcacaatgggataggtgaaaagcaggtttcaaaatatgtttgatatcacctatgtgaaggtgtatataaaaatatatatgtgtagagaagatttggaatgatataaagggatatgtttctaggaagctagaattttgaaggcatattttctgctttttgctccttgagccttttgcttctcttgtaggaaacattgattttgtaataagaacaaaatataatttttacatttgtttgtagtgcataaaatatatttccatagtattttttcttattgagatattataatttttgtttcataattcgtagttgtttcagcattcataatcaacttaagcatctgtgatcattgtattcaatgtcttataggttcccctacctggcatgaaatgggtagataatcacaaaggtgtttttaatgttgaagttgttgctgtttcatctatccatactcaagtaagtggttttttaataatttttacgatcacatttcacttaaatgaattgaacttaaatcagttttttctgttatgacatttgaaactatatatcagtttaaaatgtataggtttagaagtaactttttaaaggaatcaacaaaatatcatttaatgtcaacaaaagcaaatattttccttttcagaatgttattgacttcattttgagcaattaagtgatttttttccccctaagtttctagaacatagcaggataattagagttgaaaaatgattttccagttcattttatttctcatagacttagatacttcaaatggaaaaggtccttggggatctccatatttttctcaatatctctggaatgtgcaaaggtcttctgaaagactttgtatttactcattctgtaactggaacgcttttcctctgacattcatttgacttctctttataaagagaagcctttgcatgtgactcttaaacatagcagctccatcactctggatcgtcttacactgcactctttactgcttgttattttcacttgcatgctcttgtacttttgctttgtctcactctttctctctctccatgtgcatatatattcattcatatcctttgtttatgttctttctcccattatattgtaagctccttgtggtcagggatgttgtcacctgtgaaagagtgagccttcctttcaaggactttacagtgaaatagaaggaaatgtgaaaataatcataatacaataaagctagtattatgttagatatatgaactaaattttttcaagtagagagagttgtcagttttactgggaactgagttactgcactggtgagtagatatttatcatatatagaagagaaggtagacagtgcagttgatgtaaagcaagtgcaggacttccctggtggcacagtggataagaatcttcctgccagtgcaggggacacagccttccctggcaggaagagtccacatgccagctaagctggtgtgccacaactactgaagcttgtgcacctagagcctggctgtgcagcaagagaggccactgcaacgagaagcccgtgcacccgaacaaagagcagccccctctcgccaaaactagcaaaggtgtgtacacagcaatgaagacccagtgcagccaaaaataaacagataaagcaagggcaggtaatctgttgtgaatgcaatttaaagtgcatggaaagtcaagatacatgaacatagaagaccaggctgataaaagattatgaacaaccttaaatgccacagaatttagggtggatggtgatttctaacttaaaagcaaacatgagagaagtaaatttaggagcataccaagggagtgaaattatgggaccataaggagtttaattttgagtttgaagtgcctgtgcactttagatgaagatgtcccgtaggcacttgtgatgaatgagtttaggattgggaggtaacaaaataaatgtgatagctgagactgtgctagtgaatgtgattttccagggagaaagtgtagcttgagaagaggtggatgtttaaaatagaatacgtgggttctccaacttgaaagggtatgcagaggtttccaaggctaccttcaacttctgtgattttctcgcagaactcacaggattcagtggagagtatattcacagctatgatttattttagtgaaagacataaagcaaaatcagataaggggaaagaggttcagtctggaggaaataggacataggcttttgagagttttctcctagtggagtcacgcagggcaagttgaaacagcatatgtgaaatatctcccagggaagctcagttcccagagtttttaccataggcttgtctcatagacactgcctaacacaaccaaaatgctagattcatagaatgaaagcaggtattaagcataaactctattgcttacacaaacaatttaggtgtagtgagcatttgcctatcagtgtaaaccctcctaatatccaagttcctgatgccagccaagggccaaccttgaaatcaggcctttgaaatgatagcagtcttaagcttgctatgttacctcttctctgcacagtgagatagagaaaagtaagaagacagtgtctctatattatattttaaaacaacagcaaaaaaggtagtatatatgttttatttagctttccacaggtagatctcagtaaaataatgctccagtggagtttttacttttctgttactagatatgtcctgtgtttttgtgtttcctataggacttactcttctgataatgagaaggttggcattatagtacacgttgaaacacattccttcccttaataaaattatttttagtatcacatggtatcttcttaagtgtacaaacacatttttcatttttgctttgaatcttataatcattgttagttttctctttttttttagtgttggtaatgtatcttttacttccaactttgtttttagggaggcagatatatgtgttgtcttcaatgtaacaaggatttcgggcaaaatattttatatagatgattttgaatctatagaagtagaggaagaatagactgggagggtgtgatgtgtagcatcctgacaatctcagctatgactgaagctcaaaagtttctaaattttacagctatgtaatataattgcatcatgtcctataatcttttttaaaaggctcaattgaagacagtaagtgttttttatgatgtttcataacttcatttgtatctctttgaaattgaccaaaatttatatacagagttcaatataattatttttattcatttaaaacatatcaaattaaaacaatattaagattttaaatataaagctgcttagcattactgccttttcttaaagtctgttttcactgttaactaagtaaaagtctccctggagttttagtagactttttctcacatctcgttggttataatgatagcatgtggtcgtctaatagatatgaagaaagctcgaagagcaggcacattcctgctttaaataaagactgtggttctgtcagtgcagaaggttagaaaatagcagctaggatttagtcaggagatggaaactgcctataatggaatggagaaaatctgtaaataaataattgttaactaggttaaaggtgactcactctgtaaatgggttaaaagagaatctgtaacagagagcagttacagagtgataagggaggaaggaacttggaagcctagaggaagatttgaagggtgagagtcagagccctggagagggacactgctgccacagtcacattgcgcctgctgtgctgtggttggaggatactggatagagggacccactgtggaaccggagagccacgctgctgcctacgaccctcgcctctgagccatagcttgcgcatccactcaccgccaccaggaaagcaaacagggagaagactcccttccaactcctcaagcctggcaagacggttttccataccctttgttgtcagagcctaacacaagccatctgacaaaggacaaatgtggtttgaagagtctaggtccaggattgcaaaatgtggaaaaggtgggctgaggggttggatggagctaagaggtaataaattaataatgggcacaggtaggttactaacacacccgtcataataattgagcttgataacaataaggcagactcacaactggaaaaaatgctgatatcagtagattttttttttttgagtaatcaatagtatttgaaatagctacattataataacagataagaatagaatactgtgtaattggaaacaatgtatatactaatgtgtactcttttgtgttatcaattaatctgagatacccgaggtccatagttaggagtatttacaaagctaagattgcttagtgcctctgttccttctttgttttaggatccttatcttgataagttctttgctctggtaaatgctctggatgaacacatgttcccagtccgaattggagacatgcgaatcatggaaaataatttagaaaatgaattgaagagcagtatttcagcattgaattcatctcagttggaaccagtggtccgatttcttcatctcctgcttgataaactgatacttttagttgttagacctcctgtcattgctggccaaataggtaatttacctatgtttagggaatcatgaaatctatcatttgacatttctaacttttacagacatagaaccatgattcctatttgctgtctctgtaaggactgtgtttgatttgggcgggggctgaggggacattgttacttacttgtttctaatgctggaaaataattactttctttgtttctttaaagtgtggcatatagacctctattcaaattatgaaaacaaatattcactcaccaaatctttattaggcacttaatatgtactgtacactcatgggcactgaccaaggcatggttcttgattttatggatctcatagactagttaagaaaacatgcaacagataaatcatttgtgtttgtgtacaggacttatctatgttttcactcatttgcaatcctctatgtactatagctgatattttcttcaggaactcaaaatctctatcttctttttcttgtgacttgttctggaaggaaaaatattcttgtttcctgccttttccccacaattccttcctttacttttgcttactgtgtccacccaaatcctgcaaagtagttgagctagtaagaaatttcaggtaacttgttatagaaattttgaattaaggggtggcacaaaggagaggagtattcaactccttgagatgtttttatgatgacttgtaagtagaggtaaattttagattgagcatttaaaggtgagtaagagtctgacaggtaaataattagccttgagagataaaacagtatgtgtatagtgtacaagggcttccctgatagctcagctggtaaagaatccgcctgcaatgcgggagacctggcttcgatccctgggttgggaagatcccctggagaagggaaaggctacccactccagtattctggcctggagaattccatggactttgtacaagggcttcccttgtggctcagctggtaaaagaactgcctgcaatgtgggagacctgggttcgatccctaggttgggaaaattcccctggagaagggaaaggctacccactccagtatttggacctggagaatccccatggacagaggtgcctggcaggctacagtccatggggtcacaaagagtcggacatgactgagtgactaagcacagcaactttatttatattagtgtataaaatctttacaactctagatataggtataaatttcatgatttcatgaataaaatggtgagcatatgcttaaaaatttgcctgaggattcacacccaagcaactgactccaagtcccactctttcttcctattctgaagaaatgttcactggtgaaattagcaagaataactttggtcaaagagtcatatgctttgagaatctgtatagaggtgcagaagggttcaattagtgaagcatgcttgtaagtaaaaaatgaaggtgaatagatcattcttacttagacaatcactgcttcctttggaaaggaactaaaaattgtttcagattctaatacatttatagtaaaaagttcaggactttcatgctttataaatttctagtatgacataaaaacaaggtttgctgagaagggagtaaagtggacctagttttgagaaggatggtttgtagcagctatggtatgctgtgcttagttgcttagtcgtgtctgactcttgtgaccccatggactgtagcccgccaggctcctctgtccatgaggattctccaggcaagaatactggaatgggttgccatccccgcctccaaaatagctacgataaggaaaaggaaaatgagtcatccggtaacacaggtgggatttctaaagcctgctaggtttccctgtctctctagtctctgttcctctagtctctcgtctggtacagtatgtatagattaatcttcccaatgaccactccgtctcagtattccacttttaggaaaacttgattggcctcgttatctgttcataaattcctgtcttgatgaaataaatcataaaatgtgacgctttcagaatagctgttcaggttatccatttattcactgtgctatcagaattttccagcttttgcaaatttcttgttatatactgacttgcatggctgagtaggtattacttaggttggcatttaatgtgcagtgatcttacctcatcctggttttctacccttttgtccttctaatccttttacagattctgttttcagttaagcagcttatcagctgtattcatgttaatattttcataatctacttttattgttaatttttattttttaaacaaaagtaatgtgcttaatgtatgatatttagtttctcagcgtcatctttaaaatgagaagttacttctcaaaggttctaacaagatagatttttttcttatcatatactttgtattattttacaaaatggtgggtacctgttcgatgatttttttattttttggagtaagcaaaaccaggtaattttcctgtaaaattagtaaaattagattttttcttattttgttgagagaaatatttttgacccagttaatatcataaatagataccataatattaatgtcaaatatcatcttaaatatttactgtgtgtagtcatacttaatgtatacagtggaggtaaaactttgatgtttttataacttacagtctaaaaatgttatagttagtgcaaaaaatattttcttccttcctaaaagttaatctaggtcaagcatcatttgaagctatggcatcaattataaatcggcttcacaaaaacttggaaggaaaccatgaccagcatggcagaaacagccttcttgcatcatatatctattatgtttttcggttgccaaatacttaccctaattcaccatcaccaggtattttattcttttttactatgaaactatcttgaatagattatatgtttattgtttataagcaggattgaaataatcttgaagtgcataatgtgatgtgtttattcaacaacagacatttgctgaatgcctgctgagtgccatggactaatttagctactggagttaaagggataaataggttacattttaaagcatcattatttgtacagcttcctttaatttgaattagagagatcttagttgaattaatttttggaaatgaaccttgaaaataacttctgtttctggaagcatttctcatttcctgttaagataaatagaatgttatattggttatatagagtgttattggacattaaagaagaaatatgatggctcagcagtttcctgataaccttgtgaaacctgcagtgatataaaggatgatcttctagaaaagttctgatctcttcatggtcaataaaataatatagcctttctggatactagagcccaaagtagtcacttacttgtgtcttatatgacattggtggtagtggtggtagggggcatatctgagtgtttgagttaccctttagtcgtttagttagttggttaatgattatgttgtgcatacttttcaacctgtttacatatttgtctgtaagagtcatcattcatcactagtgaaaatggtaagtgccctttttcagctattgtcagtgttaacataaataatgatgacaagaaattctgatattcacttggaaaactaggtataataataatctaagttatagtgcattttattaattgcaaaaagagaactgattgactcttgtatcttgttcattgtttcctatcctaatttctaagtttgtctctgagtataagtgattatggactatatgtaatgttgctccatttactgtttcaattagtacactatgagaatttcacagattttacaaaatgtctttttcacatgctgacctgaagactataaattacttagttgacaagtgtatgtcatttgcaaatatgacacttagaaagatttcattaaataagaaagggagttacagttgttgggtactttatatttatagatcctggttgaatgatggtatcaggcttgatttcagatagaaaagggattctttgctttcttcgtataacctgggctcttaggagaattatctttatttatgtatgtatgttacaaagatgctattttgttacagttaaaaattatcactgatgaagatagagatatagccatagcttcatttacgagatactgacggtaaattcggagaaggcaatggcaccccactccaatactcttgcctagaaaatcccatggacagaggagccttgtaggctgcagtccatggggttgctaagagtcggacacgactgagtgacttcactttgacttttcactttgatgcattggagaaggaaatggcaacccactccagtgttcttgcctggagcctggtgggctgccgactatggggtcgcacagagtcggacacgaatgaagtgacttagcagtagcagacggtaaattgggtctccctcttagtgactgtgtgtcaaggggcagagcaggagtgggtgggaaaaaaggaaaagatgttagctggagcactttgggtcctagataccctcatatataagtgaaatgacgtttgtatatgtttcttattactctttttattctatgtgtaatacagaatgtagaaacattgaagagataatggttgtatttataattcacagggttttgtcagctgctgtaaaaaattatctttgtatagctctcatgaggtctggagaggttttcttgattctattattttcatttagaaataaaagcaatttatgatctttatggaattttgtaaagtggaagagactttttcaggtcctttcccgattaactgtttaattatgtgctattttatatacaactctaggtcctgggggtttgggaggatcagtgcattatgccacaatggctagatctgctgtgagacctgcaagccttaatttaaatcgttctcggagccttagtaatagtaatccagatatatctggaactcccacgtccccagatgatgaagtacggtcaatcatcagcagtaaggtaaactgaagatatacatctataaatttggtttccagttcatgaacaaatgagaaatatccagttgttttactttattcttaaaatgtatctgagttagtaataagaattttaaaatatatttgaattagtaataaattttatgtttctcttctatcggtgaacacataagtggtgtttctattaatgtgcttgctattacaaactcgtttgtgcactatgcttaagaaaatctgccaaattcaaaatttgtccagaacgactagtcacatacaactcactgtctgtctgatcatcatgtgaaaaatggtcatattggtgttctacagggttaagagacctgtgactgctgtccagtgggaccatattattgacttgaaatatgagtctcacttctctaaaaatataaataataatgattaacaattaattggtaatagagctatatttcacatggaaaactctatgtaaggtgctccaggattagaaaaatgtgatttagttaatcatggttaatgattattccagacaacaagggagaggtcggctagtataagatccagccatattttatttaagcatccatccttattacctccccatcacatatacttaaggaacaagtagtcattgccgtactataattaaagtacaaaaataactcggtttgaaaattaaagtggaaaaaaagagcagtaaggtggaggccaagtaatcatattatgtgtgttttgaccaaaccatcctaagtagatttttcgccattggaaaggaggaagacaccattgttaatagaatcatagccaacttttctttggcatttagtctcttgattagggtatgagaaagaattagtaaacgttctgcagtctgtgtttaactcttagtctgagctataatagactttttgaaaaaaatgatctgagtttgtttgttatgtgaaatacttggatattgaccaaacacatcagaattactaaaatctattcatacagttatagaaatttgcattcagaaatttctaataaactttattactgctcattttaaaatgccttttaagtaactttaaagtactttctcacagaccaaaaatatatttttaaagtaatttctggtctgtgagaaagtgaaaagaatattttgtcgctttttaatttaaaaaataaatgtgaatttcagtatttaaagatccaaatagatgttactctaattaaagaaacttcactttttgtgttgtacagatgtatttacgtgaatcctgcagagtaacagttctacttactaatgagaaagcttttctccccccacatatctttccatgtctaggaaaaggttttttatctttgtcttcattcttgatcttttctcactgtaatagaagtaacacttagcataatttactgtaagggcagttcttcagtagaatgaatttcttttgtgaattataagaggttttcctgttaaagcgctatagacgccattttcctcaaggttctacttttgaaacaccttttaatttctataagatttagcatagttctagtgttttcctttaatatgatgtgtttgatagattataacatcatgatttagaacaaagatgtacatatattggaatgattatttgccttttttcaagtggttcataaaatggggcataataatgatataaacttgcttctggtattatgatatatggaaacgtctgagaaagccactataagatgagactttgtcttatgacagtatagtgttgtcctaatcaaattttatttaaatgttttttatgtattcttttttttagtgcaaaatttttgatcgctaccttcattttggcctaccctttagtcataatccctaataataatggtgtataacttttatcacattggaaaattataaggaatctgaagtttatttatacctactcttcatttattctgattctgttgacttggaaattcaagaaattctttaatgacttttgtctttcgtgctgccttagccatggtcgtacccttggtcttgtcatgacggataactttaatcctcataatctcaatttcatgcatcttgttctctaatcattagctcatatttttctgtctaataccccaactccaacaattactctgcaacctccagtcacttgatggtaagatatttttactatacctcaccctgttaatattctttcatccagtttagccagcttaaattccatgagcagtcattataatcattacctttataaacagacctcagttcccttctcttcctttcacttcattttacttgcttaatccaaacctcaaactgtagttgaatttcgttgactgcctatactgctaaacatgatttgagaaatgccatgactggtctcatttgaaattaaaggctctcttgaggttaagagaacccttaatgctgtcaaacaattgtagtatatttctttattccatttactttcccattgtcccagaaaaaggttacatgctttcttttgtacctcagatcctctaacagctccccaccagtccttctcactttatctcctacttcattaacaaaattgaggtcattagaggaaaacttttttaacctttgaccatcacatctccttaaccactaccgtctactactacctactactaatatgtctgtcatagatgacctgcccatttctttaagtccattccctctgtttgtatacaaccttccatcccttcacctactcaggatccccactccaacagtgtttatctctctcctacatcttcagtttctccccgtctactaaatcatcccatccacgtacaggcatgctattatttctccaattaaaatgtttttttcctttagtatttcttctagtagcttctttaccatttctcttctaccttttatggtagaattccttaaaagcattttctatacttgctgtcttcaattcttttactcttgttctttaactcccatttgtttgttgttgtttagttgttgagtcatatccaactcttctgtgaccccatgtacagcagcccaccaggttcctctctccatgagacttccccggcaagaatcctggagtgggttgccatttccttccctcaggggatcttccccacccagagatagaacccgtgtcaagggcattggcaggtgggttccttactactgagtctccaaggaagccctaaacagtcgttatcctacttcaaacatatttctttgatcttccacgcatcagttcagttcagttcagtcgctcagtcatgtccgactctgcgaccctctgaatcgcagcacaccaggcctccctgtccatcaccaactcctggagttcactcaaactcatgtccatcaagtcagtgatgccatccagccatctcatcctctgtcgtccccttctccttctgcccccaatccctcccagcatcagggtcttttccagtgagtcaactctttgcatgaggtggccaaagtacaggagtttcagcttcagcatcagtccttccagtgaacacccaggactgatttcctttagaatggactggttggatctccttgcagtccaagggactctcaagagtcttctccaataccacagttcaaaagcaccaattcttcggcgctcagcctcttcacagtccagctctcacatccatacatggccactggaaaagccctttgaatgctgacagggctctccaggcactccatattcttaaacctgatggttgagcctcaacacttgacttactttaccttatgtgtatgtgtgctcagttgctcacgtgtgtctgactctgtgatcccatggttgtagccttctaggctcttctgtccatgggattttccaggcaagaatactggagtggattgccattttctcctgcaggggatcgaacccacatctcctgcgttggctgtgctgtgtgctgagtccctcagttgtgtccgactctttgtgaccccatggaccgtagcccatcaggctgttctgtccatggggattcttcaggcaagaatactggagtgggttgctatgcccccctccaggggatcttcccaacccaggtcttctgcattgcaggtaaacccatgagtactggaatggtagtgtatcctttctccggggaatctccccagcccaggaatcgaattggggtctcctgcattgcaggcagattctttaccagctgagctactagggaagccactgagccactatcttacgacagctttgacacagtaattctccttccttgttgatttattctatttaattggtttgtagggcactacactctcttgattttaagagcttattacacctgcctaatctcctttatagatttttttttctgatctcttaatttggaagtgccccaggtttctgtccttatttctagtcctcttgtcttgttttcctttctctcttcactccccgacttggtgttcttatgaagtccagttgttttaagtatcattatattgtgatagttaacaaaaattacatttcaaatctctctctggaattctaaatctctgtctggaattctaaactcagctgcatttttaaaacccttttgttcagatttgcatatgttaaaagtagagccacttcctaccacctctaatactaccatttggtctgaattaccatcatcccttcctgaatgaatgtaatagccttaaagatggtttctgtgctttcagcctatactcacttcacacagtagcaaccagaatgctgctttaaaagcttaaatcacaaacaaacaaaacttaagttggattaatgtcatttctctgagcgagatcctttgactaactcctctgcttctctaagtctttacacaaaggactgccttccccatggggtcttctctgaccagcttattttagtgtctaaatgtgcctttctcctcagccttgtgccagggatttctcaccccttactctgtttctttgattgataacattgactacctttaatatagcaaatatacattagttacctgttatgtttattttcagtgtttgtctcctttgattagaatataagctccatgaaggcagaggtatttcttcactgatgtatctaaagtagctataatgtccagcatatggaaggtgctcaaaagatctctatccaatgaaagaatgttaagtaagcactgagtatctctaccaagagtaaacaatttaaaaaaaatgaattatgcttttgtttgcctccttgctagcaggattaattaaatacttaaagattttaagaaatttagttttatgaacatttcagttagacttcatttcctaatacaaaatgtgaaactactaaaattaaaaaatactataaacaggcgtttgttactctagtgtctataaaaccatacttgtgagacttttcataattattttgccacaactgatctttctttatcctagcaatgttaacaatctgttatgtaaatactaatatatggttacatcaggtttgaacttcattgcttttagtcagtcaaattccagagcaattttacgttgataattagtttctttctaatgtattgtctcctttttcatttatttttcaaacattgaaagcttactgtgtgcatagctcactaaacccactatgctgagggtttgtgggtataaagccaaatctttgtattaaaacatgagtattgatggcaagtgaaattgacttgttcaaggaaggagcctgtttgcatctaagggacaaaacaataagattacagagatttggcaaaaacagagcaaaaacactttcatgcacacacatttggttaatctcttctgctactggagatccataaatatagttgctatatttgtaaatatcagtgatgaatttgcttaactgagggctgtttgatataattcttaacgttatgacatttaaattatggaaataatttgctttacaaataaattggctaccagttttctttaaatagtcagctttgactggatgtaattataactcttcagagtctcaatattgtgaatataatatataattaatggtacaaacagggttattgtttattctcacatgacttattagcacatgtcttaaaggaaattgttaagcaagaggttaaaaagtaaacttgtgttacaccaaagttactgtttttctttttgtagaatttgtggtagggagagcacaattgtttttctgttattaaaataatattaaaaactttttgttattaaatactattaaaaataatatttgttatttttgtagcataggtagtgacataatttgaaagactgaaagtttctgttttaatttatctgaaaagcatactgtgtgctgatttgcttttatttgaaataatataatgaggttttgagaagtctgtataggggtattttattttaaacaaacttactgattaaataattctatagtatttgaatattgcccaatttactttgctaggaagcattaaaaacattagggcaagtttttattaaaactttttaaagaagtttgtatatttgaggcattacattcagtgatttacttccattatttaatttgatctttacaatatgaaggagacacctcattattcccattttgtagctaagaaactgaaaaagagattaggtaatttaccttagattttgcaattagtaagcagtagaacctgcatttcaactttaactctcatcttacacattcagtgtcaaaaatgaggggaaataggtagttaccgtatcatcatgtcaacttctctgtatttttggaaaaagagtacaggaaaaaggatgggaagtattctccctataaacataagcctttgagagctagtagtttgtcttccttcctcccccctccccttccttcgtcaccccccccctttccctccctctccttcactctcctccttcctgcaatatcatgcgtaggcctcactttcagagattctgcttggaggtagggccctgcacatgtgttgtggtggttgtccttaaccttcccaagtgatactaatgtctacatagacttgattaccattgtttactatttgttttcttttacctgtcctctttggtgctttctgtctgggctcatactcagccctgatatttctacttggcttgtcttgtgttatcttcagcagtcctctaaaaatctcttataacttgttcagttctattagcggatttccagggcccagcccagattactgaatcaggaattctgtggggtagggcctggaatctgaattttataattcaaatggatcgatcaggtttaagaagctgaattaaagccccagttccctttttgttgttcagtctcttagtcatgtccaactctttgcgaccccatggactgcagcaatccaggcttccctgtccttcaccattttccagagtttgctcaaactcatgtccattgaattgatcagttccctttacctaaagtcataataatctctttcagagaagatagacataattcacttgtgaaagtgaaagtgaagtctcagtcatatccgactctttgcgaccccacggactgagtgtagcctaccaggcttctctgtccatgggatttcccaggcaagaatactggagtgggttgccatttcctactccaggggatcttcccgacccagggattgaacccaggtctcccgcattgtaggcagacgctttactgtctgagccaccggggaagtcacttaaattaacttcaaattgatgatagtgatgatgaagataacaaatcttatggacagccccagcataaggttttttcttacagtttttgtacaaaatactaactgattatgtttactttcaacaagcacagtaagactgaagacaactccaaatctactatcatttttaggaaggagcatatattgggcatctttttttctttcttaatttttgcctaatttttcttattggtccctaaaagagagggaaagaggaggcaagttcaaatacaattacggagtattgctgcacagacgttttcagttgatgacagatggagtaaaatttaaagtcttttagacgagaatggaatgtttttcttctttcatttcttttttcttttaaacctcagttagattcagaggaaattgttactagcttgtaccatctttaaagagagtttggggggatggttgctgtgggaactttgttgatagttgaaattgatccttttatataaagataaattaccattaaatactatgcttaattttctttgtgattttaaaaaagttactatgtaataagatgattttgatgaactaatattctatagatgcctaaaaattttggttgctttaacagtactaattaaaaacatgtttgcattggaaagtctggatttctttaagaatatagcatgccacatgtaatatttctttcctttccaactgctttctattatatgcttagggtttagatcgctccaattcctgggttaacactggtggtccaaaagctgcctcatggggatccaaccccagtccaagtgcagaatcaacacaggtggtgtttatgttagaggtttcttttttggctgctgatgtttccctttagaacgttacttcttagcatatactgtgatttcagtggcttgctttcttaatcattaaaaagcgtgttttttgtttacttagcacattttccaactgctatgcatgaataccaccagttgcaccagtaatactttcctttcctatttcctgtctcctgcttcgttcgttgtacaccccattgatgtttcagtgcctgctgcttatgtaattgatggctttgataacagtttctaccctcggggtaccacatcttcaggaagaattttttaaacaaaaaattttgtgtggaaaaaacctgacagtttttcatttgcttttggtttaaagtgtagctattgtgtcattctccttcagcatttattatcttgtcattttcttcataatcactgactagaaatgttgtgaataagctgaaagtaaatatgaatagtatatgatccccctgctgtaagattaagtaccagaaacaaaaatctgttttaatttgtactgtgttgcaaagtatgaaatttgttgtaacctctttgtactaggttttgcttactttagtctagttgcttgatagctaatactgcatgattcctcaaaatatacttctcacctgtgtgctgggtttagaggaagatgctctctctcattcttgagggaaaaatttaattgcaaatttagtattataaatgatttatatttaatatagtatatggcagatctgaatcataatttttgatgatagtgaaacataaaagaaaccattctgaacttttaatttttttaattaaatataaaattcttgatttctctttttggtctgagaccagtgagaagtatgtttttactttttgcattttcttactagatatatgcatgtgtatatatcacagagataaaagtttcattctttgcagcactctcaatttatataatcattaaaatatttaccttttaaggataaaatatatagaagccattttgatacttctaatacattgtcattaaagcaacttaaatggtgaaaatgggatgagcaataaaatagatggttgttgaaaccacagtaaagctctatttaaaaaattgtatgtaatccttgaggtgcaaagtcattcacagcagactttaatgttatttcatcattcattcatcttcactccataggctatggatcgaagttgtaatcgtatgtcttcgcacacagagacgtcaagtttcttacaaacattaacgggacgcttaccaactaaaaaggtagattcatatgaagacaattcatatagggggaaaataattccaacaattaagtagatgaaaggtttctttacataaccagaacaagatgttaaaataattggattgtttttaaagatacatttgagcaagcattgcttgtctgatgcctttttgggcaggcctctccattgcaggcccttttacattattataatgcttatatctttgtggatgaatatttttagtttagtgacttaaatttgatcatcaaattttagtaccaaaaaattgtatcaactcttaattctgtttctgtaacttgcttctgttttgtgttttaaatctccagggaaaggaagatgagttagaaaaattatcactattagtaagatatgttgatttgcttcccttatgcacagttgtgttagtcctttttcataatatacactcttttgcaaatgctttgtatgcatatccattataaggcaggaaatttctgctgttttaataaaatgactttaaatacctgagaccttgaaaattgatggctgatatcaaagtttaaatttttaaaggtatttcctgaattgtaccagcaaagttcgtgaatgtatttgcatttgttgaaatatatatgtgagacaaaagccagattttattgtagctgtgagcttttggtctagtttctgtttgcaggtacaatttaggaggctctttcccacctgtccttttaaaattacattttactgcaagataacatgtaattttttcagctgttcaacatgccactgtcttacatgtataaatagccgtttcgttaatgggtgtcctcactgcatcgttgaatggttcacatgccttatttgcttatcctcattatatcttcatttgtatttgcattattatttgatttgtgttatcagcagacctggcattgataataactttggatttacttctggatagctttttcatgaggagctggctttgcagtgggttgtttgcagtggcagcgttcgggaatcagctttgcaacaagcctggttcttttttgagttaatggtgagcaaactaaacacattttgtaatactgttttccttattgaataattttctgttggctcattattattgtcctagaaatctttctctgttgtccatgttatggttttacatgtgcctccaaagaaaaattatgtttgctatatctctaaataacactgtggataatcagcactatttagatggcattataaagctaattttaggtttgtttttaggaacagttggagaagctagctatctttttaacctgtgatatgttctctcttagtccaaacatgaagtgaagtcgctcagtcctgtccgactcttagtgatcccatggactgcagcctaccaggctcctcagtccatgggattttccaggcaagagtcctggagtgggttgccattttgttctccagggggtcttcccgacccagggatcgaacccaggcatactagtgtataatggtaataccagataaaaagagctttatagatacctactgcttttatggctaggaagctcttaaaatggtgaaagttcttaaaagggaaatggtggttacagccaataaaaaacaacaataattttttcttaattcagtaaatgatattaaaaacaagtaaatgaattaatatttttgtaaatatacacacaacataaacacatatatacatagaagcaatgtacatacacacaccgtgtggtcagacctatggccttcggattatcaaggcacagagagattaagatcttgtttaaatgcacatagcttgtggacagcagacctctaattcagactcaggtactctggcactcgggcccttcctctctatctatagaaagctgaaagcaaaactgaaaatttttcttctcaaaaattatgtaaaataataagaacaagagcaaaacaacaacaaaagatagagagaaaagaaacaatggaggttctagagtatgccacccacagtcattctcattattgaacgttacttatattgaggataagaagacatttcttctgcaaattaaaactaaatgaggtattatctcacacctgtcagaatggccatcattaaaaagtttacaaatgataaatgctggagagagtgtggagaaaaggaaaccctcctacactgttggtgggaatgtaatttggtgtagccactatgaaaaacagtatgactgctaagtcacttcagtcgtgtccgactctgtgcgaccccatagatggcagcccacctggctcccctgtgcctgggattctccaggcaagaacactggagtaggttgccatttccttctccaatgcatcaaagtgaaaagtgaaagtgaagttgctcagtagtgtccaactcctatcaaccccatggactgcagcctaccaggctcctccgtccatggggtttgccaggcaagagtactggagtgggttgccattgccttctccaaaacagtatgaagtttccttaaaaaactgaaactagagttgccctgtgatctagcagtctcactctggatatgttatctggagaaaactcttatttgaaaagatacatgcgcccaaatgttcatagcagcactatttacaatagccaaaacatggaagcaacttaagtgtccatcaacagatgaatggataagaaagatgtggtatagatacacaatagaatactattcagccataaaaaggatttaagtaatgccatttgcagcagtatggatgcacctagagattaccatactaaataaagtcagaaagttaaatatcatatgatgtcacttatttgtggaatctaaaatatgctacaaatcaacttatttacaaaaccaaaatagactcagaggtagaaaacaaacttacagttaccaaaaaggaaaagggatgggagagggataaattaggagtttctgattagcagatacaaactactatatataaagtagatgaataacacagtccaactgtatggcacagggaactatattcagtatcctgaagtaaagcataatggagaaaaatatgaaaaagaatgtacacaagatgaaatcatttggctgtaaccagaaactaacccaacattgtaaatcaactatacttcagtaaaagttttttttttttttttcttaaaaagaaatttcttcttgagattttctaatcagcaaaaaaataagtcagggatcatatgtaagtgataggcaacacatttttccccccggagactaaacatcagattataattcatgtgcttttaatataagatcaaaatagtaatttgcctttttttttaatagccttagatatatgttcagatttcttaaaacacaaaatagtcaaaatggtacagtttaacttgtttctaccatttaccaactgtaaaatcttgtcattaatttccctgaatttaaaattctttattgtacacactgtgataagaatttatatctaaaagtattttataaattgaaattattttgatttttatctaacattttattcttaatatgtattcatcaatatttaatgtatacccaccatatgccatgggatgctaagtgctaaagatactacatgctgtcaagatttctgatccctcaaagctaccagttgcaggggacatggaatggcacagtcgctgagtcttagaaagatttaacttaaagtaattttaaaggatgaaaatttttttctgttgacatacccagattttttttccctattgatagccagaatagttttatgaagatgttacagagattgagttgtatgttgtttgatatttctttagagcatacaaaatattgtagggaactttttcataatatttgaggagttaagagtattttagccttctattaaatcatgtggtatattgacagaaatgaccctaaagtttagagttctgtaactgctagttaaaccgataagaactgctctatggcgcagggagctcagcttggtgctctgtgatgacctagatgggtgggatggagtgaggtgaggggaggtccaagacaggggatatatgtatacatatagctgattcacttccttgtacagcagaaactaatgcaacattgtaaaacaattatatttcaatttttaaaaaaagaaattgaactaatggcttatttctttttttaggtaaagagcatggtgcatcacttatactttaatgataaacttgatgcaccgaggaagactcgttttccagaacgtttcatggacgacattgctgctcttgtcagcacaattgctagtgatatagtttcacgatttcagaaggtaatgataacttatttttaaaaactaagtcaatctttcaggcacacattaaactatcatacttttgtttttctttttaaattttgtttcccaggacacagaaatggttgagagactcaacacaagccttgcattttttctcaatgatctgttgtctgttatggacagaggatttgtctttagccttataaagacctgctataaacaggtaaagtataattagtaatgaaataatttaaattctgtgtttgctctttaagggctagagctaagaaactttcatgaacacatttatataatgatgtttttaaaaagtggtattatatttattagtaaggcaaaaataaattatatttatcagttcatagaactatggcaagctgctatcagtagagccatcttttccttgagttatcctggcccactcatgactctttaattcccattagaagtataccatcaagtcagtagtctaaatgtaaaacagccccaggttgccgtgccagagtagcatttttactgaatgaacagctaacccacccttttctagcttaagtgatttttaaagcagttggattttgctgtgtattcctcatgatgaaaccctagacattgtagagtttagaatcgtgggcagatgtttacccaagtgtcaaataccatcatctgccttttctaaactaaaagtatcctggaacttttctacaaacagctggttttgtgttaaaattttcaactgattaatgaaacctggcttttagaagacattagttatttgtcctgatagactatttgggtagtaagttatataatcatcctaaaattgccttttaaggcagcttaaaaaatatacaggtctcttgtgtcccatcccagcattattgaggagtttgaatcctggtggtggggtagggagtggggaaacagtgcttgtaaagtacttccctgctggtccacagattaatttaggggaaccactggtttaaaatgtatttggcagtctgatacttagagttttgaaaatctgttcagttggatgccattattgtatgtatctttctttcttttttgtctgatccatgcatcatgtgggatcttccctgactggggattgaatctgtgccctctatattgggagctggagtcttaacctctggaccaccagggaaatccctgttttgttttttaagagagaagttgaaactatgcctgggcactgatatgttggcaagtatttgccacactatgtattattcttaccttttcccctgaaatttcatgtattattgctctcaaaacctgtcctgtctttattcttcaggcattaacctcctacatttgtcacacattaagctagactctagggatgctagaactcttaaaataagtcagtttataaatgtctcctcgagtaagtaatggtgtagttgggaaaacagatagttaaaaatatatcttagcacaaactgctgagaaaagaatggataatgtattttataaagttattttgatagcataatttttcttcagaaagaatatatccttgagaggtggaaatattaatgctgtattggaaatataagaatgtggctttaagaatgcacctcgtcagtggatttatacagtaaatcttgtagttctaagttttttattttagcagtaactctggaaaaagcggacactgttacttaaaccacaaaacccaaagctgtccattgagtactgttttctaattctttaattcatcattctggtgttggtattagagaaatgatatgttcaattggtatttttttttaatttctgcaatacttacaaggtatcttcaaagctttattcattaccaagtccaagtgtcctggtgtccttgaggcttgattttttgcgaatcatctgcagccatgagcactatgttaccttaaacttaccctgcagcctgctcactccacctgcatcaccatcaccttccgtttcttctgcaacgtctcaggtatgcaaaatgtatgaaaaaagcttttttttaaaagcctgcatttgcggaaaaagcattttaaatgctgggaaaagtaaaaagtaatactattgaataataactgtgtgataggctccatactcagggcttttgtaagtagtaaatgattaagtgctttataaatattaatcatttactactcttcattgcaaccctaagaggtacattctattattatcatttttttacaggtgaactgaaacacagaaagatcagtaacttacccagggtcacatagtaaaaactggcaaaactaggctttgatccatggcacatgttagctttattttagatctaagttctaaccacgtgttgtatccctctgactgatttgcgcacaagggagtgaattcacctacataataaaatcacttgacattttcacaggttgggttttcttgatgcagacacagactgaatttggggggcaagatgtttattagctgtcagtacctatggaaggaaagggaatgaagtgtaattagcagagaaagaagtaaaacagcaatgtagtccttgcaaagccctgcctgcctcttgtatccagagaacccaaaggaaactaggtgttgttcatgggttttcacagggtacctaataattgctctaaagacgacaaaggattatcatagcagtaattatatgtcctatcatacagattaaaatgaagggattttgtggtttagtatcagaggagcctagatgttctctcctagggaaatgttttgctatataattcctaagacaaacaagctacttccttaagctcttgtttttttgaaaaaaattgtttatttggctgtgctgggttttagtcgaggcatatgaactctcacttgtgacatgtgagatctagttccctgaccagggattgaatccaggctccctgcattgggaacacagagtcttagccattggaccaccagggaagtcccttccttatattcttaatgtctaaagtcaaaggtgatctgaactctttttaagtttgcttttgagatttttaattcctgaaagtaatttactacactaggtcaatctcagatgtttgataaagaaaattttaaactttacttagaaagattgaaaaacacagagatcacccacaacttctcatttttcacctttgcaaaaattcttaaggatcagcctgtttctacatacctggctaagacacgtttcttctaataactaatgaggctagtcttttgttctcttcccccatcctctggcaaagatgtggctacacaatcaaggacgaattaatcataggtagagttccttaaacctttaatgaaacacaattgtttatacttgactccctgctgaacatcttatccagccaagaaattaatagaatttcttccagtgtcctgtcccctactttctcatctagctgtgtaattttcagattctaggagatgacagaggcatcactctttgggaggtagggacctgaatagttttatatacttactaagaaggtgatttctccatagagaaatctggagtctgttgtaagaaacctcgcattgttggtcttgaatatggattaaagggtgataaggttgaggacattcttgccttgaactgtatcttgggggatgctattttgcagtattagaaaacttgtaaaaactctgaatgaacgaaaaaataatagtaattttctagagatagtattttccctgaaaaaacaaaaacaaaaacccagcttcattagtatttgaaatttctctggaaaccagtagcatttgactatgaatatttctcttgtactcaacagtgagtacataatgcatcatagagattcagttcttttttccattcagaatatgatagtgaaatatttagtggctaaaagtataaaggaaaaatgagatgaaaaaaatttaatatgagaaaaaggaaattgaaaataatttaaaatgttatttcatcagagtttcctataccaaaagtaagagcaggtgctttctccagtgttaataatagtaatgtaaaaataaacttaaaatgtttgtcttgctttcagatgatgctcacatctcgtttgttgtaatgctctgtctatagaatgtttcgttgcttagctattatagttttgttctacctcactcccaaacagagttctggattttccaccaatgtccaagaccagaagatcgcaaatatgtttgaattgtctgtgcccttccgccaacagcattatttggcaggacttgtgttaacagagctggctgtcattttggaccctgacgctgaagggtgagtagaccagttttgctgtgtacagtatcagtttgattttggacagtggaacagaagtgtcccacttaactttctgggactcaaaaggatattctttaccattcttcttctacttctctgttcactaagttctatactcatgttttttctgtatttcatcagttttaagaaagatattttttgtcatctctgaatttgatatttgtcttgaagttagcatgtatcatgttgtatcatggtttagttggtatatttttttccttcttagtagtacctgaaatatttgtgcatgttagtagatggactttcagatttgttaatatgcaacaagcacaattcagttaaggaaaatagactagcctgtttgattctttgggagtaaaatttgtcatttgccatcgtattaataatatatagcatgtactttaaaatttgccctataaacaagtaaacttgttttaaaaacttccacacttttaaagaattattggaaattgatatagtaagaagagttcgttgtctgatttgaatttgcagaaacagcttttctttctttctttctttctttttttttttaagaaacagcttttctataaatgtgttgtgatctaagatccttgtagggtatttctatcttcatagctgttttcaaaaatgtttatgaccataactcatttgggtaataattgctctttttttcaactttcctcatagtaggatcattaaggagtttgtaatgcaatttaacctgaagtaagagctccagagaacaaaaggagatattttgagcaggttttataagaatcctatgatgtatttattgagcaaatgaaatgaggtttgtgaagttcttagcgataggtacatagttaatgcttaataaattgtgaaaagctaaatcttctgcaaatgaaagcatgagtttttttcataacagcagcttctcatgttagggatatattattaagaagcaggttttcacactgtgctctgcagaactgtagggttctgaaaaggttcttagtgtgtttccatgtaggatggggttgtgatgcagacatgggagtaggggagggcaggcttagtgggtgagactctgggtctcgcacccctgcttgccaccactcttttattttgccattgataaatgaatataatgtcatttggggggaaaaaggatccattgtttgaaaaaaatcactctgaaggcaacttctaaacatactacctttccttagtaacttaaatctcaatcatttgaatttatatttccagtatttttacttgatgtatcagaataattttggttaccagaaataggaaacttttcttcttgtctgttttattaaaggaaggatactatcatttcaaatttggaagaaaggtaaggttttagcacagtataaccaggagctcaagtgatgttatcagggttctgtttcttttatatctaatttctgctaagagcctaagctttatcctgaggctcgtgtgcctttcatgactgtaagatagttgctctggcaattcagattaaattcttacttgttcatatccagcagggcagagagggaaaaaacccctcttcccaagcatgcagtgcacatctttctttgaactggtctggctcacttgcctgtcctgcactattagacaccagagcagtgccaggttcttaggtgagttagatcacttttactcacatgtagtgcttagacaggttttggttcatgggtggtttattacaaagcagaagataaggagctcatgcctaaataataatcagctgtcactaaaaagtgtttagttcatgtgatattttttgttagaccttctcaattaaggaaacagttgagtaacattaatctcttctcatcttagtaatgaaacagcttgttgactggctactgtaaatggcagggctagtctgattggatcgacttcaggaactaggggaatagagtcagcttcttctgaatctcagggacatgaaggtacacctgaacatttttgcgttccattagggaggaagacaggtgaaggagatgttgtataggtgttcagtggtgtctgataaagaatagagaattctaacagtcaaccttctttaaaaattttatttattttttaattgaagggtaattgctttacagaatgttgttgttttctgtcaaacctcaacatgaatcagccataggtatacatatatgccctttgaacctccctccccatcccacccctctaggttgatacagaacccctgtttgagtttcctgagccatacagcaaattcctgttgcttatctcttttacatatggtaatataagtttccatgttactctctccatacatctcaccctctcctcccctctttctatgtccataagtctattctctatgtctgttctgagatgttgtgtaggtattcagtggtgtctgatgaatagagaattctaacagtcaaccatttttgtgatgaggtttccttctcaaagtcaagggaggatcagttctgttaaaatagatacatttctgtgggacagtgtagggctcatgaaagacttcttttttaaaaaaaaaatttgtatgctgtattcagagttctttttaaaaaaatttatttttaattggagggtaattgctttaaaacgttgtgttagtttctgccatacatcaatgtgaatgaaccgtaggtatacatatgtcccctccctcttgacctctttactgctgttcttcaaggtggctctttagatactttctgaccctgtaaagtctgaaagcaatgataactgtggtcaccactactttttctttgtttattgagttttaaaaggtaactggaatagctttaaatagtaatatacaggattataagctgttactgctgtttgttctcttgtcttctcactctttcctacacccagcccattggcaagtgctttaggaccacctctacaatataccccaagtccagctgcttcccttcctctctactgcttctcccctaagcgtgcttctgctcttccctccctaaaatcccttttctacacagcaacctaaatggtcttttagaaatgaaaattaaattgtattgcttccttagttaaaactcttcaatgtatttaaaagggcacacttcttactttaaaaatacttaaaagtgtatgcttttaaaataacatttaaaataaaatccagacttagtaatgaacctcaaaaccctgtatatgtaactcttgtctacactgtcacttcccttcttccttatatactacaatctagccatcctggacttgtttctgtttcccttatgggcctacccagccccaccttggggtctttgcacttagattttcctctgcctgaatcaatgcttatattgccctgagatttccacacagaggcatttcttccttgtgattcttcaggtctccagtcaaacagtatcttctcagtgagacgtcattgggccacccagtctgaattatggctgtgttacccttgccacaattattcttaaccatataagcctgtttacttttctacaaagcacttccctgaaatttgctcgtttgttcattatctgtctcctcccattagaatatgagctcatgagagcagcacttttctttcttgttcactgctgtattcccactgccttagaattgtgtctggtacagagtggacacttggtaagtatatgttaattcagtgaatgaatgattgactatttgagactcacacctcatctctatattttacatttttttcacatttgcatagataaaaacagcatacattatcttagatagacccttaagaggaatgtttttactctttttgcttgctaagtaatcataaataattccttgagtagcagcaatatattctaatattgaccaaagatttgctctctagaaattttcattgtagttagaaagttacaactttgaaacaatatactatggttaaatgcaaattttgtagtacagaacctagttctgaagaagattagcacctttgttacaagcatttgtaacactgaattattatttttctgtctgtgtttctctcttgctgaagcaagctctttaagaacaaggacaaggataggataagataggaagtcttgtctccaacatccagcgtaagatatggcaggtcttgtgcgcgcatgtgtcctgcacagtcatgtgtttgtgttcatgtgtttgtgtgtgtgtataaaggctgagtgtgtctgagtattgtagacatatgaaaaggtttaatgaagatgagtggatagagtttagataggttgaaatctggggcccgtagctgctgagagatgctaaatattaatatacccaggtttgggaatcatcactggtgatacaagttgaaagagagaacataaaaggcaaatgaccagaatctgaaacttgggaagaatgatagagaatatgaagagtggtgggagctatttagagaaaatactgagaagaaaatataaaaagtgacaaagtgtcaagtagagagctagaaaatgaaatctgagatatgtccattagatggaggtctcaacagtacttaaaaatatactttctgaataaaaatctgggaggaataagaatcttcagctagatttcatatatagctatgtaaaatggtaggtaagatcaaaagctgcagagaaagaatacctggttttaaatctgctatgtgattttaagaagaaaagctaatatttactgaaggatgcagtgtgcaaagcattgtggtaagcgtgttacataaatgatgtaacttaattctcacgccactttaggaggtaggttatttatacgtagggaaacagaggttcaatatctttgaaaatttagctattaaatgatgaaactgttacagtaccacgtcataagcattcaaaaaacttgtagtttcagagaaagagtagatactaggaagtaaatggaagaaaatgcttgatatagactgtatattcaggaaatttattactagataaatcatataagaggaatactatatacaagccagagtaaactagtttcaagtgaaagtgtatttacaagggaagaacctagtgaaaggggttcattgaagctattgaagaaaggggagattgactgagcataaggggaaactactttctgaaagaagggacaactttctctgagataaaaggaaagttgatttgatagctataaagatggagatgcattgacaggtctggccagagcatatttagaatggcttttctttccttgacgaaaaagttagaggtaaggtcttctgttgagattgatggtgagaggcttaaggagaaacagtgagatctgaaacacctgccaggtacagcattaagggcagctgaagttggagacattttacattagaatggtttgcatcatcaagcagcttcagtctaagaagagaagccaaaagagtgtggagagtgatccttgctatgtagtagcccagctgaaacttgggcttagaagtgtagaaagtagtaagggcccaagtgagcatggagggtcagtttaaacagagatatcaaagacaacccttgttatggactacataatccataggcagaggatttttcctctttgcaaaaagaaataaaagtttattttggataaatgtgaaaagatttcacttgatgaaataaaatttacagctacttaaaactcttctgctttaaaatataactgttaactgatctaaagttattaatattaagtgcattaatttctaaggaattaatgaaaatatattcagatttacttctaagtgaatttatatagtatttccttttccctcctttcttatttaatacagtgagacattcactagttttattttatttattttttgaacattcgttaattttaaaatgaaaaatgttttataggaatacatgcaaatatgtggcaaagttaagaagttgaacaaattgattcagtaccatgacttactatttgctctaaagatgttaactaatctctgtgaccttattgcaactccttcttcatcttctttttaaatagactgtttggattgcataagaaagtcatcaatatggtacacaatttattatccagtcacgactcagatccacggtactctgacccccagacaaaggctcgagtggctatgttgtatctacctctgattggtattatcatggaaactgttcctcagctatatgattttacaggtacttagtatatttaagacaaactctaaaagcaaatctgtgtttaaaagtattagaaaaatctgcaaatgatcttactttaggaaaagaaatacaagaaaactcacaatgatgtaggtactctgtaaatacttaagagattttgaaaaaaaactcttgactttgtgagaaaattcactgcaacgattctgtaagtatttcttacgatgcattagaaaaaatggttttacagcatttctatacctacctattggatgacccagtggtaaagaatctgcctgccagttcaggagacgaggagacatgggttcagtccctgggttggaaggatcccttggaggaggaaatggcaacctactccaatattcttgcttggaaaatcccatggacagaagagcctggcaggttacaatccatggggttaggaagagttggacaggactgagcatgcacgcaacatgtctacctattaggaaagagaattgtgtgtgtgtgtgagtgtatactgtttatctggaaaaaaaatatgagaaaacttgtcagatatctaccactctcagtcccaattttattcatatacataaaattgaaattaatatttgcaatagcgagaatggtatcgctaatgctggttaataagtttaagttatgttgctttttaaaaactgtaaaccacaaaattttattcttgctttccacttttagaatttatttaaattccttcatttctcttaaagaaaataggtaggttgcatttgaactagcagttagcctgataaagtacttccagttcaattaaaaaaaattttactgttatctaatatgtaccatcagtagatgctgctgatacaaagataaccaactccttgcctttgatagacttataattgagtagttttcctagtatttgatcattaaagtgggtttccttatctgaaggcagaaatttatattattgttactatatatcttttactagcaagtgctgcagtacatggggttgcaaagagtcagacatgactgagcgactgaactgaactgaatgttccttacaaaactctaagtagtactatagaaatgagttagtgtttaaaatatttaaagtgaagttgctcagtcgtgtccgactctttgcgaccccatggactgtagcctaccaggcttctcagtccatggaattttcccagcaagagtactggagtgggttgccatttaggtaaaatataataatatgcaatatatgttaataggttttcctttgaagaataaaggagaatagaaagggaattgcatgcccaacagctgttacttaacgagaagtttatttatttctgggttattttttccagaaactcacaatcaacgaggaagaccaatctgtatagctactgatgattatgagagtgagagtggaagcatgataagccagacagttgccatggcaattgcaggaacatcagttcctcaactaacaaggcccggcagtttcctcctcacatcaacggtaaaaacaaccctcctacagaagttttatctggaaagatagatatttataaggatatactgttccataacagattattatattaactgatgcaaaaatactcagttttattttgtgaaaatattttttttctgaaaatattttctatactatactaaattgtttgaaaaactcttaattacctcaatctttttggtataaaaactctattttatcattcagaattttgaaagttgccccattttcaatttatagcctctattcttcatttttaaaatccattttattctttatcagtcctaagagatataatctcagttgtttagctgttgagaatatttattttgaatctgtgaaggttcatactttttcatatttaaataaagtgataatcattttgctctgtaattttccctcttaaggagggaagaacatggtggcagggaggaaacaaattgctagtagagcaagatcaacttctaaaagttttaaatgactttctttcaaaaagctgcaatcatatttatggaagctggcctacttgacaacttctaaaaaggttttatagagataatttacatatcaaaagattcatccattttaagtgtataatttcatggtttttagtatctgtacagagttaggcatctatcaccacaatctgattttagaacatttccatcattccaaaaagaaccctgaggcccattagccttcactctctggtgccccacagccatagtcctaggcagcaactaactttatttctgcctgcatagatttgcctattctggacatttcatatagatggaattatgcactgtgatctttatatctggcttttttcactaagcaataatgttgttgaggttcattcacgatgtggcatgtatcagtacttttttttaattgccaaataatattcctttatattgataggccatctttttttatccatttatcattgatgaatatttgaatcatttccagtttggggctgttagggataatgctgctaggcacacttgtgtccttgtctttgtgtccacacatgttttcatttctcttaggtagatacctcggaatggatttgctggatcgtgtgtattaatatatttaatattttgagaaaacttttaaactctttcagagtagctgctccattttaaattctcaccagcaattaataaaggttcctatttctctaaatcctcaccaacactttttattatctcttttttattatatattcttcacaccttagtatgtgtgatgtggtgtctcattgtggtttgactttgtgtttacctaatatctactgatattgagagtataatttcatttgtatataatacacatcttttcatatatcttacatagagaaacgtccattcaaatcctttaatattttaagattgtgttattcatcttcttgttattgagttgttattgaaagggtttttgtttattctgaacataaattccttatcagatatgtgattttcaggtattttcttatgtggattatcttttcattttcttgatagtgtcacttgaattggcaaagttttaattttgatgaattctaatttatcagttttttcttttacttgcatttgctattgtatatatgtatataaagtgcatgtacagttaaaatataataggagaaacagcagcgtatgtgccactcagcttcagaagtagaacttttcagtttccttaaaagttcacagtttgctctcaattcaatccctttctcccctcaaaatgaccactattctcaattttattggccttgctttttattttttaaaacctcgcttatgtgaaatatactgtacatgaaacataaatgtagatatttacaaaagattttaaagtaatacttttgtaaccaccattcaggacactgttagtatagaacactgactcctcattttccgttggattgtctgcctttgtttataatttatagtagttcatatgtcaggattaagtccattgccaattataagtggttcaaaggtttctttctttttgtaacttgctttttccacacacttaattgtgaatttagtgaatagagtgtcttattttaaaataagattgtattgaatctatggatcagtttttggaaaaattaatatttatacaccagtgaatcccaaaatcgttgaatatgttagatctccccactattaggaccttctttgatgtgtttatatacataaacttttacagctttttaccaaagaggcccagaacatcttttgtaggtgtattgttggtccttgatattttaaaagtattttagtaatattataaagttatgcagtatgataatatataatacacatataagtatatatatataacatcatgatctcattgaagaaggcaatggcgtcccactctggtactcttgcctggaaaaatcccgtagatggaagagcctggaaggctgcagtccatggggtcgctgagggttggacacaactgagcaacttcactttgacttttcactttgatgcattggagaaggaaatggcaacccactccagtgttcttgcctggagaatcccagggatgggggagcctggtaggctgccatctatggggtcgcacagagtcggacacgactgagcgacttagcagcagcagcagtagcagcatattctcatagtctcataaatgtcatctttttcataaactgttttctaattgctgattatcttttttttttttttttttggccatgccccacagcttgggggatctctgttctctgatcagaaattgaatctgggccatggcagtgaaagcaccaaatcctaaccactaaactatcagagaactccctaattgtttattgcttttgtgtggacatagaattgattttgaacaataatgtttatttccagaagaattgctaaattaataacataggtataggtttttttttctatgtatacaatcatatcatctgtgaataatggccattcatttcttccttccagtgttttttcatagcttgtttatgagctagaatcttgagtacagtgttaaatagaagtagtgatagttggcatcatacaaggggaagcttgcaacatttcattcttaaatataggtgctaaaggttttggttttgggggttggtttttttaataccctctattatattatggaagtccccttcttgttcttagttggctaagagttttacttttgtaattatgaatagttgttgagttttatcatgcttttttgcaccattgagactatcatgttattttgcttttttatcttttacttttaaatctttcaattgattttctagtgttaaacctaccttgaattcctgaattaaacttaacttttttgtgatggtgtattaatggatttgatttgctgtattttaagattgtgtatctgtgttagtaagatcataatgttctattcagattttggaatcaggtagtttagctgatgaaaatgaactaggggatttcccattttatcagttccctgtaaatacttgtttaaaattgaaattattcttcctagaatatttggagaacttgtgagtgaagccatctgtacctgcagtaatctttttggaaagtgttaaaattatctatatatttaatgattgtaggactgttcaaggtttctatttctttttacactggtttttgtaaattttattctagtagcaatttactcaaatttcttggcatacaaaattgtttcaaatatcttccatgatttttaaaaagtctataatatttataggagatgtaaacattttcatttctgtgacttagcttttcatatcttttgtcttaagtcgtctcagtagaaatttgtatattcctttagtttgtataaagaacacatttggggtcaatgctgagcccccctttttaatgtttattatttacttttactttcttttggtttatattgatgttcttttttctaacttctttagatagatgcttattaactcgctaattttcacccttccttctttgatgcttactttaattgtaaatattttccattaattattcttctaactacatactatgatttatagctaacattttcattatttaattcatgtagttgtattttgtcttatatttttaaaatctggtctgttcatttttgtctttcactaaaattttttaatttatttacatttatgtaaaatcatggcatctggtccctggcacttcatgggaaatagatgggggaacagtggaaacagtgtcagactttattttttggggctccgaaatcactgcagttggtgactgtggccatgaaattaaaagatgcttactccttggaagaaaaattatgaccaacctagacagcatattcaaaagcagagacattactttgccaacaaaggtccatttagtcaaggttatggtttttccagtggtcatgtatggatgtgagagttggactgtgaagaaagctgagcgccaaagaattgatgcttttgaactgtggtgttggagaagactcttgagagtgccttggactgcaaggagatccaaccagtccattctaaaggagatcagtcctgggtgttctttggaaggaatgatgctaaagctgaaactccagtaccttggccacgtcatgcgaaaagttgactcattggaaaagactgatgctgggagggattgggggcagaaggaaaaggggatgacagaggatgagatgactggatggcattaccaactcaatggacgtgagtttgagtgaactccgggagatggtgatggacagggaggcctggcatcttttttttaatttacttattttttattgaagggtaattgctttatagaattttgctgttttctgtcaaacctcaacataaatcagccataggtatacatataacccctcccttttgattgtcttctttagatatagtttttaaaataagacctacgttttaataatagaaccttttagtttttcccttcatgtttcctgttaacttttatttacagttttctgtaagccctaaaaacaattttctgttgctaggaaaggttcattaagtttcagaaccttaagtttaaggttatgtatgagttacacaaatattgcctaagtcaaatgactctttcaaaatatttgattttaaagtaattactttcacattgcttttatttatttatttttttactttattttactttacaatactgtattggttttgccgtacatcaacatgaatccgccgcaggtgtacatgagttcccaatcctgaaccgctccctccctataccatctctctgggtcatcccagtgcaccagccccaagcatcctgtatcctgcatcgaacctagactggcgattcatttcttacatgatattagacatgcttttagaagagaacaactgacaactgaaaaaaacaagtggtctttgatgattctgtctcattttactgctttttattttcagagtggcaggcaacacactaccttttcagcagaatcaagtcggagtcttttgatctgtctgctttgggttctcaagaatgcagatgagacagttctacaaaagtggtttacagatctctcagtcctgcagctaaaccggctattagatctgctttatctttgtgtatcttgctttgagtacaaagtaagtgatcattgtgccattgcaaagaggagcaagagggaacataatgtggaaaagaagagaatttccttactgtgtcttcttttctaatgtttaaattttagggaaagaaagtatttgaaagaatgaatagtttgacctttaagaaatcaaaagacatgagagcaaagcttgaggaagctattcttggaagcataggtgctaggcaagaaatggtgcgccgaagccgaggacagcttggtacgtacacaatgtcttctccttctggtgagaattctttcagattccctgaacagtattacagtgatcatttttgcaagtcttcaatgacaattctgcacttttaaaacagtgttttaatgtagctgtgaattaatgcaagttagaattctatttaattagagtgaacatacttccagtttgctctggataatctcagtttgttcttgtaacctttgtgtgattattaattgtttgccttattttaaaaaaaggtgttaaagagtagttttagattcatagaaaaattgagctgaaaatacagacatttcctatttatcctctgtcttcacacatgcatgacacctctcattatcagcttttcatataggagttgccatcacttatcacaattgatcagcctacactgatgccttattatcatacagaatctatagcttacattgttctctcttggctgtatatcctttgtaacatgactttgtactcttaaaagtttcctacttttgcagtgaattaatatatcccatagattaggcaaaaatattgcctatcccaagtatcaggaagagaaaataatttagttgcatctgaagcctgtttctaatccctggtctgctacccattagccatgtaatcttggccaaccatttaatcttcctactttccctttcctcatccacttgtggttgtttgagattttaaaaggtagtgtaactaattgatcttatcatctttgtggtgaccgtgtgtatgtatgaacatttcgtaaattatgaagcagtattattgctgaaagcaccttaaggtcaaggacatggtttagtcatctgtgtacatgacatatgctaacagctcaatatatgttgttgacttaaaatgtgagtgtatgtttacatgaatattttatatgtgttgttttttgattggccatttaacttaatgatcctttatttaggtaaacttaagtatcttttatatgctatgtgtgtttggaatttaataatgaataagacagtctttgcctttgaaattaatagtgttgttttttcactttagttgtatagagtttcagttcagttcagtcgctcagctgtgtccaactctttgtgaccccatggactgcagcatgcctggcttatatcatgtacctattgattttcttttaactcatttaatatgtacaacaactctgtaaagtatgaaaattaactttctaggtcatttaattatatcaaacctaacgaataattattttcatctttaaaataaaactctcagaggtaaataacttgcctaaggtcataaactaagtgacagaaccagaatcttttgacttctaatttagtgttctttatattataccatagctctttctagacttactgttgaaaggaacagagcttttaacaatatgtttgttacatttttaaatgtatagtgtttggacagctactgctgtttaaatgtaagaaatgaagttctggacatggaagctaaaaaaagaaaaaccacaagtaaaccccactttccccaaactcataggtacagggaacagttaggtgcaggataggggtggacaaaatgagtgaagggagtcaaaaggtacaaactcacagttttaaaattcttaagtactagagatgtaacttacagcatgttaacaaatatatacttgaaagttgcaaagcgagtacatcttaagagttcttatcataagagaaaaacatctgaagctactcatggtcatggatgttaactagacttgttgtgatgatcattttgtaatatatacatgtattgcatcattattttatacacaagaaaccaatataatattgtatgtcaattgtgtctcacttaaaaaaaataattaaagttctcatcttcttaaaattaaaataattccatttgcaattcttatttatatttggacacttaataagttaggtcacctaatgttagacattcttaactaaggagatgagagaaagtttcctgaaaaaaaaaaaaaaagttaatggtaataatgaaggtagatcacagatacttattttgttaactgtcttaagatagacaaatctttttgctttctttcacaaaattccttaaagacagaggtttcaaaattgaagaagtaaagagggacagagagaaggaaaaggagagaaagcagaaggaatatccagactaatcctttgttgtgtgtcaaattatatttgtttctcagtatttttaaaatttctgtttgaactctgcatttttactttcattttactttccatccccccagccaaagtctcgtgtttttcaaagaggagtagtagtcttctagttgaaagcttgaggtcatgacttgattctgttgtttaagtatacgtgtttctccacaattctcaatgacttctccacttgtgctagattagtctgaaccacttctattgctgctgccccttaaaggagcccataccattcactctgccttctgtttctcttggggagagcccctctgttctcctctcctgccttctttggaccaaaagaaataattactttcagaaccttctgtaatttgtagcttttattcttgtggtcttaagtgctgtgaagagaaataaagtaaattaagaggaaacgaagtggtggagagttgaggaaggcctttcagcagaggtgacgaataactggccagtgaaaatttgtgtgaaaaacaatcaggtaaaaggaacaatcactattgtgtacatcctaaatcaagagcatatgtattgaaactacacacacacacacacacacacacacgataatggtagtataaacaaaggtggagaaaataaaatcatatcatgcatagtcttataaaccatggttaagattttcaggaagtcagaatttaaaagtttgcttatttacaaaagtgttgggttttctatattatatttagcaaatatatcctgtaactgttgtgaaaatttttaataaaaagcaccattgtcaggtttttccacttgtacggaggataaaatggctgtgttaataaaattactaacattatgtagtatttctttttttaacttttatttacttatttatggctgttctgggccttcgatgctgcatgggcttttgtctagttgtggtgagcaggggatgctctccaggtgtgatttgtgagtgtctcattttgctggcttttcttgttgtggagtgcgggctctggggcgagtagtcctcagcagttgcagcatgtgggctcagtagctgcggctcgtgggctctagggcgcaggctcagtagttgtggagggcttagttgctctgcagcatgtgggatcttccttgatcaggaaccaaacccatgtctcctgcactgataggtggattctgtaccactgagccaccagggaagccctgtagtatttcttacatgcttgcaaatatacatgaatgtggtctacctgaaataacatttttaaagaaggttttgaaatttgtttgacagagagaagcccatctggaagtgcctttggaagtcaagaaaatcttaggtggagaaaggatatgactcactggcgtcaaaacactgagaagcttgacaagtaataaaccttctattttatcttattgatgggcttgttgaatttcaagtgcaagaagaaaatgattacttttagtgttatgttatataattaagcattcaaattttagaagtcagaacagttatatttaatttttccattttggattaaaaacaatttgggggaagaatttttcatatggtatagtaaagctaaaggttacctatttaaatgtcaccttattttccccaacaatcccccctggaaaatggattgagcagctctttttgaaatgtcactattgtgggtgtcacactgaaagtaaatatttcaaggattataaaaaattagaaaatctttgctctcttagagcttaaaatatagttaaagaaagacagaacactataagtcttctgtttctagtatggagacaaactaggtacactaactggccactctattgccaaaaacaactaaaagtgcattttcatgagtccaggattctaaaggactgcatcttcataaggggaactggaaataaacccttctcactgcccaggtaaccacaggtaaaattgcttgacttgaaaattgcttggcattgtgtcagagggctgcaatcttttcctgataatttctaatttcaaattagccctcaggtaacttgataggcccctaaaactttgagaatatagtgaccaactcatttgggtttgcctagtactcttaattttagcagtgaatgtcccagggaccgaccaccccaccccccacccagtcctgtcctaaattggtcaccctgagaaccatcttctgtccaaactttagaggattctcacagagaagctttcagaaatattagctctcctacacgctcagtagctcagtcatgtctgactctttaggaccctgaggactgcatcttgtgaggctcctctgtccatgggattccctaggcaagaatacaaggttgctgtttccttctccaggggatcttcctgacccagggatcgaactcacatctcctgcttggcaggcagattctttaccagggaaaccagctgtcccacaataaaatcataaaacacaggaaggagccagcagagacagaagcagcaggatcggtatcacatagataagtttaggattgtcagaaactgtcagtctctttacgctgctatgacaacacacactgggttactttaaacaacagaaatttatttcttatacttctaaaggctggggagttcaagatcattgcaccaacagcttcagtatctggtgaaggcccttttctgggtttataggcttcttgctgtgttcccttatggtttaaggacaaggaaattcctaggggcttcttttatagaggcattaatctcattgatgagggctctgccctgattttccaatcaccttccacaagctgcacctcctaacactattaccttaggcattagattttcactgtatgaatttggcaggaaagacacatacttggaccagagcagatgctgtatgtaactgtgttaaaaattcttaaagtttgagggtctgcttttctgtcttttttgtccaagcccatttctttaattatttttccatatgtattgtgttttttaaaaatcacaaagatactgagatactgtgttattagtatactgctttacttctgcacttgtattatgtgttctctttgcttatcttactttgttttaaggaagccattttctttttcttcttggtattttcctgattcttttggtttaaatatcttgtttttcatgtgtcttcacaaaatctcactggaattttaagtctgaacattatatttcttttccaatttaattctaatattgtattttctccttaaatttataaaatgtaaattcataaactgttgtctttagtggtagtaataaagattcagactttaattaatagctgactttgaaaagttaacatttaatacacccttgtatttttgctttgatttatatatatattttttggtttatttggatatagtttccatatatacattgcgattgagatgtcaactttactcataaatcacatatagtcattaaattttaattaaataatacttttgtaaatattagtattcaagtaaaccactttattacatcaagttttatttctaatgagtaattccatccagaatctcactgaagagttactcattttctatattaaaattttttattagaaatctgggaaaattagacagaactttatttttaagaaagttcttttatcctaaataaatatgttgaaaatccttgaaatggtaacatgaatactaaacattttgggtactgctttaaagtagccctaaatacaagcctatatagcaccacctagtgtctgtgccatttagaacaaaacagtgttttcctgtgtttgctataactctctctgaaagctaagtatttatgccgttagtggcactgtagtactgtaatggggtgagaaaagcttggcatgtttgacaaatgtagattaaaacaaaacatttttaaacatgcagaatatttttccttatccacttagtaacttcgcactcaggcaactattagaaaaactcttcccctgaaaaggaaaaatgattccaaggtttttaaatttctgtacatctttaaatcttttgtgaatttcagatctattggattttctagaagataacatataatttcttctaatcttttgttttaggtcaagagcagagattgaacacgaagcactgattgatggcaatctggctactgaagcaaatctaatcattctggatacattagagattgttgttcaggtaaaaacactaattagaggaatttaaactagtatagatttgataaattagggttggggaaaaaggtatttattgaaccatataattatatttaaatatcagtagatcccaaaagttatgtcctcgcttctcttttttttctcatgtaaattctgtccattcttttttccccttttcttatcaaaatccctctcagcttctttttcttgaggagcttctagatcttacattatctttttcctattaaaattttaatttgttaatttttacatattctgtctctaaccagattacagttaacatctctgtttttaaattgcagacagtttctgtaacagaatccaaagagagcatccttggtggggtgctgaaagcgttactacacagcatggcctgtaaccaaagtgcagtttatctacagcactgttttgctacccagagagccctggtttcaaaggtgggttatttttgtgcctgctgtcttgtcagactttgttttctttactaacattgtctaggatcacttgatacattcattgattatatcttaaatatatttatagataaaattttagtaataatctaagacttgattcttctttgcctttcctctactgcttatttctttcttacttggactacctttaacctgttttctgaattgaaaaaaaaaaaaaaaaagagtagttctgaggtggagaagggcctgaaattaatagcctgttttaaatattgggctttttgtgttttcatcttattttatctatttcttattgatgtgaattatcaagaattagtgtgtcagtcgttcagtctattgaaattagcttatcctaggtcaatggaaagacaaatacttgctttgtttgtttaactacttcaaatatttatttcctatgtttgttttcctctgaaaatctatattcttaatcttgaaggtgtctatttcatcttagtcatcttataagatgaaacttagccagtgaagataacataccattttgtaatagtaagaatatttcacgctgtgcagcaaaaaactaccataatattgtaaagcaactatatttcaataaaaattattaaaaaattttatcatagacttattatgtgttactatagtaagtgttttattcacattatcttatctaaggtagtcatacagtcccacataggtaatattattaggcccattttatggaagagaaaacctgtccaaggtcacagtactaacatagttcatattcaaacccagtctctctagttcttgggtccattttattaaccagtagcaaatattctctcttaaacatgctttccatttctgggctacactaacaaatctctccatcaggctatattaacacatgtgtgaagctcctgctacataaattcagtggtgggattgtttctttacagttcccggagctcttgtttgaagaagaaacagagcagtgtgctgacctttgcctccggcttctgcggcactgtagcagtagcatcagtaccatacggtcacatgctagtgcctccctttacctgcttatgagacagaactttgagattgggaatgtaagtgtttcattttaggactgtatctttggattcataatgaactataacttctgtaggtatctattaagtgggtttggggagagcatggcattttggggtgtactttgagtctaatcttaagactatttctttttctcattctgtggataacataaaaatccaaatctccagttttattttgtatattaagaataacgtatagtagtacagatttaaactgcaaatgtatgttgagcgactgtaaattgtaattattatcattaagtgaagtgaaagtaataagaaaaattaaaagtttaaatatctttgctcgatattttatgattatatgccagaatgaatatatgtatatgtatgaattaatttaaaaaaaataaataaaaataaaataaaaaaacaaagagtggaatgggaaaaaaaaagaattccatgtcttcatctatggttttttatttgattatggacttatgtgttgtatttttcctagctttttgagtccaatgtttagttcatttattcttactcatataattatttaaggtctagaatattgcattgtgctcttttgaggtctcattggttctagtacctagtatttttagtattcttggtttctattcaatacatattttgtaatttcagtttgtattttcatttcaacttgaagttttaaagttgtgatgatgatgatgttctgttgctcagtcatgtctgactctttgcgacctcatggactgtagcacaccaggcttccctgtccttcaccatctcccggagcttgctcaaactcatgttcattgagtcagtgatgccatcaaaccacctcttcctctgtcgtccagttctcctcctgccttcaatttttcccagcatcagggtcttttctaatgagccagctctttgcatcaggtggccagagtattggagctttagcttcagcatcagtccttccagtgaatattcaggattgtttttcttcaggatttactggtttgatctccttgcagagttttaaagttttgatgataatttttgggttttgtttgttttctggctctcctgtggcttgcaggatcttagttcccaaccagagattgaacccaggccctcagtagtaaaagtgtggagccctaaccattggattgccagggaattcccagtaatttttagttttactgcagagtgatcacagtacaattaatatgtctccattttggtactatggatgtgtgtgtttgtgtattcaaacataaaatgtttttattaatgtgttacacaagcatttaaaaagaagtggtgctttattttcgtctctttggttgactaaaagagatgatttaaagcctacatattgtctatttctccttttggtcttatttggtaaagtgatattcataactgtttggtatattgataactactatttgtaactattatatcttactatgaattattccctttagaattgaagaagactctgagatggcttaatttaaaatttttatatttttgacctgacttctgccttgtgtactattgacctctacttcctttctaatttgaatgtggcttaggttatctttgcctgtccttttgttttcactgttttgaatcactttattttaaatgtgtgtctcatctacaacatagagttgggttttgctttgtaattcagtttctaagttgaataaaacctttcatccttgttattatatcagctacatcctggatttgtgttgtattattctgttatgcttccccactcctctccttaaaaaatgagttggttgttttcatcttgtacgtagtaagttcaccttcaagtttatattgctttagtggttacctttataattatgtagtaccttcagtcctctgtttctttaatcatacattctcagtggaggcagtattgtcaccagcctagtggatattggttcttagctatcacagtggtgtcccttgagttcttatatttctatgattttttttccttcctaaagttaatggcttcataaattttttataattcaaagtaaaatattttaattagaattttcatctgtttcatgaccacattttcctattaagtattctttatctggtatttcactgatcttctttacctttttgttattcaacatagaatgaggcagtttatattggcccaggtatttgtaggacattctatttctgtccagccctttgggatttttttggttgttttttccttgagacagatagttttatcacttcaaagtgagtttcttatttaaatttaaaagaagtgtttttcccattatttcttaaatcagcaccctaggattcctcgctatttgctatcccctctttgccttccattgaagctgcttcctatttagcttgtcttggcagcccttatgcatttttctaatgtatagattatattagtctcctcattttgctgaaatagagtttatggacttttttttctactcatcttttatttttatatgaaatgcaggagaataagaacttgctatctcacactgtcctatttttactggaagccaagtcttctctcctaattcagaacaaagaatctagttactttatagatcttatttagtttttgaaataagagtccctaaaatttgactacacttggagttttcctctgttattttaggaaagctttatattaatacaggagaattaaaaatgggtaatttatcatgttaatgtcatgtagtacctctaaaaaagaataggtgacttatacttggcacaattttatatagattgtatattcaagagatattagaactaagtattaaattgtgttctaggtactgtggtaggcattgggcaaacatagataaaaggaaacttattttaaaatggcttaccatctactaggataggagatgaacaggtaatgttcagctagtaatagtaagtacctactttagatggttttgtgaggattatataaattaatattaaataacacacttattatatcagtaactgactctgagcaaatgttcaatatgtgtttgctgttgatatactgagaggtaagcacaggaaactgtataagcacagagaaaaagagcatatactctcaaggagggtttcagaaagaggagatgcctgaactaaggatgaagaattgcccacgcagatggagaagtagtgggtagactttttaggtaacaaaaatggcacatacgtaattagaaaggcattgaggtgagagaaggaaacaggcaaacagagaaggaaacttttttagcacttctttattattatggctcaaagagagaataatagataaaagtgtaattgaaatgtttagattaagctgtcataggacagacacttgtttatcactgtactttcagttcccaccatgtagtttggcaggtttatttggtcaaatacatgaattttatctgcaaagctgtgagcagccagtgaagtattttaagaagaagactgatatgtacattcagatttacattttacaaaaatttccctgatgctccttaggaggtaaggaaaaagaaagattggttaggaagttattgcagtaatccaggtaagaaatgataagggcataaagtaaagcaatggcattgagaatggagaaagaacagattggaacagattagaagatgatgtagattgagtttatagtatgaataatgaatgggcagaatggctatggaatgactcctggttttgggcctgtgtaactacaatagtagcaccgtttatttaatcgataggacagactttattttctagggctccaaaaccactgtgggtggtgagtgcagcctcgaaattaaaagatacttgctctttggaagaaaagtaatgtcaaacctagacagcgtattaaaaagcagagccattgctttgcctgcaaaggtccatatagtcaaagctatggtttttccagtagtcacgtacagatgtgagaggtggacaataaagaaggctgaatgctgaggaattgatgtcttcgagctgtggtgctggagatattgaacctgaagctccaatagtttggccacctgatgcgaagagtcaactcattgaaagagaccctgattctgggaaagattttaggcagggggagaaaggggtgacagaggatgagatggttggatggcatcactgcctcactcaattgacatgagtttgagcaagctccaggagataatgaaggacaggaaagcctgtcgtgctgcagttcttggggttgcaaagagctggacaccacttagggactgaacaacaaaggttgtcactgaaaacctcttaaaagtggtttcatagtggggaatggtgaaacagaaatgaatttacaacaaaaaaggaagaatgtaaactcttacagtcatcattccaaagaatatacctttaagttactttgtataggatatgagttaagttacacttttatcatagcagtgggcataattaaatcaggtagagtgtagtgaccacatctgacacttaagaattttgtgatgttggtcaagttctttaatgtcatctgtaaaaatggtgctattgttaataacatatacctcatagaaggtcggagaaggcgatggtaccccactccagtactcttgcctggaaaatctcatggacggaggagcctggtaggctgcagtccatggggtcgtgaagagttggacacgacctgagcgacttcacttttcactttgatgcattggagaaggaaatggcaactcactccagtgtgcttgcctggagaatcccagggacgggggagcctggtgggctgccgtctatggggtcggacagagttggacacgactgaagtgacttagcagcagcagcagcagcataggtcaatataaagtctaggcacaacttctaattcaagtctaacccacaatttttttcaactttgttttttaggctgttatcacaggaagattctaagctttatgtccatttaaaaataggatttcaatactacacatttcattactttttcaaaaatattttttctagaatgatgttttatactaactttttctttataggaagtgaaaaaaatagacacttcccctttaagctttcctttattaaatatttgcctggcaatttctctgttacagaacttcgccagggttaaaatgcaggtaaccatgtcactgtcttccttggtgggcacatctcagaattttaatgaagaatttttaagacgttctttaaagactatactgacatatgctgaagaagatttggaattgagggaaacaacatttcctgatcaggtcagaaatgctactttttagagcatgaactgaaataggaattgtaaataggcatttcccaaattgttaaatcaaacttcagtttttcctggcagaacctgtgtttttctttcaatccatatgtgtcatagataggactgaatctctgttttaataagccactcttctttctcataatggttaatatttttggtgtttaattctgtgaatttgtgccaaaaagaacactagacttagtcagtatggataaacaaaaaactttatgatgaaagtgttcccactgatttgtgaaacagtagtttgcctcaaaaactaagtttatacaaactaccttttgagaaaatctgaaaatcagaaagaacttcgttttgtattccttatatccgtatatgtttcttatttctactagtagttctacttgtgtctgggtgagagaagtgaaaaaatagtgggctgatgaatttgtataaaattaactcttcacccatcttaccccagtatacccacactctttagaactatatcaaaattgtttcttttgaaagctttagatttcaaatctgaaatatcttccaaactaatcgaatggttgtgaataaatgacagctgaagaatgtttttcatataattctctgctacaggttcaagatttggtttttaatctccatatgatcctttctgatactgttaaaatgaaggaacaccaggaggatcctgaaatgttaattgatctaatgtacaggtagcgtttgtttaattcacttataccttgtgttgttgttgttagctgcttagttttgtccacttcttttgtgaccccatggacggtagcccaccaggctcctctgtccatgggctttcccaggcaagaatgctggagggggctgccatttccctctccaagttaactttctgacccagggatcaaacccacatctcttgcaatagcagatgggctttttaccactgagccacctgggaagccctgtgtcttgtataatggggcttaagttaatatgatacacagaaaacatgagtttacaagaatacaaaaattatttgtcattttctaatggtaattaaagcccactccagtattcttgcctggagaatcccatggacagaggagcctggcaggctatggtccatggggtgcgaagagtgaagcgacttagcaaggcatggcaacggtaattaaaaaatcaaaatgtgctttatcagatcccctatgacacttcttcttttaagaattatgaataattgttcagtgtatttattgattatcaaaaacaagatttttaaaatatagttaagaccttggcatcctgggccctagagttcctaggaaggctgaagacccacattttaaatgtaaaaattagttctttaagaagaaaacatagtgtattaatactttattacaacattaattttactcatgttaaacatggtttttgcctataggctgatatatttattgggtatttttagaattttgttaattcctgttgtatcttcaaagatgtaagtaaagcttgactttttctttgccatttgaccttcattttttacagttttcgagtttcttaaagacaagaataaaatatttcctttaaaattaaggtgatacaatgaaagaagcttttataatttttttccttgaatataaatattatttagagccccataataaacatgtaaattcccagatcttccgttactgattgtttccttaaaggacagattttcatataaaatgtctcttttttttaagctcccccctacccccacaaaaaaaaaacctgatactaaccattccatgggcccacaattttttctctaagcacactcaaaagcatgttcatacaacccaaaaacttgtcttaataggttgtgttcggtaatagaagcctacacactaaacaggcaatttgaactcccttccagattaggaagcaaatgctaattgagaatttctgttctaactagaattgccaagggctaccagacctctccagatctgcggctgacctggttgcagaacatggctggcaaacactcggagcgcagcaatcatgctgaagctgcccagtgcctcgttcactcagcagcacttgtcgctgaatatctgagcatgttggaggaccggaagtatcttccagtgggatgtgtaacctttcaggtaggaatctgccttaatcaaggtatgtccttttctggtttaacttttctcactgctgtttatattcatccagctgataatgaaagcacagactgaaagtgatgcttcacaagatgaattaacgtttcactatcacttttattaatatgtttttaaagagtatttcttgttaattctcttccatgttttcttacctgtacattatcagtgctgtgtaaactacatttattctctttgcctatactgctatggacttcatagcatctatgaagtacattcaaaatattgaaaatcaggatagtggacactcttaattggcttttaattaaaataccaggtaaaccagcattctccattatttatgcttatataaaatatgctaagatatgactcagagatgatagttcatgctctagtaaggctacatacctctgacccactggctgaattctttgcctaccaagagtcaattctgctttgcttttcttcaaagcctcttaattccaggtttaggaagttataaaaattatttaaatattatgttctctgataaaatacaaaaagaaagtgagttattgtttttgtgaaaattattaataagctgaatattttgcaaagagatcaagacaagtagaaaaagattgagggaaaatctctaagaaatttaggataatttgataatcttttaagttcaagtttttactctaaagaaaccaaaactgaaaatcttaaatggaggttacattgtgggtatttagtcaagagagattacatggaactctgatcttgagacccatacacaagaaaaggccttagatctacttcaagaaattgacaaatgtgtgactcagttcagttcagttcagtcgctcagttgtgtccgactctttgtgactgcatgaatcacagcacgccaggcctccctgtccatcaccaactcccagagttcactcagactcacgtccatcaggttagtgatgccatccaaccatctcatcctctggcgtccccttctcctcctgcccccaatccctcccagcatcagtcttttccaatgagtcaactcttctcatgaggtggccaaagtactggagtttcagctttagcatcattccttccaaagaaatcccagggctgatctcctttagaagggactggttggatctccttgcagtccaagggactctcaagagtcttctccaacaccacacttcaaaagcgtcaattctttggcgctcagctttcttcacagtccaactctcacatccatacatgaccagtggaaaaaccatagccttgactagacaaacctttgttggcaaagtaatgtctctgcttttgaatatgctgtctaggttggtcataactttccttccaaggagtaagcaaagccaacagacaaatcatggctgcagtcaccatctgcagtgattttggagccccagaaataaagtctgacactgtttccactgtttccccatctatttcccgtgaagtgatgggaccagatgccatgatcttcgttttctgaatgttgagctttaagccagctttttcactctccactttcactctcatccagaggctttttagttcctcttcactttctgccataagggtggtatcatctgcatatctgaggtgattgatatttctcctggcagtcctgattccagcttgtgcttcttccagcccagcgtttctcatgatgtactctgcatataaattaaatatctaggttcaaataaaatatttaaggtatgtgtgtatcattttttcagaagtaataatggatcccaatctcattggataagagggctttttattatacatgagtgttttcattaatttgatgtatgttaggcaagccttgagaccatttttgtatctcaatttcccttatagggagttttaacaacatcaattaaattaaaagtaaacactgtttaagtcaccttaggtgttctatgtcatattacaattttccttagcccatgatttttaaaaattttcttttttacaacgttttattaatgaaaaagttagcagtggtgttacattttattgtcatcttcacaatacaagaagtttttggagatttgtctgttagctttgcattgactaccccctcttttttttttaataagctgatagctgtatttcgtcaattacttcatatatatcattcatgttaagaaattaattccatttcacaaacctaaacttttttttcctcctagaatatttcctctaatgttttagaagaatctgcagtctcagatgacgtggtatctccagatgaagaaggtatctgctctggaaagtactttactgagtcaggacttgtgggattactggagcaagcagctgcttctttctctatggtagatgactcttgttcatttcttcccacaattatgtacttcttagttattagtgacatgtatatttatgctttctgcttatgactgtgcttttcatttatgataattttctctaaatatctcaagaagtctctagtaatggattttcttttcatcattgcttattcctttttattttaagagtctgtcacttcctccattgtttttcatctgcttgtttgtgaaccagcacttagtctataagaggtttttttttttttttttttttttaagaaaactttaaccagaatacattttctaaaaccttaaaaaagcctctggtgctcaggaaagttacagcctctcacccgattggtagcataatgagctctattaggtagacattgaagtggtattaggaactttatgaactacatcctagatcccttgtctgacttccttaccatgctagaagtccagtccttgtccctccccatctgtatatgaagaactgaagtagtcatgtggatcagagatgccatatttattggtgaagggaaaaaaatagctcgctgaatccttgcttactttcttgaaccatgttgatagcatcacctgctttctgtgagttttctgatgagtgtttagtgtcccagcaccaaggtttgcaagacagtgaggtccatgtaagggtaaaagggaagcttgatgtaatgtactattacctgatgtagttaagtaatagtacatcacttccccattgtactgttactgggaatctgttgttgcttctcctggccttaaccctacccagcaatatgttggttatgcatatagatttaggaggcatctagcccctttctctgccatcttagtagttaaagcacttcaggcacaaattactcaacctactagtgccttacttttcttatccattaaatacatctaataatagtatgtacttcaaggactgctgtcaggattaaatgaattaacctatgtaaagtgctaatcacagtgcctggctccaagtaagttttagtacatttgctgttatcatcctctcattattataggtacttagaagtaactcatgtaaaaatgattctgagactcaaagaacattaggtgtttgtcctctttaaaatttcttgtttttgaagaccttggttgtcctgattccattcccagatctctgttccttgagcttcagtttaagggatctgaactagtaggggaaaatgtttttgctattaatggaatattttaataaatatacattctctgtatatatgtgtaattttaataattcacagcagtgaatttagattgggttacagtggcttatgttacagaagcctctattttgcaatagcatttaattatgaatgtcattctttttcagttaatctatttaatattaattaaaataattactgggatattttagttacactgaatatattttactattgcagctacatgattgcttaaatatactcctatgagctgactagaaaatataagaaccatatgtttattttcttgggaatatgctgatttgtgaagcaatgggaacttagtgactcttggaaaatatctctcttccttcaccacagccaccaatcgatagcagtataaacatgttttgttccttactctgattataatcagagcaacacttagccaaccactagtaaaccaaaacccctacttgaataaaatctggtggctcagaatcttatgttttgttaaagatcagtgatttttccataagagagttcccttaagattttctgtgccaatttaatattttgggaaagttaataattttagtgtcctaggaagcaatagatttatgtgatatttgtgtatctgtgacttgtaataattgggtttctatgtctctgctctgaatttgtttctgcaaaagtttatatgcatataaaaggacacacacatacacacatttatcttagttaagtaattactgagttggagaatgaaatggcaacccactccattactcttgcctggagaatcccatggactgaggagcctggtaggctacagtccatggggtcgcaaagagtcagacacgactgagcgacttcactttacttcacttcaattactgagtagtaaaagcagaatgtccagttcaaactatatggaagtataaatatacatatatgtacatgtgtgtatttcaaatacaaaaacacaaatacacacacacatgttttcactcaatagaagagataatatattgtgcaaaatttttttattaggtcttaaaaatcagtagcgtttgtttttatgtcctattggaaaatagtagtattgccttggaaatattgtgagttcataaattgcagttcactctcttatcgatgtaaaagaaagcaatctcttattattcttataggccggcatgtatgaagcagttaacgaagtttacaaagtacttattcctattcatgaagctaatcgggatgccaagaaactatccacgattcatggtaaacttcaggaagccttcagcaaaatagttcatcaggtaacaacagtactttctaacttcagtgttaagtggagaaaactgtctacaagctttagtgttgctttgtactaatgtcaaactagatcctgtgaaatgaccgttttaatcaagttgcaaatgaacagtttaaaaatgatggttcatggccaaagcaagattcagtaacaaaaatgaatttagcctaaggtagattatgaccatcataaccttcccacatagcttctcttttttcttcacttttttgaatgattactagttgctaatttttttaaaattgtgagttactttctgtttcacagtgtgagtaatagttatgaatttgattttttaaattgatttctattcatttcttccccaaaatgtctttatatttaactttttattaaatgatacgaaagcttaataaactcctaatatttttaatgatttcaactgaacttttaccttttttccagatatttttattcagtcatcctctgacatatttctaatgtaaaagtaatatttagtgaaaataataaatggttgtatttatttattcattcaattataataggatgatttcagtacttatttgtacttcacgggatccacatattatctttaaaattaaaataagcttggtttaaaaatgaagtagactgctagcagttgatttccctgaagctaaatcgttggctccattgaaatactcggaagcgttaagggtcctcctcctccactttctgctccctccctgtgctgcctgtgctgtcctctgctgctgccatcacttgagaattggagtgtagtgttggtttcccacttgtgcgtgcagtgttagtctcactttattgtcttagcagcttgacttcctctctctcgccatggactaagctgttctagaggaattgatgtaatctgaaaaacttagtcttaaatagggctgctatcctggtaagccaggattttattgtcattgaataaaatattggagttgcgaaagattattagaattctggatcatagcaggtgggtctttttataatcagttatactgttaaatctcatcgcagcttcccatatgttgcacagattgcaaatgacacaggtcaggcctggaacatctagagcgagcagcttccaagaaactttcatccatttgtatcagagacatttgggcaaaatttcaatttctattccagcttaccttgggtacttcagtgaagtacagctcccgttagttagtgatctaatttagacacaaatgaaacaagcacttcgctttctttcccctaaatttgtactttttacttattaaagttttaaatggtgaaattttagcttctaggttttgaacaagcaatttataaaattatcatagttcttaagtgaaggaatatgatgtttaaaataccctagtgttttctgtatgaagaagaatttatggtatatggtttcttacactactgaacttcctttggctttttttgttctttttaaacagtttttttttatgacttgcccttttttacttttttattatacagagtactggctgggaggtaggtaatgttttagttagttaaagacactaatagattgatttgatcagatttcttatgccaatgctttgcccacatgtgctagctgtgggcattctgttgctgtctgctgtcaactgaattcattaaccaaagaaactttgttaaaatactgtaagttatgttaagaaatttgttattaagaggttgtaggcagtgcatggaaatccatatgttactaatgatattctttggtaaatgagccactttgtcatcactttcgtttgtttttatcctttgaagcattttctttcatcaacatttacacacaagatttcctttttttaaccatattgtttcacctcattctacagaggtcgatttatgttttattgctcagaggtgtaaatataaaatatttcaactgatctaagatgttatcaattgtaagatataccattattgcacattcctttaagaaagattagaaaaacaaataatctctgtgtattaaactccagcatcccatcagttgaaaaatgaatgccatctacagagatactaaaatatgggcaaaaaaatgtgcatcttggaattgagaaaaagagtatgttaatttgatcttgagtcacttcaccttgagtataagtactactgaggaatgaaattcacttttgtcatttgaattttgttggggggagggaaaaacagattgagagaacttgaaatttaatttgacctcattttctgacaatgtttgataattgtgttcaatgaagactgtgtgcttccttttagggagtaagtataatagttaggctcatgaagttatatataaatcaaatcatacctgaaaaatgccaggaagaattgattaccttttaaaaaaatctttctgaaaagaattctataaaataaaaaattctacagaataattcattttgatgaggtaaagcaaggtattaataagacagtttatttaaagctgagtattaatatttgttaatttttctgctttgcccttcactttgtagtcaggtttatgttgattaaacagtttaggctttctctgtttggttttgcagttgttttgagacccagctagaaaaccttcagaatgaatgttactgttgcattctcttccatttctgaattagttgccaccttttgtttttctttagatgaaaccagtactttcagtctaccttagttgcccagattaaatgtgtatgacttttttaatacccagtatagaatgtctcatttttgtgtcttcagttaaggcttatatagagactttccatggttacctttgagtcataaagttacttaatggatttcctaacacaaaatggaagtaggtgaaaagtaagcatgaaagaagagacattgaacctctgagcagtttattactagtctgcttgatgctaaatcgacccctgaaaggtataattttcactggttatgattaatattttatcatcatgtttattgcatggtaaaagtcacacggactttattttcttgtttatattcttgccactacctttcactggacctttagctttgtagcttctaaaattgttgcacgtttgttttttgcttttcccttgtaaaacttaagtggatgcttgcattttaaaagtatgtttgctaccatttgctgcttatttgttttgaaatttccctaattaaaatgctttctgttttctcttctctcttgcccctggttgctgaccctactccctacttttactattgtctattgtggtaagttcctatcttgtgaatatttttctttttgactctgggaaaacttcagtaatttcatttttttctaaaagctatggtacctagctaatttcctagtattcttaaggaactctcactggattgagatctaataaggatatctgatacactatagaaagggtctttgaattaatagctcccttcttgatctgggcttatatagcactgtatttcatttttcactgtgctccttgatttggtacaaatcatttgagttggcaaagctttttagggctgtgtgtgtgagtttgtgtatgtgtgtgtaaaagataactcttaaaacctggtagcaaatttggtaaaatatttaccatataaaataacaagtcatgaacctttcttaaatcatggtaactgttacttgctctgccaatttcaatatccgaatgactactatttattttctctttcccatttttcttgaaataataggaaattatgtttaaaaatgtcttacttataattgtgggaagttaagaaagaattcatgacattaaaagaagatactgctagaaaaatataggctagattgtaggaaaatgcattttaaaattgtttttggagaaaagaaatattgaatttctatatggagccattttatattttgtgtgcacatattttattttaaaagatacatttatccatttatcagatagtgaacagtttgtattcagaagtagattaatgcaagtttattgtgttcagaataatcattccccaactattgataacatagtcacataacactgtctccgtttttttcttgaaaaaattacaacatatttcaccatctgaggggaaatatcaccaccctagtaggtatatattatagtctccagcaaggcttgagaagatgggcttagcttgtttaagctgaagtctctctactaagtcactaaagaaaagtgaggtattctaacttttgagattcaagcatgcagggtaactatatatcaactcttttcattgtactggatggacatgaagatgagccaatattttggtttttatatgctgagaaatactagccatagttctggtgcagtgtcttctgttgaatttttatatgctctaatccatgctctggagaagggcatgccgacccactccaatattcttgtctggagaattccatggacagaggagcctggcgggctacagtccacggggttgcaaagagtcggacatgactaagcaactaagcacaatccatgcacgccgaggctgcatgagataaatgaactcatccaagggagtaaaagagtagaatgggaaacagcaagttttaataggtgatggggggcaggaggctgaaagaagagtatgaaaaaaaaaaggcaaaaacttttacaacaagtagttaagtatgaaaatgtgacactctataaagaagcaactagacctgtgtaggtataaaacatccatgagtatttatctcaggaaaggcaaagaggtgaagtcagatatgaagaaagtaaggaaaatgtgatgagaagaactctgtgaagaggtactttctgatagttgatgactccctaatatttggtatagacccatgacttagcacctgatgatgtggtactactggctgggttctgccctttatgttatttctgatgagaaaaagatatggacagcaaacatttattagatgatattggacatgattattttttcctggactgggacatataaaggttaagattgaacatctgataagaaatgtgataggatagatcttagaagaatatatctggtaggtttatgaaaatcatcaacctgattttcatactggagtgtgcagaaaggagatgcaaacatgtaataacaatttcagtagagacagtgttgtaatatagaggaagacaaaacttagggaggaaggtacccagtaaatctcaattactcatgggaattctcagaaactctcaaggaaaacatcagagaagtgaaaaatggttcagggatcatacgtatgtcctagaatttgtatatgagtatatagaatacagggattaaatagtgtaattaagagcttggattcaggtgtcaaatatactaggatttaactcttgagtgccactgttggctagcagtgtgaccttgggcagattacttttcctcatttataaaaagaggtgaaaataatgatgtctgagagttgtgataagaattggcataacctatgtaaagtggataaccaatagtacatgtgaagtgaaagtgaaagtcactcaattgtgtccaactgtttgcgaccccatgaactatacagttcatggaattctccaggcctgaatactggagtgggtagccgttcccttctccaggagatcttctcaacccagggattgaacccaggtctcctgcattgcaggcggattctttaccagctgaccagggaagccctagcacatagtaaatacttgaaaaatgttggagattattatttttattgttattatcatcatcattactatatattacttgaattattgttcaagtaattacttgaaatcttatttttttaattacttgaattaaatctataattacttgaaatcttaacccagtttagctgtgaaatctaagaggtgttaggttcccaggtcaaactctatgactaaataaactgataaaagtgtatgttctttaaggggaatagatctaatagaagaggaggagattacccctgtgggaaacactggtctgcctatctgaaaaatcagttaacttgagagaaatgtagtggagaactatgggtgaagaggaaagaagtttaggaagtgatgtcagtgtggaaatatacaatagcccaactgaatgtttgctgctaaataaagacaacaaaactagaagaaacttatttgtcataagagatttcaacaactagaaacatggatagatgagtagatggatttccttgtttgggacgtagtttcattatacacaggatagtggaatcagtaagtactgctgaggaagaataattggagtgtgggaatggtgggaagttaagaaagaattcatgacattaaaagaagatactgctagaaaaatataggctagattgtagcaaaatgtattttttttttaattcagaggaaaaatgggtatcatcctgtggtccaaacctctgaagaggaagtaagataaagtgatatctttcttgaagataaagccatatgagtaaacttctatgaacatgatagagtcaatggttttacattaggaaactctttgtaagttgaaaataaatctacttactctactgcgcacacactcattttcagttctagtaactcctctctgatctgatttcctctgagcttctccctgctgcgtattctgccttaccactctagccactttcctgttcttcaagcacaggagcggggctcctgtcctttgcactggctctttcctctgcctggaatgcacccccccggagagtcacatgaacaactcttccacctccttcacgtctttgttcacatgtcacctcttggtgagacctgccctgaccactctgttttgtttgcagatttatcaccagtttgttgacacatagtaaaccttcaataaatatgtgaatggatgcatggttacctcatatacgttgtttaatgacttttaccttcatttttattcttcttctgttcctgccacccacctcctcctctctaccctccttccttccccttcccctagaatgtgctcccacatccactcagccattcttttaggttgtagaatcctgtctgtgtgtcacctcttttgtgacccggctccaacaggatttgcctttccttactcaggacactttttattagagcttatgaccttttgtattgtaattatttgattacatttttttactctcttgaggagccaagtcttacttatttttattttcctattcccgaggatgagtttgagtaaactccaggagttggtgttggacagggaggcctggcatgctgcagtccgtggggtcgcaatgagtcggacatgactgagcgactgaactgaactgaggatgaacagtggctaacacatgcaaagcactcaatatttttttttccttgaactgaatgtcagtatgagaaagtgaataaaaagagtttaaaatggctgctcaggaactagttcagttttaagctgcattaattgaatttaagtccacatcctgggaggcagtgagcccactgatctctacactgatcagatcagtgtatgttgtgtctgtttctgggataccacactttacaaggtgccatcaaaagactaataataaagtgaagatagcgtagtatgaatcatcatatgaagatgattgaggactggaaagtttaagggaaacaagttctaatagcagttttcaaatatttaaaaggacataatactgaagatttggaatagaaatcttaaactggaaagctctgagaggagtacagccaggataacaatattttaatatttgtgcttccaaaaagtaaataaatatattcatgtatggtattttttggaaaaaaacaatcacaaattgttaattttctcaaatgccttttttattttccaggcagtggggccttcatttcttgattatattaaatattgctccattggcttgttgatggttttaatcagaattttgattgaatatatttaacctatctagagaaatttcatttgctacagatgtcagttaattttgtctgttaaagtttgaaataattgaaacaaaattttttttattagaaacctcctttaactctagagacatttttctttaaaactatatttcttctggacaaattgtggaaatatttttagtcaactgtatggttttttttttgtttttattatcagaaggctggtaaattaaagatcataattttccattttgctttattatctgtttcatttgtaacttattttgcataccgctttgcctttgcagtaagaagtaaataaaggaaaaataagtatgaaacttactaggcttaaagagaattgaggtatataaacagtcgtgtatggctgtgtaaaaggcactaccacaaaatcctttgaaacatctttgtatctaacatgtaagaataacacaaaaggcttccaagtattttatctttatcaagagaatttgttttcaaatcttctgtgtaagagttaaggtgaccttggcatactttgtacttgggatgaatgtgtgtggttaatgtatgcagtgggtggtttgggtactttagaaaaaccaactcttctcaaattttttttcttctttcatttatgcatttttttccttcctaattccatttctagttactcttacacataacagtattttttattagcagagggttactaattgtaaatgttttgcttcagtgcttcaggatggtcttgacatttactgatcatccactctgtgccagatgctacacttggcttctaacttttatgatctcatttaaaatatgaaaagagatatgatataaaggctaataatggtaactaaatatgttagtgttgtttttaaatttaactttatgctctaattttaggataattaaaacacagtttattttataccaagcaacttttcttgcaataaagaaaataagttaatttatctcaattgtatggaattagaaaaacatagacttatatgggatgtcacttggtacagtccctgaaaaacatattccatatgtaattcggtaaaagccctaattgcacaatgttatttgttagaaataatgaagaaaagattattttgtttttactttcatttgagaaataataaaatattgtagttttgaattaaaacttttgacattgttttgagaattttatactcgtagcaatctaagcagaacgtgtacgacaaaaagtctttgtattaaagtttctctgttttcctacacctaggatggtaagcggatgtttggcacctattttcgtgttggtttttatggaactaagtttggggatttggatgaacaagaatttgtttacaaggaacctgcaataaccaaactcgcagagatatctcacagattggaggtgaatactgtggtggttcaaaatgtcatccttaatttgtattttctatgatgaatagacattttagatccagatctaatcctttaataagccagatcctgccaaataatctactcctttagggtataaggattttggataggtacaataatattctcttgaatttttaaaatctttgatagcaacagtaaaatattattattaacttgattcttttgagggtctattttcacatgtattttagaaaccctgtatctttcagaattaccgtgatttgtagagaaatgtatatagtattatccatattttgtagaaaaagttataaggaattaataatcatggaattagaactagaaccccaagatacttctgacccaagtgcattctctttttggcttaactgattcccagtgaagtaatctttagaacttaaaagcttgaaattatgctttaaaaacacttcttagaatcctttaacctttatacagctacttaattttcaaaataaatgataactttaatgtttatgaaactaccctgtcttttctgctatagttgttctttccagtcttcctctgtccttgttactccaagtgtggtccatggacagaatctgcattgacatgacctgggagttttgtttgaaacgcagactctcagactccacttcagaccttccaagttcaaatccgtattttaacaaatccccaggtgatttgtctagacagaagagtttaggctggtttttattctcagctgatgttaatttcttcagcattctgttcttattggtgacttcacagggctcaacttccacaaactggttttagttgtgacttcttgttttttcaaaagcctattaagtctcgggaaattttgagacagcatttttcaaacttactgagtcataaaagttatctttgaggtaggagtgtctgttcttctttgaggattcagacttaatttttccttttgaatagctccatgttttgcccatctgccactcagggtcatatggaaaagtcactacattcttgacccagggttaccttttcaaaatctgaacttatacagagcttcaacaagttaatgtttttatttggaaattctggaacattacattaatcattcagaaaaatgaatgcttgctcattgactcatgtctgtaagaagtcaggttacatcaaactctgaagttgctcagtcgtgtccgactctttgcgaccccatggactgtagcctatcaggctcctcagttcatggaattttccaggcaagagtactggggtgggttgccatttccttctccacgggatcttcccgaccccgggatcgaatccaggtctcccacattgcgggcagacactttaccgtctgagccaccagggaagtccaatatcctatacacatcaaatataatgaatttcttttgtctcttctttctgttccctttttgattttcttgaggatctcttgtggaatcctgtattttcattggtgaaaattattttttttaaattttgtgttatttaaagtgagtaaatgggaataatatcaaataaatatggagtgagaccctgttaatttgatagactaagtataaattctataaatgtaaataattattattttgtaatcattgacaccattttataagaacttactaaatgtcttcattttgttaaggagtttccctcagaggccttctgttttctactactgttaacttcatgtaaaagatttctttttctttattttagggattttatggagaaagatttggagaggatgtagttgaagtcatcaaagattctaatcctgtggacaagtgtaaattagatcctaacaaggtatgattgatagactgatgccccatagatacatctttgagactctgattttgttggaggaagactaaataataatttaacagtgaataaatgaaggactttttcatttctcaggcctatattcagattacctacgtggaaccatactttgacacatatgagatgaaggacagaatcacatattttgacaaaaattataatcttcgtcgtttcatgtactgtacacccttcactttagatggtcgtgcccatggggaacttcatgaacaattcaaacggaagaccattctgactacttctcatgcctttccttacattaagacaagagtcaatgtcactcacaaagaggaggtaagactccaaagagggaaacagaattagtggaacaaaaacactgaagccctgcaagaacaacgtggacatagcattgtgtatggtgacatactagaacttcttgacccatttttaagtcattaactttcagcttcttttctgagtctctcattcaccctagcttatgctttaaaaggttgattttttttttcctttaatgatccaaagtttcaggatatattattagataatactttatagttgccacttttttcttattttaattgattgtgtattcagttcagttcagtggctcagttgtgtccgactctttgcgatcccatgaatcgcagcacgccaggcctccctgtccatcaccatctcccggagttcactcagactcacatccatcaagtccgtgatgccatccagccatctcatcctgggtcatccccttcgcctcctgcccccaatccctcccagcatcaaagtcttttccaatgagtcaactcttcacatgaggtggccaaagtactggagcttcagctttagcatcattccctccaaagaaaacccagggctgatctccttcagaatggactggttggatctccttgcagtccaagggaccctcaagagtcttctccaacaccacagttcaaaagcatcaattcttcggcactcagccttcttcacagtccaactctcacatccatacatgaccagaggaaaaaccatagccttgactagacagaccttagttggcaaagtaatgtctctggttttgaatatactatctaggttggtcataacttttcttccaaggagtaagcgtcttttaatttcatggctgcagtcaccatctgcagtgattttggagccccaaaaaataaagtctgacactgtttctactgtttccccatctatttcccatgaagtgatgggaccagatgccatgatcttcgttttctgaatgttgagctttaagccaactttttcactctcctctttcactttcatcaagaggctttttagcttctcttcactttctgccataagggtggtgtcatctgcatatctgaggtgattgatatttctcctggcaatcttgattccagcttgtgtttcttccagcccagcgtttctcatggtgtactctgcatagaagttaaataaccagggtgacaatatacagccttgacgtactccttttcctatttggaaccagtctgttattccatgtccagttctaactgttgcttcctgacctgattagatttctcaagaggcaggttaggtggtctggcattcccatctctttcagaattttccacagtttactgtgatccacacagtcaaaggctttggcataaagcttactaaatatttttcaatcaatccactggcctaattagatgttatttcacccagatcatcttaacaccaattgaagttgctattgaagacatgcagaaaaaaactcaggagttggcatttgcaacacatcaagatccagcagaccccaaaatgcttcagatggttctccaggggtctgtaggcacaacagtgaatcaggtgggagtgtttgccaatactgtgtgattttagttataaatggaatttggaatgattacagtattatatttttcagaaatcacaaatgtgttacatcaagtgaaaatatgttagaagtagttgcacagacactgaaaatataagaggttaaactaaaataaagattttaaggcctttacctcctaaaagtatatgtgatttggagtttttacttccaaatgatataacttactcacaaaagattacctttaattccaaatatcctgctaatattctgaatgcttgggggaaactgttttcacaaaataaagtatctaataatcagtggactgacagctgattgtccgtagcctgataactgttatatctaaggtaaagaatataaaaaatacaaggcaaaaggcattaacaaatacaatagttagtgctttgtctcctcattttctttgaaatatgaaataataagttaattgctgtgggcaaaagtatagatttggcatcagggaaaactataaacatattgtcagaattggtctctgaaaagttttaatataggcatagtcatatatatattaagcttaaatgcagcccatcttggtgctaggaaaaatggatttggtaaattctatttctgtgaatatttaaaaaacaaaaacgtactttttgttttattttcttattttacaggggcctttggaagttgcccaggttttcctatctgaaatacctagtgacccaaagctcttcagacatcataataaactgcgactttgcttcaaagattttactaaaaggtattcaaagttttctacataaagatactcaaattgagaacatctgatccacagtttgatatgagtcttaagggattattgaaaggagaaactatagaaaaatggttcacaatgagacgtagtctgaggataacttactactccatatgtattttatatatatatatatatatatatatatatatatatatatacacacacacacacatatatatccctgccccccaattctctatgtaataccatgttttaaattttgaaaatgagagaaacctcgattcaggaaatctttaacttgaaactattattagtttgacatttaactagttaactttgaaagctgttatttatttttaacatttcaatgtgagagtttctgtctctcttccctcagaaaacatacaagcagcaatcttggaagcaaaaaatttttcttcagatcttacccttatatgtctcttttccaagccacttaatctttatgatcctctgtttttaatgtatgaaataaggatataatatctacctcacacagggagattgtgcaaattagatgaaataatacttggatgaattggggcctctcaaaacacccccagatgggatgatttgctaggagggctcagtggacagcatgtagtcatatacttggctatggtttgttaacaatgaaagagtagaaagtaaaattagcaaagggaaggggcacggggtgaagtctggaggaaaccaggtataggcttccatgggtcctttccgaggttggtcacatagagatgctgattgttcagcaaagaattgtggcagcctgtgggaaatcatgtccgcccaggagctcagtagagactcaggtgccaaccaggctttttgttgagggctagtccaaaatcactgcagatggtgattgcagccatgaaattaaaagatgcttattccttggaaggaaagttatgaccaacctagatagcatattcaaaagcagagacattaatttgccaacaaaggtctgtctagtcaaggctatggtttttccagtggtcatgtatggatgtgagagttggactgtgaagaaagctgagcaccgaagaattgatgcttttgaactgtggtgttggagaagactcttgagagtcccttgccctgcaaggagatccaaccagtccatcctaaaggaaatcagtcctgggtgttcattggaaggactgatgttgaagctgaaactccagtgaggctttggccacctcatgtgaagagttgactcactggaaaagaccatgatgctgggagggattgggggcaggaggagaaggggacgacagaggatgagatggctggatggcatcaccgactcaatagacatgagtttgggtaaactccaggagttggtgatggacagggaagcctggcgtgctgcgattcatggggtcgcaaagagtcagacacgactgagtgactgagcgactgaactgaactgaactgagtcatgtaggtaccttctccctgacagttaccaaaataccagactcccaaaaggaaagctggtatttaacagaaactatagtgtttttataaaatgttcaggcacagtgagtcactctttctgcatatggtaggaacccttcccaaattcagattcccagactgtaacccagggccaaccttacaaacaggccttcttaggatagcaacctcaggcttgccgttacctcttttctttacaaataacatttggtacataataaataggtcttcagtaactgcaaaattttgaaacaataggggaaaagaatcaacagcttgatactgattgctgcttcactcacactatgagcacaaaagagggaatgatcgttttacatggtgatgtcagggaatatttcacataggaattaacatcataaacaaaagtacagagtacaaagtattaaatgggttgctgttgtatctaactcttcgcgaccccaaggactgtagcctgatgggctcctctatccatgcaattctccaggcaagaatactggagtggattgccatgcccttctcctaacatcatatatggaccttgaaaattagagataccaaggaagcatttaatgcagagatgggcagagtaaaggacagaaacagtatggacctaacagaagcagaaatattaagaagaggtggcaagaatgcacagaacaatacaaaaaaagatctcaatgactgggataaccacaatggtgtgatcactcacctagaaccagacatcttggagtgtgaagtcaagtgggtcttaggaagcatcactatgaacaaagctagtggaggtgatggaattccacttgagctattttgaatcctaagatgacactgtgaaagtgctgcactcaatatgccagcaaatttggaaaattcagagtgcccacagaactgggaaaggtcagttttcattccagtctcacagaagggcaatgccaaaaaatgttcaaactaccataccattgtctttttttcgcatggtggtaaggtaatgctcaaaatcctccaagctaggcttcaacagtacatgaaccaagaacttccagatgttcaagctggatttagaaaaggcagagaaaccagagatcaaattgccaacatccgttggatcatagaaaaagcaagagattccagaaaaacatctacttctgcttcatttactacactgaagcctttgactgtgaggatcacaaactgtagaaaattcttaaagagatgggaatactagactgccttacctgcctcctaagaaacctgtatgcaggtcaagacaacagttagaactgaacatggaacaacaggctggttccaaattgggaaaggagtatgtaaaggctgtgtattgtcaccattcttatttaacttttatgcagagttcagttcagttcagtcgctcagtcatgtcagactctctgcgaccccatgaaccgcagcacgccaggcctccctgtccatcaccaactcccagagttcactcagactcacgtccatcgagtcagtgatgccatccagccatcttatcctcggttgtccccttctcctcctgcccccaatccctcccagcatcagttttttccaatgagtcaactcttcgcatgaggtggccaaagtattggagtttcacctttagcatcattccttccaaagaaatcccagggctgatctccttcagaatggactggttggatctccttgcagtccaagggactctcaagagtcttctccaacaccacagttcaaaagcattaattcttcagtgctcagccttcttcacagtccaactctcacatccatacatgaccacaggaaaaaccatagccttgactagacggaccttagccggcaaagtaatgtctctgcttttgaatatgctgtctcggttggtcatgctgggctggatgaatcacagtctggaatcaagattgctgagagaaatatcaataacctcagatatgcagatgacaccactcttatggcaggaagtgaagaggaactaaagagcctcttgatgacagtgaaagaggagagtgaaaaagctgacttaaaactcaacattcaaaacacaaagatcatggtatccattcccatcacttcatggcaaatgggtgggaaaacaatgaaaatactgacatacttgattttcttgggctccaaaatcactgtggatgatgactgcagccatgaaattaaaagatgcttgctccttagaagaatatgaccaacctagacagcctattaaaaagcagagacattactttgccaacaaatgtccatatagtcaaagctgtggtttttccagtagtcatgtatggatgtgggagttggaccataaagaaggctgagtgccaaaaaattgatgcctttgaatggtggtattggggaagactctggagagtcccttagactgcaaggagatcaaaccagtccaccctaaaggacatcaacccggattattcattggaaggactgatgctgaagattgcatagtttgaccacttaatgcaaagaaccaactcattggaaaagaccctgatgctgggaaggatagaaggcaggaggagatgggggcggcagaggatgagatggttggatggcatcaccaactcaatggacatgagtttgagcaagctccgggagatggtgaaggagagggaagcctggcgtgctgcagtccatggggtcgcaaagagtcagacacaactgagcaactgaacagcaaaaacaatggaccttgaaaaatgaatattagtttttcagtcagaaaagaggggagggatatactaaaaacaaaaaactcagcatgagcaaagtttagaatctgttctgagaaagatgaatagtgaagctggaactgtagtctctgaagacaagtagtcaaacattggtggaaatagactaagtaccattaagtagatgactttttaactaacaaagcagcatcagaactataggcagaagccagtctttcacttcctattctggtttctcttatcatattatgaactgtggtttctcttatcaaatcattcactgaaagggtttatttgggtagcagtaatttcatattacagcacctttgtcatcaggaaagtatgaggaatgctaacttgttcaagtctctcaagacagtattttattctcactgcaatagctgtcattaattgttatcagtttctcctgcatgaacatggtaaacatctttttaaaaacttcagatagcttcactggaagtctggggttttatgatctgattattgaggtagatgactttatgggtttggttatagaaaacatggttcctaatgtatgttgaagatgaacgaccagagtaaagaacacaagcttcttcttgactgacttctgttgtgattgacatatacacactcttatatataaaatatctttccttgtagcttagtcggtaaagaatctgcctgcagtgcaggagacctgagttcgatccctgtgtcgggaagatcccctggagaaggaaatggcaacccactccagtattcttgcctggagaatcccatggacagaggagcctggcaggctacaggccatggggtcgcaagagtcagacacaacttagtgactaaactaccaccaccaccaaggacctaatgtatagcacagaagctactcagtactctgtaatgacctatatgggaagagaatctaaaagagtgggtatatgtatatttacaactgattcactttgctgtacacctgaaactaacacaacattgtaaatcaagtatactctgacaaaaatttttaaaacattgattttattatttgggatgtttcaaatacgaaccaaaaaaaccctactgtgattgtgagctggatgatcttggaacaatacatacttctttaggtcatagacactaataatgcttattttctttttatttttggggggattttttactgttactacaattctaaaacagatgtcctcttctttgtgtttatttacgataaggtaatgaattcctatagtttgcaggtctccttaagggttaatgtaaagaaggttttctcttttaaattacaaaaaggcagaaagccaaactacatggtttaaacctttcaagtcatagtgaatacttttttttatttttgtgtgtatatattttgtgttaatatgcgtatttgttctaccacagctgttatatatataatcttaaattcttattttttcaattaagcttaaaactattattctaatagttgtattattaaatatctgaatttaagttgaatttaagtgtggtatagtaatgaagtgtattttttttcttttgccaaattaaagtattaagctcaagattactgagccaaagtacaatgagcatttttgttggctcctaatatgtaatctgttccaaaaagtctaagtagtaacaatgccaagaatgcaaatgtactactagttgcagtacaccttactttatgtaatgctatttaaatacggtgtctcttgttaatcaatttaaatggtacttcagtttgcattattttattcctaaaaacaataaacatttttttttttgtatttactctttacatactcttaggtatataaaccctagaaatatctcttgtacatccagaagtagttaaagaaatagttgaatagtattctttatagctaaaaaacgacaacaaaacacaaaaccaggagacaaccaagatatccatcaacagaggagtaaataaatcatggcatatccataggttcaacttcaaccagataataccacatctttttccaaagtgcataagccagatttaaattctcaccagtaatgtttgggagagttcctattgcagtgtcacctccccagtatttgatattatctgacaacctaatttttgccaatctagtgggtatgaaatagtatgtaattatagtttaaatttgcttttccttgattaccagccaggttgaacatcttgtcatgtgtttattagctatttctctttcctctctgtaacgttcaaagttctgtttcttatttgccattttcctattgaattcttttccttactgatttctaagggtgtttacatactggaaaagtaatcctttatcatttgtatcacagacatcttttctgaacttggggcttagcactttttaataaacagaagttgttaaatttaatatagcaaaataattcagtctttcttgttaggaccgttgctttttgtgtcttaagaaattttttacccaaggtcagagtatgttgacttcctaaacatctatatagtaatatctctcaaattgagtatagcccaaacaaaaggggaagatggcaaaaaaggcctttttacttttaaaaacaattctttccattgatttttgtatatggttcaaggtgggggtcagtttgatttttgcccatactgataactgaatatgacgtgagatagcagtcagatttctgttcccatatggttgtgcagttgacctggcaccacttatttcaaagattaccctttctccactgctttgcactgttaatacatcaagtgctcactttgtgtgcatcagtttctaggatttttttcttccattgttttatttatctctctttgactaatatgctgtcttaattactgcagctttataataaacttttatgtatgataggccaattcctctcacattttgttcaaggaaagagaattaactcttccggtctatgaatatggtacatttctccatttacttatatcctctaaatgtttttctaaaatttttctgtagagactttatcttttcacttattctttggtgtttgatatttttatacttttgttaatggtatttttaaaaattacattttgggggacttccctggaggcccagtagtaaagaatctgccttgcaaagcaggggcatgggtttgatccctggtctgggaaaattccagttgctgccgggcaacctagcccatgtgccacaattaagacccaacacagccaaataaatattaaaaaaaaaaaaattattttctatttgctggtttacagaaatacaatttatttttacatgctttacatgagtattgccaaattcacttgttaattctaataatttatatgtagaacctttttcttactgtactgtttagaatctctaataaactatgctgaataggaataatgatagagggcatcattttcttatttctgatctaaaagaaattttttcatcattgagtataatattttcttcatgtattttgtagatatttttaattaggtgaaataagttcccaccagtttgtagttatgctacaagtttgtcatgacaatattttaaaatttaatcaagtgagttgtgtgtagggagtaggaatgtaatatagtgttaggacagtttattattattttgtttgggagttttgcaactgttttcatggatgggattgaattacaagttgtttcttatagcccccattaagttttgatatcccaaccttgaaaagtgagtttgaaactcttctcaggaatagttctttattcctcctatactctagaatagtttttttatatattcagaattgtcgtgctacaatgggattatctatccttagactgttaagtagaatttgcctgtttgtgttttctctgtgggtaaatttgtgatttgactgatttgatgtatttaatggtttttggattattcatatttttacttgagtgttttggtaaatctaatttcagatttatttacattaatttcagatttatttacattaaattgtacctaatatcctctgtgcctttataaacttctgctatatttgatgtctcattttgcatttctagaagaggatacctggccttctctcgtttattcttgccagagtttagtctattttattagatttttcaaacaaccaacttctgcaattttttaaatacagagttatcatactttaaaattttattttcttccttaggagtttattcttttcaaattgctggttagctcttcagttttagccttctttccttagtataagcatttaaggctatacattttcctctaagtatcactttagctgcattctgcaaacattgatacatatacttttttaaacatactttttccatttatctgttggagtccagatagtttttcttaaatatctgaattgaataagcaatctcaatctattcaatttttgtttgttttattaagtcatggcctactcttttgtgaccccatggactatatagcatgcctggctcctgtgtaccttggatttcccagtcaagaatattgtagtgagttgccatttccttctccagggaatcttcccgacccaggtgttgaactcacatctcctgcattggcaggcggattctttaccactgaaccaccaaggaagtccatctattaatttaagaaacttctgtttgaatacaggcaaaccactctgccagatgccattgaataaatgagtatggttatataccgtaaagaacttatagtctagtggtgatatgtgtgtgtggggggaagggggtgtcagatttaatattaaaaaatacataattttcaattgtgaaaattggaagtggaagttagattttaaagaaactctgttgagcctcgcttccctaccttaaacctaattgcaggagaggatgtttaacatacaacagaaaaactgaatgccctcatcatggtggctacatatatatatatatatatatatacatatatatacatatatatatcagtaagccttcgaaactatgtcaaaagaaatcttttgatgacccactgttttccctaggtgtgaagatgccttaaggaaaaataagagcttaattgggccagatcaaaaggagtatcaaagggaactggagagaaattatcatcgccttaaagaggccctacagcctctgataaaccgaaagatccctcagttatacaaggcagtattacctgttacctgccacaggtatgcattttttttctattattttgtatctttagaaaaatgaaatccacttgaattatttaatactgaatttgtttaccttgtattaaatggcttcatatatgatgtcttctgaaacctaacaagttcaacttttgcaagccttctaccagctatacctgaagcagcctaccagatagaaagtctgataaagagaataataaagtcaagttctcatactaaccaggacaccacacataagttttatctcctaaaactgtttcttttaatgtcctgtcaaagtttctggtatttctgttgagagaatttgctagaatatactgaagccaggtattcatttccattatccctgacagtaaatagtatatgtctttctagatttggatcaaaacagctaactgcactgagtatcaagaaagcatcactattttcctttattttctcagtgtgacaaaattagaagtggaaataacttggaattttctacaactgatcctaatctgagtagataattttagactcctcctctgtaaaataatacttgccttgaagaggttgttgtggaaattaaatggcatgtaaagttccaaagacagctcttaatatttttacttttaacccctgaattctggacagggcatgataactgctaaaagtaaactgcattctttgcatttttaaatcaaaatgtacatacatctcttgaattattgtggcaccaatattttaccacctcctttttaaaaaattataagtgaagctgtttaattatatttacttgatcaaatatttagaaggcatttgaagttgcttatattaacaagcatgtatactattgatacataagaaaattaagctggctatttgattatctggtaatattacctgttcttcagtgataggatgtttgtatacttctaagcctctgaaaatgtataccaaatgcatgtggtatgtcatgtcccctgcagggaacatgtagacagaccatgtacaggaacaggagaccaaaaggcctgttttagaaaattccatggatggaggagcctggtgggctacagtccatggagtcgcagagtcggacatgactgagcgacttcactttactttattcttacaatgatgcaagacaccccaggtggtttcctcttgaaacttgttgagaagcaacactagtcccctcacttttggcttcctctgtcgtctttttggaatgtctgactacttcttgcctctatctaccttcaccagtcttatattcattggtcaaaggtcctgggttagagtgctgggtccctgaaatagtgaggtgtcctaatgctagtctctcttccatcaaatttctcaaactccttttagtggaaagactgtattgtttctgtctgaaggaagcttcccttataccagtatcctgaattgtgccttcttctatgatggttattcctccaagctttagtttttagtatttgcaggcagttttttggattttagaaaatactttttcttgataaactatcttccaagactgctattttctcaaaaaaaaaacaaaacaaaaaaacccccaccaaaaccaagtttagagattcaaagctgaatacaatctctttgtatctgtcctctcctttcctagagattgtaaatcttaagacattaacattaatgtcaggaaagataagcaaaattatcttctaaatttactttaaaaattttttttaattattttcaaatatttaaatttaaaaattatttaaaaagtaattttctaaatttaaaaattattttaaaaataattttctaaatgtaaactcttctaaaatttattgtaaattttaatagagaatcctatttatagtaatgtataatggtttctttcaagaaataatttaaaataatcttagttttaatttctattattataaatatcaataaataatccacataaacaaaagcttccttggggtcctcaattttaagagtgtataaaggacctaaatgcccaaaacttgagaaccactgatttaaggcttagagtttactattttaaataaaatacctgtgttttgccttttaacctcaagtaaatctcctgaaatctctcccattaccccttagtacctgtttaatcagatatctaatacatttattggacaaatgaataaatgatcaatggtcctggacagtgtcacttcaaatctatcgagaagtctacaagttagaatacatagagcaatagtgtgtgggatgagcatgtaactagaaagtgaagagctttgcttgcaaaagttttaaagttaataagcttttgctggcaaaactttgagatatctggccgaaagcatgtgaacattttagacgattatataaaaatggtttactcatattctttcattttctctccagagattccttcagtcgaatgagtctgcgcaaaatggatctctaatttaaatgcacttgttttattcatttgaaaaaagccatgtattcaacactgaatgtgaaaagaatttaagagctattgaaaaagacttgggacttaattctggaaattatagcattaatttactcatggaagaatgcagtggccaaaataatatcaaatggcaattgttgaagtttgagaatcatggctgtggtttctaatgttccggtaatatgctgtccttttttaaaaagacattttaatgactcaaaggtacacttacatttaccattatttataccatagctaacgttaaatttatttactttaagtttgtattttttaatttatattaccatttatagatttgtttggaaccattttaaatgtagtaatgcttattttaaaggtactattaaatatgtgaacgtttacactaattaaaagacttaaaaatttttttattgataaaagcagagagtgagttagagttgattaaagaaatagttgcaaaaatagca

SEQ ID NO: 61 - DNA, 54178 bp, Hippotragus equinus
  source 1..54178: mol_type = genomic DNA
tgcacacacaccacccacccactcccagctctctacacctggaaaaggacagtcaaaaggagaatgcaatgcaaatataggagatttcctatttccatgaagttttcagccggttccccagcatctactgtaccggaaagcgagagccatttagggcatagtactagcctcagtcttgtttccttcctttcctttgctattaaaatcttttgctctgatttcaataaggcactcccctttgtgcaggagtccaggttctgcagaagctgtctcactctagagacacttttgtaggaaggaggaacatgtttaaaccagggagagcgtgagaactctgggtgagactggggcagagctataccgggtgtgtgtgctggggggtggggtggggagtagcctccacagtcttgaggtttcggagttcggccctggcgcagactacaagtcccagaagccctcgcagtgacccggtgcgccgccgaaccttcccctcactcttccagacagttgagataaaggttccgttcagggctcgctgcgggttggtttgttttgaacggcggtgacggaggctgggagcccggccgactgcaggcgggggcgtcaggaggcggattcctgccgtcttaagcacgggggcgcgggaggaggggagccgggcctgaggaccggggaccgagcggcggagacagaacaggctgaggcgatggagggcgacggggtgccgtggggcagcgagccggagtcgggtcccggcccgggaggcggcggagtgatccgcgagctgtgccggggctttggtcgctaccgccgctacctggggcggctgcggcagaacctgcgcgacacgcagaagttcttccgcgacctcaggggctcgcagccccgcggctgtccctcctcccctgtggagggcggcgaggccgggcgcggccctgccggcgacgtcgccgcgaccgggctgccggcgggtaaggagggcaagcggtgacggagacggggccggagaggcgagcccggggggcgggccgcgccccggccccagagaaacaggcccggggaggggcggaaagtgggaggagggcggcatggccgggccggggccctgcagaccggctccctgaggtgccgggggagggcgtctcgggtgggggagggggcgccggggaccggccggcggggccgcgggcgaggggcgcccgaggcgggggtttcaggagccggctcggagggaccggcggcgggggcgggagccggggcccccgtttggaggctgcagaggtggcgcctaggaaagttactctaagttcggaggtgagcagttgtgcttagagtcccagttcagggatggtggagtcggggggtgggtgcaggatgggcggtaggcagggaccctcaggaggccaggggactgtagtggaggttgtgtgtgtccgctgtgtgtgcgtgcgtgcatgcttgattttgtgtgtgaaatatacatcaatcatgaggcaactctgaagaagtaaggaatataactaaatagggctggaatcgctaaaggaaagggtatcttatgtctgccacggtatttccagagatggcggcttgcgcttatggtaaagttagacaggggaagaatctctctctctccttgttttttttgtcttgaaacttgacttgattctctctggcatgtgttagagaccttaaagcacttaaaatcgtgcagcgtctttgatcttgcctagtttcttgcttcctcttaaactgctgttggtgggaacaggagggtttgttaaccacttggtctaattaggaaataacaggttggatgggagaaaggacaggcgtcccatgtagataccttgggataacacagcaaagagtcagggggtttcattcagtgattctccaacgaaaatgtgtcctaaaactaaagtataaaacatctatcccacagattgattgaataggtctagtgggtgggtcctaagaatctaaatgcaagccatcccaaagggatcctggtgcaggtgggccacaaacactttcagaaacactgacttagaggctgacagcaaatttgagcatcaggtgtagaatgtgttgaattgttaaactcttcagagtttctgtgtcaggccctgcgtttccagagttgcacgtttaacgtcctaaatttgtctgagactccaaaaatggtgataaaaataagattctgattaatggtatttcacttaattggcctcagttcggttcagtcgctcagtcgtgtcagactctttgcgaccccatgaattgcagcatgccaggcctccctgtccatcaccaacccccggagttcactcagactcatgtccaatcgagtcagtgatgccatccagccatcttgtcctctgttgtccccttctcctcctgcccccaaatccctcccagcatcagagtcttttccagtgagtcaactcttcgcatgaggtggccagagtactggagtttcagctttagcatcgttccttccaaagaaatcccagggctgatctccttcagaatggactgagggactctcaagagtcttctccagcaccacagttcaaatgcatcaattcttcggcactcagccttcttcacagtccaactctcacatccatacatgaccacaggaaaaaccatagccttcactagacggaccttagtcggcaaagtaatgtctctgcttttgaatatgctatctaggttggcctggatgtaaataaaaacttatatttatctgataggatacgtgggaggagagggatgactagcttttctgaagttgtggttttgacatctgcccagagatttgctgttgtaaaatggacccatggaggggattgatttctgtgaagcgatttaaaaactggtttgtgtgagaaggggggatgttttcagagatgagccccagaatgtgtactttcaccctcttcctcagcagtgctttccagcagctttccctgctcagtttttcttttatcttaaaaaaccctgtgttagctgtaattttacagcaactgtttattgtagaattactattgaaaaaaaagagtagattcacctgagagagatggaggtttttgaggcacattggttggctcctgtttttattctttaaaggccaacttaagaaatgcaaatgcacctttgtattttgcctcattggcttttctagttgactgcgtcaagaactcatctttgcgcatttaactctttacaccctctggaatctgttcatccaaagtaaagagtaggggcgggtacagatgacaggactgggagccttttggttttgttccataaagtgcttccattagttcagagtggagagttttatctttggaggtgaaaaggagaaattagacaagtggcacctactatgtatattttgggggatctaattttcccagctgttaaaatgattgtgttagaaagtagaaacgcctccttaaaggacagctagttcttgttctctccctttacagaccatctctttacaaggtcaagttcgttcaaagattcttaactttcttcggtgaatattggtttctgattaataggaacttgaaatgtcaaggaaaggaacactccttgcttaacctcatataccttctgaaggttttaatcattgtttctgaatggaagtgtcttcttggttggaatatagtatggcatttgagcaattgaagatcagagactaactaaattttcattatttcacttttaaccacaaaagagatggggagaaccccccaaataatgcttccttcttaattttgacagtttttaattcactggggcagtgtaaagagtatataatgtatatgtacttgatgttttagaagttaaaaagcaggtggaataaaactctgaaatcagagttgcttagcctgtacaggaaaaactgaattataaattgctttgattcagttcctccttaaaaaaaaaaaaagctttttttaaaatttatttttgactgcactgggtcttcattgtgatgcccggacttctcgttgtggcggcttcttatgttgtggcgcactggctctagggcactcagacgtcagtggttgcagcacatgggctcagttgtggtgcacgggcttagttgtcccatggcatgtggagtcttccacaccaggaatcgaaccctagcattggcaggtggattcttaaccactggaccaacaggtagtcccagctcctcttttcttcccaaatcattggccgccttttcacttaactgtgggggctgaaagcctgtctgttgatttacctctgtcacagggggttcagaggtagtgaaataaaggctttgagcacttctgaaggtaggcagagtggagtattacaaagtagtagagggagaagtatttttcttattttctggtccagtagagttccaagctgttgcagtgtatcataaacctctggattttaagaagttgcaatgactcaaatatatatttagttggaatgttctggtctgtgctatatcctttcctcctggttctggtccttactgagtgaccttactgtgatttgccagtttcctcatctgaacatggggattgtagtaatagtagttgcctctggggttgttgggagttaatatatgtgcttagaacagtgcctggtaaggtgctctgtaagtattagctattaaagatgggcataataagggagagaaatggtatgaacctaacagaagcagaagatactaagaagaggtggcaaggatacacagaactattcaaaaaagatcttcatgacccagataaccatgatggtgtgatcactcacctagagccagacatcctggagtgcaaagtcaaatgggccttaggaagcatcactacgaacaaagctagtggaagtgatagaattccagttgagctgtttcaaatccttaaagatgatgctgtgaaagtgcttcactcaatatgccagcaaatttggaaaactcagcagtggccacaggactggaaaaggtcagttttcattccaatcccaaagaaaggcagtgccaaagaatgttcaaaccaccgcacaattatactcatctcacacactagcaaagtaatgcttaaaatcctccaagccaggcttcaacagtatgtaaactgtgaacttccagatgtttaagctggatttagaaaaggcagaggaaccagagatcaaattgccaatattctttggatcatagaaaaagcaaaagagttccagaaaaatatctgctttattggttacgccaaaaccttcaactctgcagttcacaacaaactgtggaaaattgttaaagagaggggtatacctgcctcctaagaaatctatatgcaggtcaagaagcaacagttagaactggacatgaaacaccagactagttccaaattgggaaataagtatgtccaggctgtatattgttcccctgcttatttaacttgtatgcagagtacatcatgagaaacactgggctggaggaagcacaagctggaatcaagattgccgggagaaatattaataacctcagatacgcagatgacaccacccttatggcagaaagtgaagagaaactcaaaagcctcttgatgaaagtgaaagaggagagtgaaaaaactggcctaaaactcaacattcagaaaactaagatcatggcatccggtcccatcactccatggaaaatagatggggaaacaatagaaacagtgacagactttattttcttgtgctccaaaatcactgcagatggtgactgcagccaggaaattaaaagacacttgctccttggaagaaaagcaatgaccaacctagagagcatattcaaaagcagagacattactttgccaacaaaggtccatctagtcaaagctatggtttttccggtagtaatgtacagacgtgaaagttggaccataaaggcttagcaccaaagaattgatgcttttgaattatggtgctggagaagactcttgagagtcccttggactgcaaggagatccaaccagtcagtcctaaaggaaatcaggcctgactgttcattgaaaggactgatgctgaagctgaaactccagtactttggccacctgatacgaagaactgactcattggaaaagaccctgatgctgggaaagattgaaggcaggaggagaaagggatgacagaggatgagatggttggatggcatcagtgactcaatggacatgagtttgagcaagctccaggagttggtgctagacagggaaacctggcgtggtgcaatccatgggatcacagagtcagatacgactgagcaactgaagtgaactgattgttagtcaataaacatttgagtgttagcatgggggataaagagtcaaataaaaacattggccttggccttggattagtggagatcagtcttcccattctatagttttctgttaagaaggataaaaattataattatcaatactgtccacctgtttgtttatgttgaatgaggacagaaaggatgaagaaaatctgaacttgtccctctagaaaggtataatcttatctcaagcatatacatgtgcaacatataaagtagaaaaatagcagaaagctaaagttggattataagccttttaagtgagttacaattcttaggctgttacagctttttgcctttggttcgttctctttgttcctccagcatccttcaccctcctttgttcacatctggtgtaaactggctgccagaattgaaagagaaaagtctggtgtacctattgctttaagaaaagaagttgcctctagtaatttgtattgatctatttggaagagctgcctcagcatttcaacataagcttagcagaggtggtgctgtaaatgtgattcttagttatattacttttattaccttaaatgaacaaaaccccatttccccaagtatatctaaaactttcactttctttgttttcttctggcatggaggcaataaatagtagtcaaaagtttcaaccactgttgctttttggtttaacaaatgggtggggggtggggggggtgggggggtgggggggtgtggggagtagtcagtttggacttccctggtggtccagtggttgggtttcctttatttcattgcagggggtaggggttagatccctggttgggaactaagatcacatatgccatggggcagcaccaaaaaaaaaaagtagtcaaaagcaagcacaggcatttgaattagatctgagttcctcttctagttcagcctttcattaactgtgggacttagggcaaattacttaagctattacgggcttccctggtgtctcagacggtaaagaatctgtctgaaatgtggaggacctgggttcctgggtcggggagatcccctggagaagaaaatggcaacccactccagtatccttgcctagagaatccccatggtcagaggagcctggtgggcgctacagtctatgaggtcgaaaagagtgggatgtgactgagtgactaagcatagcacttaacctgttggattctttgtatgtcaaatgggagtgatacagaatgccacagctatttgaaacatccagaacaagaaaatttgtaaagacagaaagtagattaatgattttgccaggggatgaggagtaactgctaatgggtatgggattacttcctagggaataaaaatgttttggaattagagagtggtcatgattgtacaactttgtgaatgtgctagaaaccacttaattgtatggtttaacagggtgaattttatggtatgtaaattttatctaaatagaatgggaatgataatgtctgcctcacaaagttgtgacatttagagatcatataaagcacatagcacaggcatatacttagtactaaacacatgggatgtttgagtgtgtgtgtgtgtgtatgtatgtacttggtgaacattagattaggaggttgacacatggggattgaggaagaataagaggaacagaaggatggaatgagggacagaacaattttgagctgaagccacatttaggcccaggtctctaagctcccagttcatttctgcaactcttcccttgttctttcctgctctgcccatgagactgtaaaatgcacccttgcattggagagattttgttacaagtgagtcataacccaggctctgtagcttgccatgaaacagtattttacatcagtgggagattttatctgagtgagtgagtatagtgtgacattacctactcaagcttcttattccagtttccagtcccttcttttccccttcctaatcttcctttgctaggataatctattttccatggaatggcgtagcccaccactaaaaaggcttggataattctgcctgctcttgaaagaaaagacattattacctttaagatggttatcatttgcaacatgcttagtttagtcttaaaagtaatttctgatttcagtatggttagttcttcggccttgtgagtagcatttaaagaaagcatggatttaaaataaaaatcagttctggtttttaaattttattttgctctgtccactttccagcatcagcatttatttctccgtgcctctctgtcttactaggttaaggcaacaaagaaccttcctgcaataaatgcacttctcaaaagcaatctttggaaaataaagcctcaaaaaaaacgtattgaagtaaatttcagcttaaacctattgctcagttcctataggctgtagacatatagatcatgcttgtatttatttatttgtataactatgaatatatttgtcttatttcacttgctagatcatgaattcttaatggtaaagatgtgttttattcatctttgtatccctgcagtgcctaccatagtacataacagacaaattagtatctgttaaatcgtttccatgtctggtagatgattggaatgatgtgtttttccatttcagaaggacatttttcctccatgaaagatatacaattttatatatttgcccacattttcctgtctgtgtccctaaaaaagagcaataataagcatttgatagatgactagttaggctagagctgccagtatcccaaagaatgagtttcacgtcccaaataattagttgcatccaatatcagagcttcatcatgatataggaaataaatccttaatattcattcactcagtaaatctttattaatgcctaactctactgggttcaggacactcaatagtgaagcactgtccaattaattgatatttttatttttaagttgaagtttatgaaagaaagaagggttagcgtttcattgtgtaccctctgaagtatttcttacacattggggtttcccgcttaaccattagtctttgagggcataaggataacgcatatgagaagttctaaggttaaatggtattgacaaaaagaggagttgagatgcttcactaactttctgacagtacaggagaattagccccagtgtatctttgatgggataactataattgtcttgttggcatggttcaaaagaagaatgcattcatgaaggtcgtggttagagtgtctttcatcttcatcagagcttactcgcaggggagccagtgtgaagagtgtgaggtgtgtgggtggatgtggttttttctctctcagttttaagatctgaggtgaacttgctgtttacttcttgtaggaagtaaaagtcacctccagggatggtccagggagtttgaaaggcatcattcatattaataaccagagtgtacagtccttgtgaaggatacagcttttcttccatcactctcagatgcctggagtctcctgtaggatttttagtctaagcgtaggccactccatgcttgaaaattgactgcattctttgccaagtggggactctggtaattttagggatcctggaacttgatactttaacaggacagatgtagcggtgattgagatatgtgctcccttgtttaaatcagcctctctgagaaagtcttctcctaatattcctccaaaagattgaaggcaggaggaaaaggggacgacagagaatgagatgtttggatgtcatcaccaactcgacagacatgagtttgagaaatctccaggagttgatgatggacagggaaacctggtgtgctgcagtccatggggtcgcaaagagctggacacgactgagccactggactgcactgaatattcctccaaaggccacacgaaaattccatgaaggaaagttggtcaaagcatggggactccgaattccccgtgggcccctggttgaattgcgcgtgatgtgcggtaccttcttctgtggtgtttagtaggcaatgtgagtggtttggatgtatccccagcctgggggtgccatgtggctgtgggaaccttttgaccacaagcctttgaagttgggctttataatgtatttctgttccctggggtggtgttctctgggcaggaagatgggaagtagaacttgagggattgttttgcttttcacttgttttatataaggcatcaaaactagcccaaagaataatgaagcttatgtattcataaaagcctttgattgttaaaaaaaaaaaaaacactcttaaagaatgcttttattacttttattttactcagatataaaaagaggtctaattttagcttcatcaagattaaaacttgagtgtgttatttatgccagacagtttttaccctttctgggtcatataatggaagagaattacatttcccaggattgttttggtgaagccaaattttccaaactagagagacttaagtaagaccatatcataaaagcaactaggtaatgagactaatttgagtaaaagctttgtgtttattcaaattagaggaagagtaactgaaccaatatggagtttactttttagaaaaattctatatgatatactctaccaataacttttaatgggggcttcccttgtggctcaaaatggtagagaatttgtctgcaatgcaagagacccgggtttgatccttgggttggagagatcctctggagaagagaatgactaccctctgcagtattctcgcctggagaattccatgaacagaggagcctggtgagctacagtccatggggttgcagagtcagacacgactgagcgactaacacatacataacttttagtattatggagatatgtaggggcaaggaaggaagaaagaacatgcagggaaacagctagtaggagagaagtcattcttttggcacataagcacccgcctcggaagacctatttcagtttctcctgattgaagaattgcgctcctctgctggctcttactccatgaagagaagtggagaaattctgctactgcaacttggaaacatggcttgttagtataggataaaagtagtctgttggcatatgaaactgaggaggcctgggctgcagtggaggtgtgttccctactgctgagtaatcagaaggccactgcaggcagtgcaacctcgagctgcttctggaggcttcttgttcaatgaactgggtggttataggttactttcatcaaagtgggcttccctggttcagacggtagagtgtctgcctgcagagcgggagacctggcttcgatccccaggtcaggaagatcccctggagaaggaaatggcaacccactccagtattcttgcctggaaaattccatggatggaggagcctggtaggctacagtccgtggagttgcaaagagctggacacgactgagcaacttcagtagttcatcaaagtatcctgtcctagagtgggtattttgcctacccctgacttgggttctaaatctgatcctgaacttagatacttacttagatgagtgccttggacttcccaggctcagaactggcatcagtaaaccatccctgggagattgaggagacaggaagtaacgtacaaggcagaagtggggacagtgaagacacttattgtttaaagtctactgtttctgtatataacagactttctccctgctgggtttttttgtttttttgatgagcagagttctgtctcttaatctcttttctctgagatccagacctggatatattttgctggttatccttttggcttattttaaaaattattttggaatgatttcaagtttatgtaaatgtcaccagaactactacaaagagcttgcatatccatgccatgcaggctccccagttgttaagatttcactgcatttgccctctcacccagtctctgtttctatcatatgtatatatttttgtgaaccttgtgaaaatgagctctcgataggtggatagctcttatctcctctgaacacttccagtttacatttctcccaaacaaggacatgcttttacatattagcatttgctgttgttcaactgcttggttgtgtcccactttttgcgaccccatggactgaagcactccaagcttccctgtccttcagtatttcccagagtttgctcagactcacgtccattgagtcaatgaagctatccaactgtctcatcttctctcaccctcttctcctgccctcaatctttcccagtatcggtcttttccaatgagtcggcttttcgcatcaggtggccaaagtgttggagcttcagcttcagcatcagtccttccagtgaatattcaggattgatttcctttaggattgactgggtttgatctccttgcagtccaagggactctcaagagtcttctccaatgcagttcaaaagcatcagttcttcagcactcagccttctttgtggtccaactctcacatctgtacatgactactggaaaaaccatagcttcgactatatggacctttgtcagcaaagtgatatctctgctttttaatactctctctaggtttgtcatagcttttcttccaagaagcaagtgtcctttaatttcatggctgcagttaccatctgcagtgattttggagcccgtgaaaaaatctgtcactgcttgcattttttccccatctatttgctatgaagtgatggaaccagatgccatgatttttgctttttgaatgttgagttttaagccagctttttcactctcctctttcaccttcatcaagagatctttagttcctcttcactttctgccattaaagtggtatcatctgcatatttgaggttgttggtatttctcccagcttatcttgattccagtttgtgattcatcaaacctggcgttttgcatgatgtactctgcatataggttaaataagcagagtgacaatatacagccttgtcatactcctttcctttgaacaggtccttccttccatgtcctattctaactattggttcctcacctgcatactcgtttctcaggaaacaaataaggtggtctggtattcccatctcttcaagaattttccacaatttgttgtgatccacattgtcagaggctttcactgtgatcaatgagtgttggcaatttgatctctggttcctctgccttttctaaatctagcttatatgcctggaagtttttggttcatgtgctgctgaagcctgctgaaggattttgagcgtaaccttacatttcagcatgcagctccctaaatcaggaaatcaacaatgagtcagtactaccattcagtgtacagaccccatttaagttttgccaacttttccgataatctctttttcttttttatccaggatcctgtcgaggagcacgttgcatttagttgttaatgtctcttcagactcacttactgtggacagtcttttggcctttccctggcatttatatctttgacaggtttagagagcaggctttacattctatgggatgacccttagcctggattgagctgtttcctcatgagtaaactcaggtcatgagctctcagcaggatcaggcacagaaatgatgtgatgtacagtcattaccaggggtacatgatgtctgtcatccactgtttttagatgttaaacttgatatctggtcatgtcagtgccctttacatttctttaccttcaagtcactgttcttttccagttgcttagtcttttgtgggaaggtgttcgaagatttcagtgatcatcttgctcctgaagatgcctcctcccactggatctagggtccattggcaacactcaacctgcctcagttgaaggaaatggcagtgtacgccagtactcttgcctggaaagttctatggacagaggagccttttgggctccagtctgtggggttgccaagagtcggacatgactgagcctaggccctatgcctgcctcagcggtggtttttctggcttgtgtttcgtctgtgtgtcttagtgttcgggatggaagagctttcctttgccactgtttgtttattttttataccagtgtggatttctgaagtttttcaatggactttaatttcttattattatttaacagattttttttaatgcttaaattgtccccagtctggtcagtaagccctgtgtgtgtctctgtaacacattcccaccgttggatcattcttaatggttcgtagctgaaagatgctgccttccctcagtgaagcatgggcttggctccctgaggagctgcttgtgcctctgcacccgatgaatcccagctgcagctgcctttctgctccctctgcagcgtggccagcctcaggagcagtttcccctgaggagcttgtcagcaggctgctgagtgcgctctgtgggctccgcatagcccccgggagacccacgtcttcggccgggcagtggggggtgtcacgcccctctttccaggtgcggttgggtctgcttctccagcactgttcaggatctccacatggccaccaggtaggaggacttgatggcatttctgcctgtttgactctcagctgccaagagctttggctgcttgagcacgtttctgtcgcccatccgcagaaaccatccctttcaagcaaaatgccgtgtattacttgatcctgacaattctgaaacccagactacctaagcatatgttttccttaaatgggaatacctcctctataattcagaatcctttaaatttagctgaaggtcagagagcttgtttggaaatgataaatgtttcttggcagaattatttctctctcaactcctggggttttttgtagctcagtactttgaagcttgtagtagaattgactgcagtagacggaccgattcatttctcaacttaggatttgtcctttattcttggcgcatgtagttaataagaaataaaacttactacttatttgtggaaatgcaaatttgtgtcactgattacttcagtgaattataaaatcttttgtatttcagtcacttacagagaggacttcaagttcagtattaaaggtgacataaaaaaattttaccaaaggagggcagtccttggatatcaggaacaagaattgcagtagtaactctgctgagacctgaattgacgctgaaaccctggcaactttaggagttgcaagcataggaagcaaagatagagttccacttcattcactccgtgcggcgcctcccctccttggccgtgggctgtgcctcactctggccttcactcatatcattgattggggtagggaacaggcccgaagaagagtgtgctgctctaagcccactacagtaagtcccctccctgcaggcgctgttccgagagtgcgctcccaagtccagtttatttgtaagtcccacaaagttagcctaggtaacacggttggctatacagtactttaatacatctatataatacctttcacacaatacataaaaatcaaacacaaaaataagtcatttttgacaattaaaagccgttcagttttattaatatatatccatttcacatatagtcgaaataaaatcttttacagttcattgtgttgattaaaatgcagattacaggctctcagaagcatgtgacttaatgacggttatttctgtgatttacaaaacggaggctaatcatttagtaagcatggatgtacattaattccaagtagaaaagtcatttttaatgtttcagtacagtatattggaaagtatggtacaacagctggcatacaggggctggcatcgagtgaacaggccaaaagagttgctgactggaggagggagaggagggggagaaggtagagctgaagggtcgtcagcgacaggagacagaacaaactgcagtctcgctcacgcctggggactgtggcacaggttctggtttcttgctggattctgttctatgtaccctcttgaaaaaacggcccagtgacgtctggatagtagctctcctttttttctcatcatagatgacacagtagcagtggtttgcattctgaagggctgctgcagtcttcctgtaccgataagtttggttcccctgcctcaaaaactgacagtgcttcctcaggtagcactaacataggtgactggagctgcgaatacatgttaacttgaaggtttttgtgtgtaggggatttgctgtactccaaaaacaatttaaacaaagtatctccgttaatggatcactagattcatcagcattacttcctgccctctctaccttaacttcaacccaaagcgtaatacagactaactgatgagaggaatcataaaagtttctctgaaaagtacctactttttttctttcttttcttttttttttttttttttaagaaaagggactctaagagctcttaggtagaataacaacattttaaaaaagcattcaccacgagtggtaatactttttcctccaggctttattcttcatggtcttgggcagttttcataaggactctctcagtctgtttttaattggggtcctgcgactactaagttgtgtttggccccacattgggagaaagtgtggtgtaggggagggatgtaggggaggaagaatttctcctctaccctcttatctccacctgggcctaagaattaaactgacattaaacagataagcaggagaagagcgtaagtacactgttaaatcttatctgtacgtgggagtccccagaaaagaacgaagagccaaaaaaacagagttgggcttttatacactgaactggacaaagagaggtgaccagagagaggctggcagggcggttaatggtgggaaagcgactaggaagacactggttagtttaacaaggcttatttgtgcagatttttcttgaccccgactccggtaataagcatgttgctttcctctgttatagggaggacatcttcccagtgagggttttattttttgctttcaggaagataaaagggaggtcagagtgcccttctcatacctgctgtttgttcagtgcctttagctcaatatcatccttatgccaaagaggccttttgggggatggtatattctgccacccttcacagacattgtttaccatgaggtattcacctggccccctgagacctaaaaacagctcctgctccgccctaaaaaaatagagaaacatggcttcttttttgttctgttttgccttttaagttactgcttcctcttctgtaaatgaggatagtaatagtttgagtctggtaggattgtattaaatgagctgaggcaaataaaatgatgtacttagaaagggctcagtaaatattattgtgggggaagaaaaccagttttccctctatccttctagatttttgtcttttataaaaagacagactaatgagggaaaaacgacagatgtgcacacatgggagctacccaggaaaaacaaaggaactccgaaatggcgcgagcccatgccttaaatactgtctctagctaaagatgaaacacggtgaggtggggggagtcagttatgggtggttatcaggaaaagcacactaaacaagggtgaggttgttaggcagtttaaagcggttgccttctgcactgataagagtttctagacatttcgagtctttctcctgttcctgaaactggaggaatatacccctacaaatgggagatttcccttttaagtataaatgtctcttaggaaaagtaacttctcacttttcggagcttcacctgtgtctgctggttcttaaaaataacctcaaaatagtcagtatgtcaaagaggcatattttgggatgatatattttgttccccttcattatctgaaacagataaacaaaatgcattgctgcttagctgctccttcttgtatttgaaacatttgtttagaagcaacccaaaccaagataatctgtatttaagaatcataaaggggaaaaaaaaatgttttggctttaagacagtttgctttgaattctcctgcagtcggagctggcagggttcatgtgctccagctgagaggccgtgctgttaccttctggcagtcccgtatgcagatgccgttatattaattacagtagaaaacctgattaacttgaaagtccgtaactgtcagtgaagcagctgctttagctctgaagcaggttttcttcctccttcctcctgtcattctcccatttttcatctcttctttagagaactgctgagactgcccaggaggccctcagagcccccggcttgctccgtcacctttcgatctgcagctgtagcagttcaggggagctctcctaattaatttcacgtctagttgaaaaacaaccagacactgcctagccccctcatttttctttcaacagttaaaacctgatggaatcctggaattttaaaactggaaaggatgtaaagatgatctaatccagctctctagttcacagatgagaaatctgaggctgagagaaacaagtgggttgccagagtcacagggccagtcagcggggaggccccaggtcagagcgccaccctggccggtgctctgcccacccccctgctgtgctccatcctcaccaaaccatttgccaaggggagcgaggagtgcaaccctctagtttcagcttcatttttctccatgctcttgttcaaatcttgtagacacattgaagagcaatggaaaaaactaaagattagtgggagaagcaaagagcttggacaatgacatattgaaaaccagatggagatatccatattgaagacctttctctgtctagtaagttgcacacacaaccctagccaagcgcctggaaacaaaaattcgaactagactcactgtcagccccctcgcccattgcactggcctacggctgtttgactccagcaagtttatttatagtgactgtttctgtcactgcagagatgggggtgtgatactttgggtcagatgaataatgggtgtgtctgctgtggttttggccagtgccacatggtttgctggttttcctatagtctcagaggtgttgagattgctccctttggtcctgaaaaatggttagttttcgttctctgttacccactctcctggcagcagcagtagtcacgactcatttagactcactgttgttattctggaccggcttttgttacgggccgtatgaagggtgttagtatgagcttactcagccacctgagctctgaggaggactgggaaggagaggaagataggaagtgccggtgagagcgggtccagcaggagccctcctgctcagccagagtctggcgggtaaatcctgccgctgaatgggccagtcctgttctgccgtccacctctgctctccatgttgagatgaagggcgtttttaggaatgacggttgctcctaaactattcatggtactggaccgttcatcatattactggatttttctgagtacttagtagagccacttacggctttctttaggcagttctcaatgagcaagcaaactaacgctcactattttttagtcattgtgttgggtgttgaggatacagagagaaatgtgatggttcttcctgcctttggtaattataaacttaggactagaatagtctgaagaggtgagcaagatttgccatcccaaaatgtgtctctttggtatgagaattagtttaggcttggttgttgttaaagaaacgaaaagctcagcaagagtttttatcttcctcaccttaactgcctaaatgaatttatatagagggcctgtcgccagagctagctacagtgtagtatgaacttggtgtaatagttgagggtcaaaatcttctctatgtccagttgtttctggatggcccagcaaacctttgtttaccaaacatttactcttctgtgaattgccttgtttccctttgaagacccagcccccgccccctctttttgttccaggataacgtatgtatctcgtttaacccgtctttcagatctctcatgttcagattccttatgtgtatgtaattaactttcattttctactgttaatctttctcatgtcaatttaattcttagccccagccagaggaaactaaaagggtagaggaaaattgtttttcctccctgacaactgtagtaaatgctgtttagttgtcagtgacgtatggagggactcaggactccctacttgctgagtgatcacacacgcaaggggctgtgtccccttgcttttagtttgtaagtcagaaattagaccagttgtctggtgtttttccctcgtgcttaataaatgccttgcatagagttgggccttcagttaacgttttgctttctcatctctttcccaggagaatagatttccgtgtttcactgtctggtattgctggtgtgcttctgctgaccaagtgatgtacttaacaggcagacgtgaaaggaagagcttaatgaaacgcataaaggggtctgagtgaaagccaacttgtttaaaccttgtgctgccatttgttggagggaagattttaaatagtgagtttgcagcagggtgggtagagctgaggggctccctggtggctcagtcgttagaccacttgcagcgcgggaaacctgggtttgatcccggggtcgggaagatcccttggagaaggagcaggccacccactccagtattcttgggcttccctggtagctcagatggtaaagaatcttcctgcagtgcgggagacctgggttccatcccggggtcgggaagatcccctggaggagggcatggcagccccctccagtgttcttgcctggagaatcccgtggacagaggagcctggtgggctggagtccacagggttgtacacagttggacacgactgaagggacgcatgcaggtagaggcaggcagaagtaggacaaccttttaaatgagtctggcctctctcgcttcagttacataaacagaataaatagcttatgaacggtttaatgcagctcatggttaaatgactaaagcaaatactgtttcagttggtaccaccctaaattttaatgaagatatgtgtatttggcttcaaatacagatcggctttctaacagcctaaggactgtgtgtctgtgcctttctgagcaaacacgaagttgcctgaatcttagacttgggcaggcactgtcactgaccaagttggggagtgattgagttcggaatcagagagttccagtcaacaaatttctggttccttttcccatatagaagttctcatacgttaggaagccttttgttttctcttgagtattatttgatctgttttgtggaagcttgcagtatagatgagtgtatcctgaaaggatatttctgagatagatcaaatcttccttgatgtgcttggatttatcctaacaggtagtcttttcccctttgtcttacttggggtcttgtcttccataaactgaaagaatatgatttgatcagagatattgatcttaattaagcattcagtgttttaagaaaacaaatgacttggcagctgggatgctgttaccagctatcagagaaatgaaccagaaaagattctatgcttatgcacactcgaataacattttatttcaatgtatgtgtgttaaaagactacacacatttagtatatagataagggaaataaactaaaactgcatgtggcagagtcattttaaagaacctttctgtgttcaggtgttaggttttgtgtcacaaggaaggtttttattttgatttgtgttcagtccttggggtttccgaggtagcgtggtggtaaagaatcactctctcaatgcaagagacacaggagatgagggttctatccctgggttggaaagatcccctggagtaggaagtggtgacccactctggtattcttgcctggaaaattccatggatgaggagcctgacaagctgcagtccacgatgtcgcaaagagtcgtacgcatctgaggattaatgcacgtattcagtccttggactcatgtcccagcagcatagtcttctctggttttgtcaatttaatgtcctttgattgagtccttgtaaactccttaggctgtccctccactgattgaaactgggtcaggaaggggagattaggccactgccacctttctggaaagaaagaactgctctgggggcgagccagagaggggactcctgtgtgatttaagaaacgtctcctgactgggatgtttttctggtatctccttccaccaagagctccctagaagtttctcttctaggaggctgacatctaatgggatctctgcgttagtctctgtctgcccctcctcactcttctctctgtactcctgtctccttctacccccatccccgcccaggcccgctgagctgcatttccttcccacccaaggaagagaagcgcctccagcagatggtggactgcctgccctgcgtcttgatcctcggccaggactgtaatgtcaagtgccagctgttgaacctgctcttgggggtgcaggtgcttcccaccaacaagctgggcagtgagaactgtaagcttcggcgcctccgcttcacctatgggactcagactcgggtcagcctggcgctccctgaccagtatgaactagtgcacacgctggctgctcaccagggcaactgggagaccgtccctgaggaggacctggaggcccgggaggacagtgaggacgctgcccgcgttctggccgaactggaggtgacgatgcgccatgctctcttacaggtaccggtctcgtccttacacgggtgcacttgtaggcaccagctttcattgtgcctgagctttctcagaaagtagtttggcagtgtgtactgtgggctctgagcatcagcagatagagtcaaaggaacgtgatctaggaagttgaaaaccagacaaggctgtagcagtgtccatccccgcctctacggctgtgctgcaaagccctgggcagtttgtctaatccctttctaaaactgaagaatgtgatacttatatctcagcctgcctttacagaaagagggtcagggttagcaatcctttttcatttcttacaggaaggcatggctagaattgtctctagccatccctttctaaaaggaacaatcatatgattgatgttcttacagagctgagaacaagtgaacaacttctgagtttttccttagatctgccttcatttactaagtgagacaggtcctgtctcctactttctaagggacttcagaacacaaggacagatctggctcaaataaagaggtatggagatcctatcacctgaagaatgtttctctcttgaagtaaactcctgaagaggacacaggtcttgtggcatttcctaaaagataattttatctgtctggtatttatatctctacgtaggaaggacctgtctcttgtgcaaggcttcctttgctactatatagctaggactagactatgttattagaccaaaaggtgacaggcacagcatgtgaatgtgtcaggagaatggggctgggcagagaaggtgcctgtgtcagggatcaggagctggcaggaataaaagaagcagacatgctcagagcagagagttcgtcatcttgattagctgtgccaggaaggaggggctcgtttggcaggacttggagagcggtttcttcttcacttcacctactcctgttctagaaggcttggtctctcagtcagtgagtgaggcctttgattgtggctttggcttacgattctctgaaagtagaaactgtcatctcgtttctttccagagtccagttatcttttatctcaataaatgctagagggatttagtatacaagccagcattttctctcagctcagtttcactggtggctttcttctgtgttcagactgagagcgtgcacttcttagctccaggacaatgcgagagttctcggatgactctgactgatccttgtttattgactgagcctgctcagttgactcataagctttgtaggtgtatgatccaagcacagtctctctatagtattctgttctggtctagttacttcagtttctaagagctcagtggttttccaacttttttagattttaattcatgcttagaaatagcattttattattaggaccctaacatatatacgtgtgtgcatttggaataaagtttcatgaaacagtacttttacttcttgcaaaacacactgatgttttcttctctattatatttgacttcattttttggaaaaatgatagcaacccactaaattgatgatctgacaatgtattctgacttacagcttaaaaaacactgttaagtagctgaaaggactgctcttggttgggtggtgatttttcctgttcttgcattttaaaaacagtcttggaatgtgaacaaagccatctgtaggacagttgcgttatttgattgatttctctgtgtcccttcattttgttggttttgatttttaatgctcatttacttttgtcccatgaggtgagctgataaagtcacagaaaagaaaatgagagctatttcccaagtagtgtgtgtgtgtgcgcgcatgcgttcgtctctcagtcatgtctgagtctttgcgaccccatagattgtagcctccaaggctcctctgcccatgaggttctcgaggcaagagtactggagtgggctgccatttccttctccaggggactttcccgacccagggatcgaacccgggtctcctgcactgcaggcagatcttctaccgtctgagccaccagggaagccctgagcacatgtcttactggtgagagttcccagcgatgctcaaggagtacattgttgcttagtcgctcagttgtgtccgactctgggaccccgtggactatagcctgcgaggctcctctgtctgtggaatttcccaggcaaaaacactggagtgagttcccatttccttctccaggggatcttcccgacccagagattgaatccccgtctcctgcattggctggcagattctttaccacttagccaccagggagacccccatgtatatatagtaagcaatcaaactgagttaacaattaagaaggctgcttggctgggagggaagttaagatacctaatcagtttcctctctgcacggttgaaatatgtatagattctctttcatgagaaatatccttctcttttcttgaagaattttctagcctcccatgtcctgtttcatgtggtttctgaggcttctatagtaatgtttctttggatctgctttatacggcagtgattttgatgtggaaacagccacggacccccacatttctaactttagactcccttgatggtgagcctcagaggggcctcagcctctgtggtgctcaggctctgctctgcctctgtcatcagactcctgtctccattggcttactgctgggagcatttcctaagctaccttgaagatttttcttgacagtgagaaagatcttttttttagctccagttatatttatttatttatttattttttatttttttttccagttatatttagaaccagagaattagctctaaacagcccttcaatttggttcctaaaaggggtcgtaaagaaaggaaacatttagctaaaggaaaccaagattgaattaggggaaatctgatgttcatttttaactgtcaaattactaaagcagaatttccccttaccctcttacacaatggtcattcttctaatatgttactttaaagtcctcataaattagccattttcagtttgttccagagtaaggcaactcacatggaccccataccacgtggtacccacatgggatattgcagtattcctagtgttttagctccgggtcccctgagagtctcagttcataattcaataatagagaaatactgtcaggccattagttcctgaaacctcatttagtgttaaaacatggtcattttccagctggcagtgcattctgcccttccccgtgctcactagtcttgtctgcatgtgcatgcttccccatcctgaccttcaccccctttctggcatatacctcggccatgtgcatgcttccccatcctgaccttcgccccctttctggcttatacctcggctcgttttctgttttgttccatttacaagtccagcgccagacggtcgtctgccttagaatcgcctcagtctgatgcatgtaagtctagatgtggtttccctatgacacctataagaaaaggaagaaaaagaaatggaggtcgttaaacttcctcagcctgagatggcattttcctgcagcctgacggtggatttcatcttcgatggctgtttcgcagccgtcagcgctctgttcttagcctgtttacccctcccaggtgttttctggccctgcggacaaacacgcgtgtcacatggccgtggggctgtcacaccgtcatggtgacgggctcctggcgatgtctgggaaggggtatttccgggaacttaagtacactgatgtttccaagaaaggtctaatgacttgcaaataaacttattttttttctttgctactttgaactctaatgagttgaaatagttaaattttctctttataaccctcagtagccatcaatggaagtaatctatttgtcatttcatagtgacattgatatttttactttttaatctttaaaaattaaaagttgttttatttgatatataattatttagttgatttacaatgttgtacagtaaagtgattcagtcatatatatatatatatatatatgtatgcatgttgtgtacgtctgtatatatgttctttttctcttttccattatggttttctgcaggatgttgagtgtagttctcggtgctatacaggagaagcctcttgtttctctgttttatatatagtagtttgtatctgctaatcccagactcttacttagtttattcctcctcacccactttcctctttggtgaccaggagtttgtttcctttgtctgtgagtctgtttatgtttcataaataagtttgtatcatgtcttagattctacatgtaagtggcatcatggggcgtttctctttctcacttatttcacttggtgtgatgctctctggctccgtccaggttgctgcagatggcactattccgttctctttgaggctgagtagaagggtacattgtgtatatatgtagcacatcttctttctccattccactgtgggtggatgcttggttgctcccatgtcttggctattgtaaatagtgctgccgtgaacattagggtgcctgtgtgcctgtgtcttttcaaatcatagttttctctggacatatgcccagcagtgggactgctgaatcatagggcaactctatttttggttttttaaggaacttccatactgttctccatagtggctatactaatttacattcttaccaacagtgtaggaggcttctccacaccctcttcaccatttgttaatttgtagagtttttaatgatggcccttctgactggtgtgcgatggtacctcactgtagttttattctgctgttgcgatctattttttttaaaattttattggcgtataggtgatgtatcgtgttgtgttagtttcggagtacagcagagtgaatcagtcacacgtataaccattctttttcagattcttttcccatataggtccttacagagtgttgagtagagttccctgtgctgtaatagtaggtcctcattagctatctcttacatacagcagtgtgtgtgtgtcagtcacagtctctcagtttatccttccccctcttttcctctctgacaagcctaaatttgttttctacatctgtgactccatttctgttctgtaaataagtttatttgtaccatttttgtttagattccacacataagcaatatatatgatatttgtctttccctgcctgcctgacttcactcagtgtgacagtctctgggtccgtccgtgttgctgcaaatggccttatgttgttctttcttatggctgagtgatattccactgtctgtgtgtaccacatcttctttatccatccctcggtcatctccttctagttttgatttgcacttctctaataattactgacgttgagcatcttttcatgtgtctgttggccatctgtatgtcttctttggagaaacttgtatttaggtcttctcattttttgattgggtcgtttgtttttttggttattgagttatgtgagctatatgtgtatttaggaaattaaacccttgtcagtcacatcatttgcaaatattttctctcagtctgtatattgttttttcattttgattattgattattcatattgattattcttttcattttgctgtggaaaagcttataggtttgattaggtcccatttgtttatttttgcttttatttctattgccttgggatactgactcatgagctttccggacactactttgctgaagagacagtctttctccattgtatatcttgcttcctttgttggagattaattgaccataggtgtgtgggtctgtttctaagctctctgttctgtcccattgatccatacagacaatgttttttttttttttaatttctcagcagttaatactttcacaaccccaaatcaaagtaaaaatgataaatttatgcaaaatttaaaccctcaaatttattaaacattgttgctagaaaaccgtcttctttcaatttttgtttaatttttggcatttgttttggtgccttatgaaactaaatttgttaaatgttgcctacttttaagttagataccatgtcttctctggaatgtatctcgattgaagggtaaacatatgaaagaagtttgggtgatagtcttttatctgacggtaagcagatagttttggaaaagagagtatatggaattaggtcaaagatggccatttccaagggaaaaagaacaaagttggagtaatatgtgtaagaaaaataaagaatgctattctaaaaatatacattaaaataaagaaaccattattttatggggcacaaagaaaggggaactaaaagtaatgtgttaaaaaaggatatgggaagttcaggcaaatgctgaatataagttccttctaggcagtaattctgtgttctttgaattcaacgtctctctgcctttcctctaacacacactaacatacacagtgaaatatagccaatacattgctctttgctaacaaacctggtaatacttactataggttaatttacctattaaggatatgtatgctttagaggcgcgattctttttaaaatcccaatgctcgctctagtggccttgatccctcttaaaaagactagcttaaagggctcttttttcaattcaccaccacttgttcacttttggccttccaagtttaactctttgggagaaaatctggcagagattatggtcttaatcttccttttttgagcagagcaggggtttttacttgcagccaacatatacttttaacacagaaagctaggactgttacagtccctgaaattgtcttgtccatcctttattcttctctcagaacttccctaacaccaggccagacaattcctgacacagtgggcctcagtcgctgtttatacacagcaactgaggctttgtagtcagaggaccctggatgtacagcctggcttggctacttaaccgtgtgactgtggtgctagggcaccccccatttgtaaaacagaagtggtaatccgtgtgttttagggctggtgtgaggcttacgagaggctaggtgtaaagcagctagcacagtgtctggcccttactaagcctccctttgaatgaattgagaggaggatttcctcctctctcagacacctatctgttccctgacaaccatccatactggaactccttccattgtgaaacttaagcccttctggttcctgcttacttagacttattattgtgctccatttagaagcaaagttcttcataattattatgaagtgcttttgtaataaaattaaagaagagagaggtgttataaaatacagaagttaaagttataaagttaaaaggtaactttcacctttgttcagacgcttctttcttctccattcttctgttgactttcttgatgagtctagtgaatggtgagagtctaataaatggtgagagaattcacattcccaattctgtatctgtgggtccctggatgtttgaatatccacacagtagaatgcctggaggctatccagtacctccttgtcaacttgtgtggtgtctggttcctcacagtgtgaaatcagatggttttgatccttcaggctccgtgcttgtgagctgagatgcagacctaaagcctctgctttgatgtgtgtggggtcgtaccacacttccgcttttagcacggtggcctcatgttcctgtggctagttgagggctttggttgggattatgggtttcctcaagtcttgttctggtctgtgagttaccactccctacttttactggctagggagatgagctagtatccattttatgctgactgctggggtgaagccctgggttggcactgctgcttgtggcctgttagattctagaaagcagctcagtcacagctccccactggagagtgttcaagagtcagggtgttttctacagtgtaacaggaagagggggcatgcatggactgtgtgtgctcagtggtgtctgactctttgcaacaccgtggagggatgtatctgccttgctatataactgacatttaagagtgatagtgatttcagagaactgtacacaaatgaggaagaatcagccccgtgtaaaatggggaaaacttcctattgttctgtgagagtgggcgtgggcggagaattgatggtgatggtcactgggacatggagacagggcctggagtccgggatgcgtcagctgttaagcgaggggtagggccatatcgttctgtgctgcttttctgtgtgatggaaggaggttgcagaactgtagacaaaacaaagacattcatgaccgatctgagtgtgtgattgtcttctgtttgaactgttggttaagacgaccatccatagctatcgctgagggtgtaatgtgctgtgagccatagagaaagagtcctcatcagtcagagccagtattcttaggaagtggtcaggcttcagtgactgaaccatttcttcttggcacttatgatagtgtcattttatattaaaaaaaaaacaaccaaagaggaaaatcctggtgtttgcagagtagcagtttgcttttttattacattctcttaatcttgccaagaaaattgatggtaatatatcagcttctgtagaatccacagatttttgcagatatattataaaagagatatctctttaggaattttctgtgatttaagatgggaattatggcatactcttctgattccctggattcttcttccttgactgatttcagagcttcctcactgcttcattcttggagtagatgcaaacagcagttccagataaatgtgtgagatatgggttaaaaaatagacagttttacatatgatgattgaaaatggttttgagcaaatagtaaaggcatcattcattcatccagtaattgtacatttatttatttaatgttcagtaagtgcaaacactgttctaagtgccaggaaggagtacagccttccatgaaatagtctgaggtcagtcttccctctcaggtggccgtaatatatgggccaggaacagggctcatcctctctgtgaattttttttcactccctgtctccaggagacagtgcggcttccctttttgtttataaccgtcaggcatgagtcatccctctgccgtgagtattgcagaatcacgtatcacattccagtctagtttgtactgctgccagggtctcagccagcagctctttttgcctgtctttcaacagtcaagatagtcagaacagtgagacagactacacaaattaattaactggggaatagagaagagagagcacagtacttgttttctatccgtttttgtttgtgcaagatacattaaggagtagataccttctttctaggtgccaattcaccaggcagtgtctaccatcagagttcattttaggggaatttttaaaacttgatgtatagctgacatatagtattatatatgttacaggaagaaaatgtagtggttcactgtttttaaaggttatatttcatttatagttattataaaatatgggctatattccctgaagcttatttattttatacacagaagtttgtacctcataatccttgaccccaatctttcccatctctccttccttgtccgcactggtaaccactagttttttgtctgtgcctttgtgtctgtttcctttttgttataatcactagcttgttttatttcttggatgccacttgtgcgtgagatcatgcagtgtgtgtctttctgtgtccgtttcccttggcacagtgccctccaggtccatccgtgtgcagatgggcacattacattatttttatggctgagtagtattccattgtgtgtgtgtgtgtgtgtgtgtgtgtgtgtattatatagtgaaagtgttagttgctcagtcatccaattctgtgaccccataaactgtagcccatcagattcctctgtccatgtaattctccaggcaagaatactggagtgggtagccattcccttctccaggggatcttctggtcccatggattgaacccaggtcctcctacatttgcagacagattttttttaccatctgaaccaccatggaggtgtaggggtgtgtgttgttttgtgtgtgtgtgtgtgtgtgtgtgtgtgtgtgtgtgtgtgtgtgtgtgtgtgtgtgtgtgtgtgtgtgtgtgtgtgtgtgtgtgtgtgtgtgtgtgtgtgtgtacatatatacaccacatcttctctatccactaaattcttttttcaaaaatgaatttgcacttttgagcaaataaagtcagctctcctttacaaaggatattggttctacggcagctttggctgccaagttctgttgcacacataaaatggaaatttactttaaattttttaaaaaatccatcaaataaacaagcagcaaaattcttcctgaaagctttctaaacaatacttacttcggtttgaatatttagacttttttctcttaatatttctctaataagtttgattgatttatatctttaaaaagatatatttaagacagaagccatttaacaaaatttttaaaagccactgtcacctataattatcttgttataacttcatttcttgaaattctcttctagtctgtaattactaaatgtaattagaatgttggcatttaagtgattgcatgctatactttggaccttaaatgtccttatgtaccctctgttttgaatgtgcctcatgaaacgattcatactctagcactgtgactcagggcagtgaaagggggcttgtttcaaatagcagagtgagtgtcagattagtcttccaatcagaaaacattccatgcagtttgaggcacaggtgaatagcagatttcttcctggcataggcttggctagaaaacaagtagatttatacagtgtttgctcaaattacaaatgatgagatgctaaaagcacttttagggagttcaaagtggccagacaaatgaaagttctgtggcctacctgagaatgaaatttatgaattctttgttgaggaaaaaggtgagacttttgtactttagtggaaataagagcttgctgtctctcactctctgtcctttagtacaggcacacacgcacgcacgcgacacacacacacacacacacttacacacagtacaagaaacaataagctggcatttcccagcccttctccattgtctagagaaggagatcaaaaagaaaaactctttaaaacattttagaattctgcaaaggattgattttgagtctgcagacttcagagttggtgtgcctgcaggggtaatataggcatgagtctccagatcaatgcttaggtctggagtgccaggcaaagtacacaatttcagaggtttagaggagcaaaatttatttccctccatattcccatatggatggaaatgtatgctcttaagtgagtcgagatccttaatgaagaagtagaatgataagcagaaactactagctagggaaatgacctgtttaggagttgggtgtatcagtgatgattgagttcaaacataggtaacaatcagaaaaataggggtttgcttaagcaagacaagaggttaatatatttttcccttatataagtccaaagctaggcagttgagagctggtgtggcagctctgtagtcatcagagatccaagctcccagtctctttttgcttcctcgtcctcagggctggcttcccccctcaggattgcccagggctgtaggagggccactgctgctctgtcctcacacctgcgctccaggcaggaagggcagggccagagcgtgcactagctagcagagtcagccctttgaagagctgtctgttgtcctacctactattggctgcccctccataaaagacattgccttcccaatgatgcagaagttagatattgggtaggcagaccgtagtctctgccagaccaagtgatcatgagcataaaggtgttcctgagacctagatggctgagaccttgggatgtttgccaactcttaaggtaggatggtaatgtttgacagatctaacctttagtttgctgcttgattgattgattcagcagtattaaggacttaatctataccaggcactgaaattacaggagtgaaaaagatagacatgttccctctctcggaagagtttataggctaattgggggaaaaaaaaaaaaaaaacttgtttttaaataaataaattataagtatataagtgtattgactattaagagaaggagaagtagagagtactcccctagtagggatttcttattaggaaagactccagaagggtatgacactgtatacactgcatgggagttagaaagttgaggatgagtcaggttagaaagagggggaggaatgttccaggcagatccactcccagtctgagagttcgttcttcatcagagggaatcagcgggagtttccaaagcaacaaaagggactccaggttctttttttacctaaaatggctgaaaggactgccatcctttctacttacttatttttccactgtctcttgatgagtgcctgcctgcttaggtggcaccagggagtgttggtaaccgaggaaggagggggacaagtgattggggcatatactgaagcccagttgccccatcatagatctgcattttggtctcaatgtgggactccggggaggcaaggactggttctgagcctgaagtgctgatatgaccccgttccccttccaggaagtggacattgtggtagcaccgtgccaaggcctccggcccacagtggatgttctgggtgacttggtgaatgatttcttgcctgtgataacctatgcactccacaaagatgaactctctgagagggatgagcaagagcttcaggaaatccgaaagtatttctcctttcccatattctttttcaaagtgccgaagctgggctcggagataatcgactcctccactgaaagaatggagagtgaaagatcaccacttcatcgccagctgactgacctgggctatctgagcagcggccactgtaactgtggggcccccggccaggacaccaaagctcagagcatgttggtggagcaaagcgagaagctgagacacttgaacacgttttctcaccaggtgctgcagactcgcctggtggacgcagccaaggccctgaacctggtgcactgccgctgcctcgacatcttcattaaccaggcttttgacatgcagcgggacctgcagattacgcccaaacgtctggaatacactcgaaaaaaggagaatgagctgtacgaatcattgatgaatattgccaaccggaagcaagaggaaatgaaggacatgatcgttgagactcttaacaccatgaaggaggaacttctggatgatgctgccaacatggagttcaaaggtgggtcctggagagagcttggtaggatgcaggaactggggcatcctcgaaccctttccagctggcatagagtacatcagttctgaagcccaaaggaacctaccccaacggggcccgttagcagcagccgacctgaaatcattgagtggagttggcctctcttgctctgagaggccttcttggaaaagtctgccgccattccttcccatttgataaatccgtcccaatactgctctttggtctccagttcttattgtatccccttgcctttttaagactggagaagagctgcctgaagaaggtcgctgagtcatgctttcatcctgactcctttgtcatggcccatgctgctttgttggttcttttttgtgtgtcatggtctcattttctttccagggtgctcctgagacctaactcagaaggatttcccaaagtagcagttttagcttttctggcattcctatccttcatgaataaccgttaacaaaactgggccaaatgcttagtcatgtcttttggtatctgaggtctgggtgctactgactttgtatagtgactcctgcgtgaacattagctctcagttcagttcagttgctcagtcatgtccaactctttttgaccccgtggactacagcacaccaggcctccctgtccagcaccaactcctggagttttctcaaactcatgtccattgagtcagtgatgccatccaaccatctcatcctctgtcatccccttctcctcctgccttcagtctttcccaggatcagggtcatttccagtgagtcagctcttcacatcaagtggtcaaagtattggagtttcagcttcagcatcagtccttccaatgaatattcaggactgatttcctttaggattgactggttggatctccttgcagtccaagggactctcaagaatcttctccagtaccacagttcaaaagcatcaattctttgatgctaagctttctttatagtccagctctcacattcatacgtgactactgaaaaaacaccatagatttgactagacaggccttgccgacaaagtaatgtctctgcttttgaatatactatctaggttggtcataacttttttccaaggagtaagcatcttttaatttcctggctgcagtcaccatctgcagtgattttggagcacaagaaaatagtctgtcactgtttccattgtttctccatctatttgccatgaagtgatgagactggatgtcatgatcttagttttttgaatgttgagctttaagccaactttttcactctcctctttcactttcatcaagaggctctttagttcctctttactttctgtcataagagtgatgtcatctgcatatctgaggttattgatatttcccctggcagtcttgattccagcttgtgcttcatccagcctagtatttctcattatgtaccctgcatataagttaaataaatagggtaacagtatacagccttgatgtactcctttcccaatttgaaaccagtccgttgtttcatgtccaattctaactgttgcttcttgacctgtatacagatttctcaggagcaggtcaggtggtctgatattcccatctctttcagaattttccacagtttgttgtgatccacacagtcaaaggctttggcataatcaataaagcagaagtagatgtttttctggaactctcttgctttttccatgatccagaggatgttggcaattagatctctggttcctctgcctttttaaatccagcttgaacatctggaagttctcagttcatatactgttgaagcctggcttaaagaattttgagcattgctttgctaggtgtgagataagtgcaatggtgcagtagtttgaacattctttggcattgcctttctttgggattggaatgaaaacggaccttttccagtcctgtggccactgctgagttttccaaatttgctggcatattgagtgaagcactttcacagcatcatctttaaagatttgaaagagctcaactgaaattccatcagctcctctagctttgttcgtagtgatgcttcctaaggcccacttgactttgcactccaggatgtctggctctaggtgagtgatcacaccattctgattatctgggtcatgaagatcttttttgtatagttcttctgtgtattcttgccaccttttcttaatatcttctgcttctgttaggtccataccatttctgtcctttattgtgcccatctttgtatgaaagtttcccttggtagttctgattttcttgaagaaatctctgtctttcccattctgttgttttcctcatttcttttcattgatcactgaggaaggctttcttatctctcctgctgtttttggaactctgcattcagatgggtatatctttccttttctcctttgccttttgcttctcttcttttctcagctatttgtaaggcctcctcagacaaccattttgcctttttgcatttctttttcttggggatggtcttgatcactgccttctgtacaatgtcacaaacttccatccatagttcttaacatagtagaacagcctccataggtgggttctgcttattgccattttctagacaagggaattaagactcagatagcttcagtaatttgctcaaggtcacacagatactaagtaatagaggcagaacttgaatctagacagtctgattcctgagctcatactcataatttccacacttactgcttctttatctattccctgttattgatgttaccatcttcctgggaaccagcttcagaacctcagcatgaggacttccctggcggtccagaggttcagactccacacttgcagtgcaggggtacacattgtgtatccttgaggcaataaaagcgttccagttttactttttatttctctagtaattgattagaattgaattcttgactcttgtatttttctcattaatatgctaggaagtgtgaaatattacaaagattagaggctttggaattcatcaactttgcgttcaaatgctaggtatattattccctaactctaccatcccctcctagtgcccagtttattctctttttgaggctttttcctgacttgtcaaatataaccagtgatacccttctgacgtgttgttagggttaaattagattagatacataaaatacttcctccccttctgtaaatgtgatgtaagagctgacagatcagtaggttcattctgtacaggtgctccttcaggactcttagatacctcaaatggttgaggattgcgtggcccctcatgctgagagtcagaggtagtcagccatgtctgttttgtagccatcagcatgctagctccttgggtccaactttattcagtgtacctgcccattcccctcacaaccaactagggttttgctgtgcctccatagatgtcattgtccctgagaatggagagccagtgggcaccagagagatcaaatgctgcatccgacagatccaggagctcatcatttcccggcttaatcaagcagtggctaacaagctgatcagctccgtggattacctacgtgagagcttcgttggaaccctggaacggtgtctgcagagcctggagaagtctcaggatgtctcagttcatatcaccagtaattatctcaaacaggtactcagagggtagttaagagctggccacagataatacatgaaacagaatccacccacgagcccagcatcaagttagccaagaatttccctttcagtgttttcgccagtccagtttgaattttgttttcctgtctcatgaccactgtctgtgggaggtgcttgtgaactgtcaggttgcagttcagccaatgagcaacatgatgaagatgaagtagaggggtcccattggccacaaaacagatgaccaccctgccttgactctgcacatacactgaggcgtagatttgggagccttgaaactggaccatgttcttgaaataaatatcatttgttgcatttttaattagccactttactcagggcatatatatattgactttcttattgtgtcttctttttcaggtcttaaatgctgcctatcatgttgaagtcacatttcactcagggtcctcagttacaaggatgctatgggagcaaatcaaacaggtagaggttttttagggaaagagttttcagtccctaattggctcaaatgaatctttgtcgctccagcaggaactaatgtctaggatatctgtcctagacaaactgatatctgtcagtataggtggctgtttgtcctgattttcctgcctggggaagttctgatttatgcctgttctgaaataattattaacagtgtcccctttaactcttaaaagtgatgtatctaaatgatattttatggagccataaaactctacttctctagctttttgatgtttctttgccccagcctaagtgttttctcagaaccaggctttgttaccaaagaccatgagtatgatgtattttctggtattcagtctggttcttatattgaattatttgctgatgttagaaagggatttatcaggcacccccagtactgattgtaatgtattgaggattcatgaacatgcattccaagtgtaatgttctttgatgttttccattggactgagccccaattttgtggtaggtgaaattggagaggggtgttgaacctcataagctctcgtcttaagatcctggcctgctgaatggtaatgcagcgaggaaggggttctagtggtccctgtctccacccctcagtgttctcactacccctgtcctgacagatcatccagcgcatcacttgggtgagcccacctgccgtcacactggagtggaagaggaaggtggcccaggaagccatcgagagcctcagtgcctccaagctggccaaaagcatttgcagccagttcaggactcggctcaacagttctcacgaggcctttgcagcttccttgcggcaggtgagtcttaggaaaggcgatgcaaccggatcaagcagagaggtgcctcatccgctgtggagtgctttatctactgccctctatgtaattgtttaaaaattgtcagtatattttctttctgttgtgttagaggataatactcagttacagggtgtttcatcgataaacgtttcgtgtggatgtttttctaactcgagagagaacggagaaaatgcagttaatttctcctcacttcactgagtgaggaatgaaaatcaaggggtaggaattttatatgaatttatatagtattttaggaatgagggacgaaaaaggatggcattccagcttccatgtgtgtgcttagtcactcagtcatgtccgactctttgcagccccatggactgcagcttgccaggctccgtggggattctccaggcaagaatactggagtgggttaccatgccctccttcagaggatcttcccaacccagggatcaaacctaggtctcctgcaccacaggcagcttctttactatctgagccactactttcatagtagtttgcaattatgtgacatttgcttgcacctttaggggtgtgtgtgggtgtgtgcaggtgcatatgtgtacatgtttgtggaggggagggtgggtagatgtgattatacatccaggaggaaaatattattacttaatgagtgctcactacctgccaacccctgagttgcgttacatgcatcttacttctcacagttaccctcatgaggtagatatcgttatccctataataggcaaggaagccaaagctggggacctgataagccatattactttcttctttttctgtcccagctggaagctggccactcaggccggttggagaaaactgaagatctatggctaaaggttcggaaagatcatgctccccgcctggcacgcctttcgctggaaagccgttctttacaggatgtcttactgcatcgtgagtccttacttttcccctaggaaatgggaggaggcttctggatacctaacatcctcaggcccaacctcggagaatctcactgtctaaagcttgcaaagctgtctaaacatctactatttttgagtttctgatgaagtctgcttggtcctgctgtttatatagttcagataacacaaccgcagtttatttaaattaaagcagttaggttactactggtttacaaaacatccacatttcttcccctggcatagttctgacttcctgcttctaagcaggtccgtgtctgagaatcttaagagtcagttgcccagcaagttcacatccttccggccttatctctgtcccttacaggtaaacctaaactggggcaggagctgggccggggccagtacggcgtggtgtacctgtgtgacaactgggggggccacttcccttgtgccctcaagtcggttgtccctccagatgagaagcactggaatgacctagctttggagttccactacatgaggtaagttctggtctcagtcagctttgtggagaacagttcttctagagaagaaccgagaaacctcgtataaatgttgtaccaagagatacagtgtgccctgtctctccattccatgtctcacagtgttgtagccagtatttcggtgtcaggtccagaagtgtgctctcttccaggcctttactcctttccctgccgtttccccccatcctgattcttagacacatccttatatttgcctttcttctttagtcctcaaggcctgtcccctttcagattctatcattctctgtccttgttagagaggccattctctttgccctctctctgtcctgagggccatgactctgggcctggactaagcatggtcccctgtggtgacgtgctactccagggtagcacctaggtactccagcccaggcccctctgctcctcaccaggtctctgccaaagcatgagcgcttggtggatctgcacggctctgtcatcgactacagctacggcggtggctccagcgttgctgtgctgctcgtcatggagcgcctgcaccgggacctctatgcgggactgaaggtgcggggccagcgggggcccagcgcgggggcagcgggggccagtgggggccagcgggggccagcgggggcagccggcagccaggttcccaggctcctttccggcccttcctcccttcttcctgactcagagcctctgactctcagaagacattcgtagagtaatcacacctaaaaaatgtctcagaagttgttttttggccccatttaatatctagaatattggaattcgctatttttacctattgtggtaatagtaaaaatctagactacacagagaagcagaaaagcttcctataactctactattctttctctttttttgttctctgtgaattaaaccagtttttttgtcaacagatatttattagtggttactttgtacaaggccttgtattaagcaacataagaggatatcaaaaaacatagaatttgaaaaatatatatatatatattttggccaggacttaaaaaaacattgtagtcagtgatcatttcatgaacaggtggcatttgggtttgataataccctggtgggtaaaatttgggcagatgctggaaagaagaagttataccaggggaagaaataggctagtacccaggatatgtgaaggacactatgactgtgttggagcaggtggttcatctggggaatagaggggaaacgatatgcaaagaagtgctgggaacaaattacagtagaccaaaactgttaagaattccataaaattcaaattcctttgtagacagtgagaagcaaaagatttcgaacgaaggtaaaaatgttctcagttgaatgctgagttcccctcgtctaaaacagcccccagcagggaaatagggaagtttcttttgtttgtcctctacactggagatagaaaagctaaccccagagtgtctggtaggtttcttctgacaggtgcctctttccccagtttatatggaagctttcagaagtaagacagaagaatcttcagaaatgcttgcaggagccatgagaaaccaaccaaatgaagaaaaggactctccaagtggcttcccttcttcatttcaggggagttaggctcagcaccttgaggtgcttttccataagtgggttagggaaccatgtatgggcttctggataagtgatataacattctccagaattcagaagaccctaacttggaacctggctagatgtaagatgaatgactttggcatttgaatccataaaaccaaacctggactaaccaggcctacagagcaacagaaggaaacctgcctgagagtcctggaaatgctccctctgagtctctgggcagttctagagtttattcagcttagagatgagcccatgccttcaggtgtctggttgtggctctcctggtcacctgtggggctcatccagctgcctcagtgctgcctccaggagacttgctctggcccttgcagcttgcctttccttgctttccctttgtttccctctcctgcctgccttcctcttcccttgtttttatccacttctctgcttgtgtaccctagtgtgcacagtcttctcagtacctcacagaggaactcttggttggtataagccagttgggttgaggagtcatcctcttggtgacacgtaaacccttttgtctccccaaggctgggctggccctggagacccgtttgcagatagccctagatgttgtggagggaatccgcttcctgcacagccaggggcttgtccaccgtgatgtcaaactgaaaaatgtgctggtaagtaagagctgtttccccagggtaactccctgtctctgcgtgtaagtgacctttggaaggaggtacacatacatcagggctcccctagcggctcagatagtaaagaatctgcctgcagcggaggagactcatgtctaggagaggagtcctaggtcgggaagaccccctagaggaaggaacggctattcactccagtatgcttgcctggagaattccacggacagaggagcccggctagctactctccatagggtctcaaagagtcggacacgactgagtgactcatactttcacacataaatataaatttgctcacaggaaaagactggggtgagagtagcacaattcacagcagaatagatggatggtatcttggacttgcagcttagggaagaattgcatcataggtctagcttatattgcttaaggttttttctcctaaccctggtgagaaaatttaaacttacagagaagctaaaaaagtggtatgatgaagacccacatactgctcattcagattcatattctctctcctagtgtggctgtctttgtctctgtctctctctccacctgcatatgcacacacattttttactaaactgtatgagagtaagttgcagataaaggtctgcttctagggaattccctggtggtccatggctaagactctgtgctcccaatgcaggaggcccaggttcgatccctggtcagggatcctggattcacataattgcaactaagcgttctcgtgttgcaactagagactgcacaccacaacaaagactgaagctcccaagtgctgcagccaaggctgggagcagctaaactgacttaaaataagctttgcttccaaataccttggcttgtattgcttaagggaaagagattcttcacatgattaaaatgccgttatcggggcttccttggtggctcagtggtgaagaacccgcctgccaatgcaggagacactagaggagtgggttcgatccctgagttgggaagatcccctggaggaggaaatggcaaccccctccagtattcttgcctgggaaatcccatggacagaggagcctggcaggcttcagtccatggggtcataaagagttggacaggactgatatgcagagtacattatgagaaatgctggaagaagcacaagctggagtcaagattgctgggagaaatatcagtcacctcagatatgcagatgacactacccttacggcagaaagtgaagaggaactaaaaagcctcttgatgaaagtgaaggaggagagtgaaaaagttggcttaaagctcaacattcagaattgtgttcgcagccaccgccgcaccaccatcgctctccaacgccagcgccgcctctagctcgccgagctccagccaaaggagaagggggttaagtaaggaggtctctataccatggctcgtacaaagcagactgcccgcaaatcgacctgtggttaaagcaccgagcaagcaactcgctacaaaagcctctctcaagagtgcgccctctactggaggggtgaagaaacctcatcattacaggcctggtactgtggcactccgtgaaattagacgttatcagaagtccactgaacttctgatttgcaaacttcccttccagcgtctggtgcgggaaattgctcaggacttcaaaacagatctgcgcttctagagggcagctttgcaggaggcaagtgaggcctatctggttggcctttttgaagacaccaacctatgtggtatccatgccaaacgtgtaacagttatgccaaaagacatccagctagcaagctgcatacatggagaacgtgcttaagaatccactgtgatgggaaacatttcattcttaaaaaaaaaattctcttcttcctgttattggtagttctgaatgttagatattttttttccatggggtcaaaaggtacctaagtatatgattgcaagtggaaaataggggacagaaatcaggtattggcagtttttccattttcatttgtgtgaatttttaatataaatgcggggacataaagcattaatgaaagtaaagattcagtgaacaagtttcagcagttcaactttataacaattataaataaacctgttaaatttttctggacaatgccagcatttggatttttttaaagcaagtaaattttgtattgactgcaactaagtggagtttggagcatttttatcatgcagtagattccgtccactcactttacttctctaactgagttgtcctacatgcaagcacatgttttcaatgttgtctgtctgctgtgctgttcctgtaagtttgctattaaaagacattaaactatataaaaaaaaaaaaaaacattcagaatacgaacatcatggcatctggtcccatcacttcatggcaaatagatggggaaacgtggaaacagtgtcagactttattttttggggctccaaagtcactacagatggtgactgcagcatgaaattaaaagatgcttactgcttggaagaaaagttatgaccaacctagatagcatattgaaaagcagagaccttactttgccaacagaggtccgtctagtcaaggctatggtttttccagtggtcatgtatggatgtgagagtgggactgtgaagaaagctgagtgccgaagaattgatgtttttgaactgtggtgttgagaagactctggagagtcccttggactgcaaggagatccaaccagtccattctaaaggagatcagccctgggtgttctttggaaggaatgatgctgaagctccagtactttggccacctcatgcgaagagttgactcattggaaaagactctgatgctgggagggattgggggctggaggagaaggggacgacagaggatgagatggctggatggcatcaccgactcaatggacgtgagtctgagcaaactccgggagttgttgatggacagggaggcctggcgtgctgcgattcatggggtcgcagagagtcggacacgactgagcaactgaactgagcacagtacagttacagttacataaagatttataacattgtgttagtttctggtattaaaatgattccattctacatatctgtattcttttatcatattcttagcaattttatgcctttacaagatactgaaaatagttccctgtgctataaacattgttgattatctgttttatatgtatagtttgtatgtgctaatcccaaactcctaatttatcgctctgccaccccgttcccctttggtagccacaaatttgctttccacgtctttgaatctgcttctgttttgtaagtgagttcatctttgtcgtgtgttagattccacacagcagtggcatcatatgctggtctttctctgtctggccgatttctctccttttggtaatctctaggtccatccatggcgctgcaaatggcatcattccattctcttttatggctgagttatattccattatatatacatacagttgcttctttattcctctgagacatagatttccttaggaaaggaaacttgagggtgtcaaagaagcgctcagctgaccaaaggacctcaaccttcttacgtatcaactttctgccctgggttctggaggtcagaggagaataatcaggaactgaaacactttccttgtgtccttcccttactcattcttccaagatttgctaagctcctgatgcgtgccaggcactatgcaatatgctggggacacaaagatgaaaagacagtccttgcgccaggttgcttgtggtctagggagaaggaggaatgggagtggatctggaggcggggaggctggaggcagagctgatgaagtgctgctctgaggtagatgcctacttttgagcttgggtatgcagttgagcactgtgtgcaggaccaggcatagggtgactgtcatcctgctttgtcggcagttggacaagcagaaccgtgccaagatcacggacttaggattctgcaagccagaggccatgatgtcaggcagcattgtggggacgccaatccatatggcccctgagcttttcacaggtaagccggagggtggggagtgggtttgggcagagctgtgtattttaaccaagtgctacccttcggactaggtgatacccacaagtactactggcagttctggtacaggcaggggagaaaccagaacaggagaaacccaagacaagtagggagaaaaaggaagaggtaaaggagcaagaaagacagttataaatgggaatccccagctatcttttggctgtctctctaggctgttagtgccataattgccatagtcaatcaattatttaatcagaaagtattgataaagtcagaaatagaaaaatatcgtatattaacacatatattacagaatctggaaaaatgatactgatgaacctatttgaagggcaggaatagagatgcagatgaagagaatggacttgtggacacagcaggggaaggagaaggtggaatgaattaagagagtttcactgacatagatacactgccatgtgtaaaatagatggctagtaggaagctgctcgggcttcccggtggctcagtggggaggaatccgcttcccaatgcagaagagtcgagtttgctccctgggtcagggagactccctgaagaaggagatggcagcccactccagtattctcgcctggagaatcgcatggagcctgacgtgttacagtccatggggtcgcaaagagtcggccaaggctgagcgacagcattaggatccggagttagttggacacactaactacagtgtactaactgtagttttacacacatcgaaaagaagtagacagtcatcatttttctttccctgactttaaaaaaattgctgttcccacttctattatttgatcttggctacttccatatttaaactcctttgattgtttctactgcagttcatcctactgttgtaaaagtaatctttctaaagtattactttcttcatgttacctcctgctctaaagcataaatgaccccttctccccaccgaatccagactatctgattttaaatatctttatgttctggttccaacctatttacccacctgtattttccaattttatttccctaatatgacctttcaggattaatctttttgacagtcccattaaaattaaaggcctgttttccttcttctttgtcaggttctagttttggttctcttaatctttgaccctcccagtcccataattgttcatactataaaatgagcattataaatgtgtcctttctaacagggttgttataagagataatggatagcaaaggcttttgataaaagtgtgaaaaggcctccactgatgcaggtgagtgtgatgctgttgattccctccctgctcactacttgtcaccctttcttgctgcagggaagtatgataattctgtggatgtctacgctttcggcattctcttctggtatatctgctcaggctctgtcaagctccctgaggcatttgagaggtgtgccagcaaagaccatctctggaacaatgtgcggagaggtaagagccacgagccctgcttcaccgactcccctggcgggagcacgctaaaaccccctgctcccgcagcacctcccgtcccctgctctggccactccacagcatgacctcatacacgtttaaaccatcgtggaatccagaaaagacatttaagtccaacctttccttccaggcagcatggttctgaattctcagaaaggctttttttctttaaaatgtctaattcttcagcttcctatgcaggtatattccagtttttcatcactgttactattaagttctaacctagataactgcagctgaagccaaagcttattgcatcgtttaacatcctgagccccaactgggtaattgatcagagctgatcatgcctctttgttgtgtcggtcccttctcgctgcctctggtcttatttcgatgctctgttctctaggggcccgtccagaacgccttcctgtgtttgatgaggagtgctggcagctgatggaagcctgttgggatggtgacccctctcagagacctctcttgggcattgtccagcctatgctccagggcatcatggaccggctatgcaagtcacattctgagaggccaaacagaggactcgatgattctacttgacagcagagacctttctctttcactcttttttttccttcccctcaccttttggctatgggaagaatttgacatttattcattacagagagctcccaaggggactgatgcttgctgggaaacttgagacgctcccaggcagagatgactcccagatagtgaagagttggcatatcccgcagtcccctgtacccaagctgtttctttagccaaaaaaaaaatcagcataaatctcttctgaatgaaatttcaagaaaagtcatccacagttcccttttccagactgtcttttagctccagctgtaatcaggactctgtgcttccattgtggagcccacattcccaacattctttgaagccttagtagttcatactcctgtttacacacgggaggttaggtttttctctgcccagagccacttttcagtttatcccctgtggcctagtttgctctcagacattagtttgctagcagatgccccatattttttgcctgagtaggaagaagcaagggaggggctaatgcttagtaaggagatgggtggttacagttcattttttaaaaagtattccaagaaaaggtgcaaaatattcctgaaagtctccatgctagccatagtccagatgtagatatttggaagtgttatttaaacactcagcaggctgagtacaggaatacatatgtataacatgtgtttatactttgcttttgtttaataacagtgtccactaattttgggttctttattccttggcaccattatttaagtgatggaatgccatgaaatgtactgtattgtatattacttgggaagacactagatattcaaagaagtctggcagtacttgggctgtagagggctccacaagaccaaagtcttgaagatcttacctcctcgctttggttgtctgtgctcccacatgatgaggtgagattgtggctggggtaggaggaagggtggagagaagaattatccttactgtgttccctccttcttaccacctgaattagggaaattcacctcagcctgaaactgaccacctggccacttttaatgcgcttgaagtctggtcccttctgttgcttcagaactggctgaggaaccttcctgccaagcagtcaggagacacagcggggcctgggcctccagagtagctgccgtggccgagggagctggcagccaggttggtctgggcagacggaggggtgcacgttggggtagatttccctagacatgccctagttccctggatcctctgcagagaggggctcattgagcaaaagccattcccttctctggaaaggagggctgtgctggttcttcccagaccaaagaagtcatttgtgactcccatcagttttaaagggacagaacctaggcagcagcttatcctaattgttaacactaaaaagagtgaaagggaaggctatattactgccacagatagaaatgggggactgtacaactcagctcctacctgtcagctctccattgcatttttttttttttttttttgcatttttgcttgagctgccaaagaggtatcgagaaagtttttccctgatcggagaagtggtttggggtagcagggctgcaaagtgataactgcactgaacgacactttattttttggcttattatttagcactgagaagccaagggggttggtgattgtaatagcactttggggaatagactccccctggccttgctttggagagaaggcatgtgtggtattccatctgactagtcaggaagttcatactgcatcagagtgggataaatggccctccaagagtcccattgccaagagagtagttgctttctttgagttttcaaagcttgatttttggatttgctggatcaaataacccactttttctttaaaagaaaaaaagagggtttatccttctaaatatgagggtggggtgggttagggctagtgggtgcttaagtgggttaggtgggagtaaccttgagaaacttgtatggcaaactcccttggggattttaaatagcactactgttcttaaaacggttttatttttaactttatctgctttgttaacatccagtccaactgagctgatagaaaacagactgtgtgtgaatacctgacattggaaactggtctggatagcttgttgtcttttgtctttatgtaatgtttttgtgtgtttgttttaaaggactaatgtttattattacagtgttaaataaaagtgtaatatactaaatatgtagaataaaagtgcaataacaagagaaaattactcgggcacaaactccagttcttacactctctcccctcttgtgctcccagtctctatccataatattgttacagcaggacagtgttaattgtgtatatttttaagccatgcaactatgggttaagtcttcatttagtgtaattttgaatggctggacttggttttatagagtgtgcttctgggatgcacacacaccagatgtgctgtataataaagatcacattaacattttaggtttacatctatttggcttttgttttcccttccctcgctatgtctgctggatgctccctattccattccatttccactgggctcctagaggtctttcagtttgccgtaaagattgaccgaacatgctactcttccccatggatcgctcccagtccctcggcacttgacatgaccagagggtggggcccaggaaggggaggtaggacagcagagaagggggaaaagtgcagtgatagcaatttatttttcagagcctctcctgggttcacacccttggcaccagcgtctcttcagcaggaacttggcaacattctaaactcgtgcacaagcttggctactctttattacactctgagacatttggggcatggcatacaaatatgggcctctctgcatttggaatatttgaacttctttttaggctcaagctgctcttcagatttgcttccttggcagtgcccaatggacaccatcataggcctctaccagcaag

SEQ ID NO: 62 - DNA, 101738 bp, Hippotragus equinus
  source 1..101738: mol_type = genomic DNA
tccaaggtcagagccagtgggctcagatcctggaacctgagcccaggagagtgtccgcgacaggtccactccctcaaggaaccgctgaatgtaaagcattctttgacgcggccgcttctattttaaaaaggaaaggcacccggcctggctcgggcgagaacaaggcgtcagagcgcccggcagtctccgccggcagggaaggaccgcccccttttcctgcagcccgagccggcgcgccccactgcggctgcgcgggccggcgtggggcggggcgggaacgcggaaggggccgcgccgcggggacgagcaagggcggggggcggggccggccgcgggggcgagcaagagcggggcgggaacgcggaaaggtcgcgccgcacaggcgagcaagggcggggttgggggcggggacgcggaggggacgcggaagggccgcgccgcggggacgagcaagggcagggggcggggccggccgcggggacgagcaagggcggggggcggggacgcggaagggccgcgccgcggggacgagcaagggcggggggcggggccggccgggccgcggggcgtgaggtgacaggtgaggggggcggtggtggcctgagcagtggagacgcggcggcgatgctggagaccctgcgcgagcggctgctgagcgtgcagcaggatttcacctccgggtgggtacacggtgggggacggaaaggggcccgcacggccgggccggggagccggggtctcatctcgcgcccgccactcccctcacccaaccccgggcctcccatccgcgcccgggcggggacagtagccaactttccggcgtcggcccggccgcacgaagtaacttaggtcccgccgggcaggctcagacccgcgcgccggggcggggagcgggtccggaaggctgcgggcggcctaagggtcgggcgacccttccccggcagatccggcccgtccgagagtggtcgggtgagaggcgagcgcgccccctccccaacgagggccggcgaccctgcgccctctcccacgccgccgagacccctgcaggctcgggccgccaccccctccagaccgccggggcccggcgggcgttttgtccgcccccgcgcgcggaggctgagcgccttttcttccccttttgatttctctctctacctcgggttcagcgcctcaatgaagaaactctcgggccagagaaacgccagaactggcgatcctgttcatgccctagtggtgacacgcacgcggacctagcggttcccgaactttgcttggaatctcctggcaaccatcccggtgcgtgcccgggtggcaaaggctaccagctacaccaggctgaggatgggggttcgaaagaccacccccgcccaggtgattccagtttggcgtagactctaacgccaggggccctgggatcttacctctatctaccacttaagccaacgcgtttctgcaagtttctctgcctcactctctgcgaccagtaaaacaacggggatgatgaagatggttctcatctcacagggttattgtgaggatgaatgaactaacgtgtaaaacgcactcacgttgcgtcactgttgttattagtgcttaattcaagttttccatttcttcccaaagggtgtcactttgataaaggatgctctgtcccctttagattacggatccgttgacgaaagctctgcctatgagggcctctccgtcatgttcttacgtttctgatgagaaagatgttagctacagttgtgtcttagtggacaaaaatgtttatatggtttgcctcttaggtgctgagtagtaacattggagaaggaaatggcaacccactccagtgttcttgcctggagaatcccagggacgggggagcccggtgggctgccgtctatggggtcgcacacgactgaagcgacttagcagcagcagcagtaacagacaggcaaatacttgagcacttacatgtaaagcatttttggtggtcttggtttggggtccttacgaatgttaattgtagatgtcctaggagtcattgattggccctgtgcttgattggttgcatgcttgattccctgtccccccccccttttaaatttaaaaactaacttattttcagaatgtaaatttttgaaactttcgggtataatgctgcaatggtagcaggagaacagtacgtcgcagataagcccatctggtacagtcctcctgtcattacctcaagaaattcattgatgagtaacagtctatcttctgagagttacagccgctgaaactttacaggtcaggtggttgcctctgaacccattcattctttgaactttgctcgagaaggttcaactcaccttggaatatggattctgccagaccatcctgggagatctggaaaacctgagttgagggttgagttacagataagggtggaggggatctggttagaacgccttcttgaaaactgaatttacctgaagcatgacggaaactggggccagtttgggataggaaatcctgagaaggcttccattctgtgaaggcccttcatgagcttccttgtacaggtcactctgagacgacaagccactggaccagcagtgtgtgccatgagcctgtcacctggcagagaaatcactcctgctcaagatgaaattaaacacggcagtacatgtatattgcatgaaggcactgagggattcagagatgaaagcaatatggcccttgcctctcaaaactaccagactggacctaacattcctttagaacacttgctattggtgcccatagacgccagagcagctggcttacaaaataactggaacatctaccattagggttgccctcggaactcagtaggggaaaggtgggtgcttccctgagctctttcactgtggagcttcaccttagcccagagcaacagcctgtcttcagagacttttctgctcatttttagtttctggaaattcatataactggagctgaaacataggcagtttactgtttttcaagtataataggaatattctttatcaggctcagaagagaatgccactgctactgctgctaagtcgcttcagttgtgtccaactctgtacaaccccatagatggcagcccaccaggctcccccgttcctgggattctccaggcaagaacactggagtgggttgccatttccttctccaatgcatgaaagtgaaaagtgaaagtgaagttgctcagtcgtgcccaacttcccgaccccatggactgcagcccaccaggctcctccatccatgggattttccaggcaagagtactggagtgggttgccattgcccctccgggagaatgccacattagtggttaaagcgtgtgtgaacactgaatttcaaccttccattcaaacttaggaaaaagtcagcttcaagggactgtaggttgtccatggactcaagatcttttttcatcaaatttcattcatcataatagttacatcaaagtcaaaataagcctagaaattatgttgctttccttgtgggctaactgggcggttatctggtgcaggggctgagggacagacgggactggctcccagcttcactgtctgcccctcgcctacatgcatcctcacctgggtttatgtccctcggagctctgggagccttttggagagttcacagagaacctctgctctttaaggactggcttgaactctgagggaaactttgggacacactgcagcactttcttcaaatctgctctggtctttgatttaaaaaaaaaaaaaaccttcaaaaaaaaaaaaaaccttcagagaagttatgacccacagcctgaggattgatgtattcaggcttgcaaaccccttcaggaaagtgaaaatcagatttaccaagggtttacagctgcctgtcactggctggcatttcctgtctgtaatgctctgggtgcttttggatagggaggaatagaagttcacagttgttacttgttgcaactagacagtgggtgtttccttctctctggtcagaggccccctctgccctgacctcgggccctgcctgctgtgctcatttctcttctcctctccggtagtatcgtaacctcaaaggagagcatccaacagtccagtttacagtgaggtttaatgctggctcttccttgactgagtgagtgatgttgctcaattgtgtccagctctttgcaaccccatggactatagcctaccacactcctccatccatgggattttccaggcaagagtactggagtgggttgcctttccttctccagaggttcttcccaacccagggattgaacctgggtctttcacagtgtaggcagacgctttaccgtctgagctaccagggaagtccaatcaacttccttgattacttaccttttaatataaacagggaaaaaaaccttaatattcaatttgacttattactgagttcctaccaagtgtcagacaccagtctaggaagtcaaagtcttatcatagaagtttttttcattttattttaaaaaaaagataggaggccacatgcccagttttgcctgctctttgccagtgtctgtgtgtttagccagatcctggagctacaagcttgacaaaaactgtgtctgctctccaaatgccctagcctggcgataacacaaagcaaagcagaaggaagtgaacgtggaagatacaggtgatatggattgtgagctcagaggagtcattagttgagatgcttcaaagaagagctgacttctagactggcctggaagaatgaggagagatgaggctagatttggctgagggatttcagagatgaaactcttgtgggagaggaacctggaatggaagtttagtgtctgataatagagcgtcatcagtgctttgcaaattaattcatttagaaaatatttattgagcacttacctgttgatggggcttccctagtagctgacatgctattgcaatatgcctgcaatgcaggagacccaggttcagtcactgagttgggaagacctgttgcagaagacaatggctaccccctccagcattcttgcctggagaattccatggacagagggacctggtgggctggagtccatgggggtcacaaagattcagatgcaagtgagcagctaacacttaacacctgttgatgagtactagggttacagcagagaatgcacaccagacagcaaataatggccctgcccacactcgactggctgctgctgctaagttgcttcagtcgtgtccgactctgtgcgaccccatagacggcagcccatcacgctcccctgtccctgggattctccaggcaagaacactggagtgggttgccatttccttctccaatgcaggaaagtgaaaagtgaaagtgaagtcgctcagttgtgttcgactctcagcgactccatggactgcagcctcccaggctcctccatccatgggatcttccaggcaagagtactggagtggggtgccattgccttctccgactcgactggcaggaggccgaaaatctagaaggtcagtagtactcttgctgaaaacaaagcaggttcaggggttgggtggggctgggaggattgctgtcttatataggatggtcatggcttattattaggttgaataatcttctgaaggtttttgtggaggggagcagcctgagcctacttgtatttgtggaagaataatttgagaggcagggtgatgggaggactacagatgggaaacggaggttatttaggaggctgtagttatggagcagatgagagatgatgaaaaggcagtgctggtggaaatttgacagaaggaataatgacagacactggtcgatttcattaaaaaatgagactagcaagtgaaaaaaggtggagaaattgaggatctcaattttggagtatcttagatagtgatgtcgtttaccaacagagacgctgaggagctttgagagagaaggagcagttgacagggagtgtgtctcgaagtccaagaagcagcaggaaattcagggaacactgaggaaagaggtcaggaccgactgggtgcattctagagtgattaggatagagacagcgtacagtcctctccccttcctgagtctgtgacttttccgtgagtctctcagccgccagagctttgtggtcctgtgcacttttaggtgtgattgatgcttttgtgtttcctgattttgagttttttaaaaaaaagttaatggggaaaatataatagattggatttgtattcataaatagaatttaaattcaaaataatagaggcgtgaaaatgttataggacaaaatatgctaatacatgttgtggtgttttaaagcagtcaccctggcctttcataatagctgatgggcttagatgagtagaacattgaagtgcaaataagtggaatgccatcgaggtcccccatcccatcgagtcaggcccagaaagccatttcctgctcagcagtcattgccgagctccacctttcattctgtgaaactactttttaagctttttgtctaagaggttttgctagttatctccatttctcaagaagatgtctccatcttagtattttccgtaaagcttaaagaaaatgaatgtgctatggttaaacaaaggtcagtctttgaaacaatctcaaaatattgtagcatgatgatgaatttgaaagcaagtgtttcggactctgaagcgcacgttggttgctttcagtgggaaacaattgagaggtggctcacttcgaagtctgtgtgtgaacacactcacgcagtggcacgcctgtctctctgaggctgtgctgtgttgggaagaaggctaggaacggaggagaagccttttatgggaactggtggattgggggatctctgttttattttaccttggccctgtaatgtacatagctgctttcttgatggtgaccatttttattatacttggtgatcatttttattatactttttgtttgaattgcctctgtaatttacagttacagcctgctgccagagtcatattcggaatttcctttaattcttgtggcaaatcattatggtcagtataatacttctattttatggtttaggaaactggggaattgcactcagaccagtatttccttctcggcgtggcaagacactgtgggacttgattaatgggttgtttccagcccagaatcactgtgagaaacttaagagttctccccagataaaaatggtaagctcctgccagttgaattctgggtttggagtatgtacttcagaaaggacctttttgcttttgggaagattacttgttacattttcaacttaaaaagtgttacattgactatatttatcctttccttaatttttttcactgtttccaactttcttcttgctactttgttttctccagcagtttctattctgaatgtggcatattgatgatttacatggaaaggtgtgataagaaaagatgaatgtctacaagactgttttttgttatgaaaacttaaaaaaaattttttaaatctattatttggctgtgctgggtgttactgtgcgagctcttctctagttgcggcaagcagaggctactctcaagttgcacgggcttctcattgaggtggcttctcttgtggttcctgggctctagagcataggctcagtagttgtggtgcgtggactgagttgttgcggctcccgggctctagagcgcaggctcagtagttgtggcgcatggatgtagttgtcccatagcatgtgggatctttccagaccaggaatcaaacccgtgtctccagcattggcaggcggattcttaaccactgagtcaccagggaaacccccaaacttttttttaacaatgttttaaacatttacaaaaatatatacagtgagccccatatatacattattcatataaaatagttaattattgtcacatttactcaggctctcccttatttatagagtatgagctttcctggaggctcagatggtaaagaatccacctgcagttcagaagacctggattcaatccctgggttggaaagatcccctggaggagggcatggcagcccactccagtattcttgcctggagaatcctgtggacagaggagcctggtgggctacagtccataggatctcaaagactcggacatgactgagtgactaacattgtttatagagtaaacctcagacttagttctcacctctctcataaatcaattttcatctaaaaaaaaaatacgttatataaatgcaatgccaatatcatacctaacaaaattaatactaattctatattatcaattatccagtccataatcaaatttcctggttcttaaaagtatctttttacagttgatttgttcaaatccagatcaaataagttccacacattatagttggttaaaaaccaatttttaaagcagatggctgttaaggagccacctggggaagcttacacacccttccaataattttagtttcagctccctgtaagctttctcttttctgtttcattccaaaccaattttttctttcttttggggaagtgtggaggagaaccccaaatttgatacattacaattgagaatttacagtttttttcagaaataaatgtttgaaatactaacctagagattttctcagtgttataatgaatggtccaaagatgatcttagcagtttgcttcaatatccttgttaccatatgaattgtcccaaatcactgaaaataatactgtaatgcactgctgtgtccatttgttctagtacagttctacctgaaatgtcacaaccaagtgcctttctcagattttggagtggaaatggttgaatggctgtcaaaataactttcttgagctgttgcttaatcttagtttaaactggatttactggtttccaagctaaactcgaaatttgttattgtttttctaggacaggtaagactttataaattcagcttatctggagagatgtctacacatagtttcgtattaaagagattgctaggtcttttttttaaaaaaacattgtagaggaattgatctcatcaatattttagtttttgaaaaaaagcatagaataatataaaaaaaagtcttggtgtgaaattgatactacaacttgttgaaaaatgggggccactctcttttttctgatgtttccagaatagtgaggcttctttagtccagtcatatttaggaagtgtttctagaaaagggatttggggcaagaaaaatataaaatggcatttgatactggaagtccctttctggttttgagctaggcaccatcgaccaaaaagttggacgactctgtcaggcgtacacgtacagctgtgcacagcagagggttgggcattctaggagagtcagcccgtgtgctaggacagggcgactcggctggtgcgctgggacagggcgactcagctggtgtgctgggacagcttctggcaggttgcagtagagcacgtgaggaggcagctcctgtgcccgctttaggaaggctttgtggggctagctggggtactgtggcctgtgcttcagactctgtttagaagtgaatatttgtagaagtaatcagattaagaagaacatgtccagatgtcttcattgtatgtgggaatatctcataattgagttctcactttttgactgttatatgatagagtccaagtcagaagtagggaaaaatgggctggtgaagttaaaaaaaaaaaaaatatatatatatatatatatataaaatacaaagtttatgaccttcatattttacatatagaaaagcttatttttcttacatatgcatttttagcccatttattttttccagcccaataatttaaaaaagcaaatagaaggggagtagagcgacttcactttcacttttcactttcatgcattggagaaggaaattggcaacacgctccagtgttcttgcctggagaatcctagggactgtggagcctgattggctgccgtttatggggtctcacagagtcggagatgactgaagtgagacagcagcagcagcaggcggcttcccaggtggcactagtagtaaaaaaacaaacaaaaacaaacaaacaaaaaaaacccctgcgtgccaatgcaggagacatataagatgcgggttcgatcactgggatgggaagatcctctggaggaggacacggcaacccactccagtattcttgtctggagaatcccatggacagaggagcctggcaggttacagtccatacggtcgcaaagagtcactgaaacgacttagcactcacgcaggctgctatagttgaatggctagcagaagcagtaagtagtagctgatacgatgaccagtggtagagacggaaaatttaaatttttaaaaaactgttacaggatcctgaacagactcccaaaaccactgtagattggtttcaggttggcaaatgacgaggcattcctagctcagaaacatctaaggaatgtactgttttgttatgaaatgcagtcagtggtgttcatgataatgaccctagattatcagaaaatgtgccaactcctctttaatgaaagaggtttttaatgtattttagaaactttttatcaatagctaaaattgctcagaatgttggcacttagagagtgagtgcttagtatagtatcactttaaaatgtgttggttagacaaagaaaacagacttatggacatagagggggctgggtggagttggggggagaagagggtggaacagatggagagagtagcgtggaaacatacacttcgatatgtaaaatagctagccacggggaatttgctgtatgactcggagaactcaaaccacggcctctgtaacgacctagagggctgagatggggtgggaggttggagggaggttcaggagggagaggacatgtgtatacttacggctgattcatgttgatatatagaagaaaccaacatgatactgtaaagcaatgatccttcaagtaaaaataaattttgtaaaatgtgctgcttagatagtattattactgatcaagttcacatttgctgtaaattttccacttgtgtcttatgtacagtacacaaatgtttgttgtctgtagaggtgcttaattctttcttaaaaaagtattgacttccaaccagaaattttaccagctatgaaatttgcatttgaaaatttcttaaattgtaaaaatgtgatattttatactggttgaattataggctgaagactttaagcgacaagtcaagagaagctaaagtaaaaaacaaacccaggtaagcatgtgctgttttaatttactatgacttaaatttcatacaatttttggttatagtcatgatactgtaattaatgtattttacatctgttgcatgcatctgactaaacagtttactgattctttctaaattttctaacactggaaatttctctgataaaattgtaaaatggttgaaaaagtgacaggtaattgttttactctatgacagtcaatggttatttgatcacaattaatcatttttatttgtatattaagagcaaagtaaaagttctccattattgagaagcaaattattaatgaaacagtacttggcaagtgagcctcttcagctgtgttgtctgttttatatgaaaacactagtattgtgcagtgctttgttcattttttaaaataaataatgcacactactaaatttcactttaaggctagcagggggcacttccctggtgatgcagtgattaagactccacactgacaatgcagggagcacaggttgcatccctggtgagggaactaagatcctgcatgccatttggcacagctgaaaaattttttaaaaacctagagataaggagcttaaagaaattttcttgttagctagaattccgttaaagtgtttattgtattatactgtgctaaaaatctgcagggcaaagtgatggctagtagtatgttgcagtatattaactttggaataggggctttccagtggctcactggtaaagaacccacctgccaaagcaggagaacaggtttgatccctggctcaggaagataccctggagaaggaaatggcaacccactacagtattcttgtctgggaaatcccatggacagaggagcctggtgggctacagtccatagggttgccagggagtcagacacaacttagtgactaaacaacaactttggaataatggtacgtttttctaaaagtttagatcagttgtcattaacgatttaaaaatattccacattgtgattgacagcatcaaaattattgtgtgtaactttttgtaagttggcctaaagcagcatcaatctttaataaaataagtgttttcttttggcaggactgtcccatgtttgccgaagtactctgctggactagaattacttagcaggtaagtgttttcatttaaataaaaaggttatacttctattatctaaaagtgttttataattctagagatagacaccttaaaacaactaaatttttaccttaacatagagattgtgtccctcaggagcttttccatttatttcactgattaatacaaaggccattcagattctgagcatattgatcactattatatatactaatcgataactttatcatatgcttgtattatgtttgtggtttctttgttgcaagaaaactgactctggatttgagtcctcaataattttcttactttgattcttaattttataccatttcttctccaatccatttctgttgatgtgcaagtacatgattttcttagatgacatcaaaagcataagtgacaaagggaaaaaggatgaagtggactttatcaaaattaaaaccttttgctctttaaagaatactattaagaaagtgagagaacaatccatagaaggggagaaaatatttgcaaattatacatcttttgaggtacttgtatctagactataaataactttaataactcaacagtaaaaagacaaacaacccagtgaagaaataggcaaatgatttgaatagacatttctgtaaaatgatgggcaaatggtgaataagcgcatgaagaaattctcaacatcgttagtcacaaggggaagggcaaaccacaaccgcagtgagataccactcatacccactagcatgcctataatccagaagacaaacaacaagtgttggcaaagatgtggaggagttagaacccttatggtcttctggtgggagtgtaaaatggcacagctgctgtgaaaaacagtttgttagttttctcaaaaagttaagagtagaattaccatgtgatccagcaaattcacaccaaaagaattgaaaacttacgtttatgtcaaaatttgcacacaaatgtgcataataggagtatctttcattcaggctcccctgtccatggggattctccaggctaggatactggagtgggttccatgccctcctccaggggatcttcccaacccagggatcgaacccaggtctcccacattgcaggcgaattctttaccacctgagccatgggggaagcccagtttcattcataaagcaatatcattcataatagccaaaaagtagaaacagcacaaatattcatcaaaggatgaatgaataatttggtgtctccacacaatggaacattattcagccacaagatggaacgaagtgctgaggcacactacatcttgcacatcttgaataaaacttaaaaacattgcactaaatgcgaggattgaacaaaaaaggcacatagtatatggttctattgatatgatatgtccggaacaggcagaaggatagtgtttgccaagatttggagaagagaggggaatgagtaatgactgctaatggatatggggtttgttttcaggatgatgaaatgttttggaatcagtggtgatagttgccccaactctgtgaatatgctgtgaattatgcactctaaaaacatgaatgttatgctttaaattaaaactcagctgttaggaaaataagtgtatggtttgcacgtgttgttatctgcagttctgtatctagtgacgtggcatctgatggctaagtggtagccgtgtgtgcagtagaaggtacgctccttcgccttatctgcgtgtgtcatggcccaatcatctatgcctgcccattgctttccattttctagctttatattcagtttctttttatgcttgctgaatctgggcatttttttttttccttctctagttgcttaatttgacattaatttcctgcttgttctttgttgagtgaggaacacaagtgattttgaaaggaggtagaatacaaatcaatccgtagtatactgtttgcatgttatttttgtacttttttaatctagtgatttagttgaaacagcttcattgaaagttgcttatttcagaggtgtagacttctctgtgtggtagttttggggtagttttggggactttatctgaaaaatttacagccatatctataatgtgtctattcattgcactgaaacagtattttctctctgaaactagtgctgagtggaggagagaccattttaaatatctaaatcataaatttttttagattgttaaaatactgtgtagaatacgataacataaaattttgccatcttaaccatttttaagtgtacagctcactaatgtcaaccacattcacattgttgtacatccagtctccaagaggcttttcatcttgcaaacctctgccactggcaaccatcgttctctttttataaatttgactactttaggtaccttttgtaggtggaatcatgcactacttgtcttcttgtgattggcttatttcacttaatatattttcgagtttcagccatatagattataaacatttcctaatttcttccagttttattgagatttaatcggcatacaccactatgtaaccttaagttattgccgcataatgatttgacttacttcatgagatgactgccacagtgaatttagtgagcattcactgtctcatatagataacaaagaaaaaaaaaagtttttcttgtgatgagaactcagaatttattctagcaacttatatatatgaaaactgctagaataaattctgagttctcatcacaagaaaaacatttttttttctttttcttttttatctatatgagatggtgaatgctcactaaattcactgtggcaaacatccctggtgggcttcccttgtggctcagatggtaaagcatctgcctacaatgtgggagacccgggttcgatccctgggtcgggaagttcccctggagaaggaaatggcaacccactccagtattcttgcctggagaatcccatgggcggaggagtctggtaggctacagtccatgaggtcacaaagagtcagacatgactgagccacttcacttcaaggcttgtatgtatctgtttgttcagggtttcagtaacaaagaagccccggctgggtggctgacaagaacaaagaacaagaacatccctggtactcttttatcttacaaactagaagtttgtaccttttcactgccttcattcaattccctgtccctccacctgtggtaaccacaaatctaatctctttttctatttgtttgcttgcttgtgtttgaagtataactgacctacaatactttgttagttcctggtacacaacatagttatttgatatttctgtacattacagtgatcaccgctgtcatcaccactaattcaaaggaagttccttccttcttaaggctgaataatatcctattgtatgaatatgccatattttgcttatagcttcatccattaacggacacaagttgctttgattttttggctgttgtgaataatgctgctatgaacatgggtgtgcaagtatctctctatgacccagctttcagttttttggtggtgtatcctcagaagaggaaatgctgaatcagatggtaattgtacgttaattttttgaagaaacaatatactgttgagcagctgcactattttatattcccctgtgtgtgttagtcgctcagtcgtgtctgactctttgccaccccatggactgcagcccgccaggctcctctgtccacaggattctcaagcaagaatactgcagtgggttgccatttccttctccaggggatcttcccaacccagggatagaatccatgtctcctgcattgcaggcagattctttactatctgagccactagggcagtgcacatttttccagttgccatttctccatattctcaccaaatcttgttttggggtttgctgaggtttttttgtttccattctcattggtgtgaagtggtgtctcatggtggttttgattcagtccatcctaaaggagatcagtcctgggtgttcattggagggactgatgttgaagctgaaacacctgatactttggccacctgatgcagagagctgactcattggaaaagaccctgatgctgggaaagattgagggcaggaggagaaggggatgactgccggggtccagccccggtggatccagggaattcgaagggtggacagagtcggcgaggaaaaaacttatttatttattaatatagaaatataagattagattaagaaacaatagtatagtaggaaaattaagtggagaaagagggctgaataacttggattatgtggaagaccaataaaattccagacaaagaacttgcaccatctacgttgggccactggtactcgcttgaacatctaagggtgcctcgccttaggctccctttcacgcgggtcttaacagccagggcaagtaagtagacttggtgagcctctgcgccccagatgggaattcagcctgaaattaaagtaaagaggaaaaggagggagagggagaaagagagacactggggaaaccagtccagcgattggctccggcccctattgtctagaaaggccttttatacctttttttgattgtacatagagatcaatgggtaatacaaaattatgcagtgttagcagcccagacttttatcaaaaccaggcttttctctctgcatacctaattgtatatatacaagtcttaggtgatttacatcatcttctggccaaaaagggccaattaacattttacagccttttttctgataagggtttgtcaaccagaagacttatttgtgttgatcttcccaaggtctggtgccactctcagaaagcactaaataaagttacattcttacatagcaaggacacaagaggagtgcagtgatatgtaacaaaagaaaagtaattaactcaaaagtctagtgttgctaacatcaaaactactatatatctttttccatatcccgtttacattgattaacatcctcccaggtgcctaaaagataaagaatatggaggcctggcagcagtcattgagtcaacagtgaaaaccctctaccaatataatttttaactctttagaaaaggctctgtatctttaagatgcttttaagttttgtgcctctcacggttggggggctgtaagcaattcacaagctgtaagaggtccggggaacctgttaggcaagctagaagctatcagaggggttttaactgaaacatccctttcaaatgcagaagactaaagctctgagttgactttttccagagaatatcagaagagtggaaaggcagagtacaaaggccggcagatttttgatttggggggtacatgctcaggaaattccagggggacccctgaagtctgatcacgtctttgcgtatgtcagcttccttcctcatgaccttgtcacgggtgggattcctcacgctggctcccggcagacgatagaggatgagatggttggatggcatcaccaacacaatgggcatgggtttgggtgaactccaggagttggtgatggacaaggagccctggcatgctgcaattaatggggtcgccaagagtagggcgcgactgaactgaacgatgatgatggtgagcttctcatgtgcttattggccatttatatatcttctttagagaaatatctattcaaggcctttgcccgtttttggatagagttctttttgttgttgtcgagtgttgggtgttttgtatatattctggatattaatcatttgtcaaatatgtgatttgtatttattttcttccattttattggttgccttttatctgttgattgtattctttgatgcacaaaagtgtctaattttgattgagtccaatttgtttgcctgtgcctttggtgttatatccaagaaatcattaccaaatctaatggcaagaagctcatgttttcttctaaaaattttatagttttggatcttatgtttggattttttgatccatttttatttaatttttgtatatggtgttaagagtccagcttcattcttttgcctatggatatgcagttttcccagcaccagcatatttgttgaaaagactatcctttccccatttaaggatcttggcacacttgtcagttatttgaccgtacatgcaagggtttatttctgggctctatttcattggcctatatgtctcccattatgccagtaccatacttttgattattgtagctttctagtatgttttgaaattaagaagtgtgtgtcttccaactttgttcttctttttaagattattttagcttttcaggatcccttgatattccctgagttttatgatgaatttatgaaaatatcctgtttctcttcatattttcacccactaattttagcatctattacagttcttgcctgaaataattcattgtgtttaccaaatggtgattttctatttttctcatttttttttctatcattatttattggattctactgtaaggaagaggttttcccgtctgccccatttatttatttggttgtttatttaaatcactataagctcatggctgttggttttcatctatgagctctaacccatttctaccattattttttctaccaaatctggtgtcccagatttggcagttagaagccccttcaagttaatgtctgtgtgtttgcagaatgtctccattactttttgagcttttcctttctgagaccacaggttgtattttagataggattttttaatgtgtggcttttattttgaattattattattattatttgctttccttaggtatgaagatacatgggctgcactccacaggagggccaaggaatgtgcaagtgctggagaggtaaagaatcagctcatcttatacttacagggaaaatatacttttgcagtcttaaatgcttatttttaagaaattaaatttataattgtgttaaaatgtttgacaggatatcttaaagtgaattttgtagttgattatgaaacaccctaaataaagcacttttttgtaatttctcagtcaggtaatttagttagcttagagagtttataacttttattctagagtcgcaagtggctctttggttcatcgaggtataatgctttgaatttgaggtctggtacctttgcattttatgtaaattatgtcatttctttctactcactatttaagaattcctttggcggggacaaagtttaactttgctcaagtctacttaaaatcattagtttgcttattagcaaataaatataaaaatctcaggagtcaaccttaatttcttagagaaacaacctattttctagctctatacagtgtgtaatgaataaaagtgacttataattaaaattacttggtatatatacttaaagcttttttagccaagatcaaatattctgctactgatgtcagtcaaactttatttctttctaaaaacacgtctgtgattctgacttttaattaatttaaactgactttaccatttacctgaattagtgaagctgtaatagttacatagaacatggtaatacacatgataaaatttaggcattagtgtttctcttagaaattactggagaaggaaatggcaacccactccagtattcttgcctggagaatcccatggacagaggagcttggtgggctagagtccacgggtcacaaagagtcggacacgactaagcgacttcactttcactttcactttagaaattacggaaaaggaagaatataggcttctgtcagtaggccgactgaatactgtgaaaagtcctgtaagtgtaaaacccttaaatgctggatagatttttttttttttaatttaaatgcagtaagcttacaaaaattaagggaagtcctaaagggccaaaacaagcaaacaaaaacagcagggaactgaaattagagtggttggaaaaaaaacatggaagcagggttcaaatagtaaaacaaatgtcttagtaagatatttattgggataggagatttttgtctatggggaactgagtctgagactcctagactcctagactctagatactcttgctgaaaggataatttaggacatttttaaaaaagaaaagaaaagctacctgttggcaaaaggaggcaataaattctttaaagcacacctggagcacctaaagaatgtactgggccgcaaagcagttctcacaagtttcatgtaaatcaagtcgtacagaatattctgtgattctggtgcaaatgaccctgaaagttggtataggaaaagaattttgaaaaatccgtatgtttgcaaattaaatgtgtatattatgcatcatttacggttcaataattactacatgcatattgtgtaaattgtcaaaaactacttaggaattttatagatgaaaaatagactgaaagtcaatgagctaatgtaacttaagaattagagaacaacaacaaaaaagaattagagaacagaataaatcatgaaggaagaatgaaagagatgataaagatgagagaaataaatgaaatagaatgcaaaaatacaatagacgctagacaaagtcacaagttcttagaagactaataaaatatggtagctatctgattatgttgattaagaaaaaaggacaaatagttttaaggattaaagaatataactgtagctatagcagaaagtgaaaagataagagtttgtgaacaactctaggacacatttgaaaacagaggcaaaatggcaaaatactagacatttttactaaagttttggttgctcagttgtgtccaactctgtgaccccatgaactgtagactgccctccaggctcctctgtccgtggaattccccaggcaagaatactagagtgggtagccattctcttcttcaggggatcctctcaacccaggaatcgaacccgggtctcctgccttgcaggcagattctttattttgtgactcataggggaagcccagaaactcttactaaaactaattctaaaagcggtacaaatcctgaataatgttatagccactaaagaaactgttaataattaatcttttcgctaggaaagcaccaggcccaccaagttatataggagagttctatgagactttcagagaacccaccatctcaatgttagacagacttctgcagcaagtgaaacaagaggaagctgccctgcccattgcatgaggctagaataactgatcctgaaccccaacaagcaaagtatgagaaagtgaaattggagtccagtcccattcgtgagtacagacacaaaaactataaacagagtagaggtatgagctctcacttaacttcagcagcctgtttctggaaatcagatgttctgtgcactctatccaggaacctacttgacacactctaaattggaaaagtcattatctgttacatatcaaccccaagccctccaccagctttcttaaatatttctgtttaaaaccagcaaaacatctctagatggtagcagtttgttaggacatcaggtgcttcagacacagccttccgcctccagacttgtgatgtgcactggttgacacccagctgcctcgtgtgcagtgctgtggcccctcagtacccgcagcgtgcagggcctgcctctccttcacgatgggctccttggcctgtcttgtgattctcatattctgacagtgttgtctgaaatttaatttgagaatcttctcacacattgttttaaaatctatatcaagcttaaatataaagttttcctatataaatatgaaccagaactttgtgtttgctttgtgaatgttggatgataacaaatagcgttctgtctgggaaacaacctgctatatatggctgtgttgacaaactaaatccagccttgcattaaaaaaaaaaaaaaaaaaaaggtttattccaggattgaaaggttgtcttgacattagaaaatcttttatatgcagttgaccatgttaacaaattaagagaaaaatatatgatcatcagatgcagaaaatacattcagtaaaattaattcagagtaaaacattttagcaagtttttaatagttggtaacttttgtcctgctgctgctgctgctaagtcgcttcagtcgtgtctgactctgtgcgaccccatagatggcagcccaccaggctcccccgtccctggaattctccaggcaagaacactggagtgggttgccatttccttctccaatgcatgaaagtgaaaagtgaaagtgaagtcgctcagtcgtgtccgactcgttgcgactccatggactgcaacctaccaggctcctccatccatgggattttccaggcaagaggactggagtgggaacttttgtccttatagctaccaaaacctgcagtatttgacttgtaatgctttgatttcatagtcaatcatcttactaaatcatcttattttgataatttgcatctgggatgggagttttgtgaagatggaagggaagaaacaaaaacataccagtcttttcagttcttcatctctttttgtagtgggtagggcttccaatatagtgttgaataaaagctgaagatcttgggttcagattttagctccatcagatttaaatgtgaaagggaaaactacattttttagaaaatagtggaaaagctaagatctcagggcagagaaaggtttctttaacaaggcataataaacaccaaccataaagtaaaatattgataatttttatcaaatcttctgttcatcaagcagtaccatgagaaagttatgcagttcacaaaacagaggactagggttcaaaaaatatgaaaaacctctgcacactaataaaaaaagggaacagtaagccattaaaaagtgcacgagaggtatgaccagacattaccctgaacaaaaagcatgagtggccagtaaatgtgaaaacatgtttaaaatcaattagaaggcaaggaaatacaaattaaaacctcagatttacactcattagattatcaagcatttaaggagccttgaattttctgtgcagacagtcattattcactgatgacagttttccctcccccagcagcatgatggggaacagctagaactagggggtgtaaatcgattggcacagtgacattagaaaaatgagctggtgtgaagtaaaaattgaaattccacaaagcttttgaaaccacagttctcctagggagatttctgtagcattgtgtccccagctttcccctgtgatgtggtatgtctcatacctccttggataacattggtatggtatcatctgttcattaagtgtgacaaatagatgagaggccttgaggtcagaggtggctaggctgggtgaggtccagctcagttgagccactcggcggtggggagggagggtgcagtgaggagctcgatacctgggacgtgttggaacctaatttgtgaaaattgcctgtgtgcaccagatttgttccagaatgtttatagcaggttttgttgaaacttcagacagtcccaaagtctccctatagggtaatttttatttataggatcagggacttccctggtagtccagtggctggccccacgctcccagtgcagggggcctgggttccatccctgttcatggaaatgctgcaaaaagatcaaatggtgtgcagcagtgaaaattagtgaaccattacacttccatgtatcaatatggatgaatcctacaatgttgagtgaagactgtatcctgtagaggagctttaacaaaaattgttcttttgattgtaagaagcatttcataataaaatatgttggagaaagaatttcctggaagttctgttgctgaatttattatatgggggggaatatataatattttcatagttgtatacttttttattgtaagacccctaaattatcaaaagtgccactattggattccagaaatatagttctcagattgaaaaatgaaaatttattttaaatctctctgacgttgagacatctgtaaattttttaaatgtatatgtttaataaactgttttattgtgtattttttcaggccatgctcatgtgtctttagtggtctttagtcaatgtcagtctgccagggcaaatatacttaaggataattcagtcttctttgacaacttattttatacttaactactttaaagctaattcttatttatagtcttaaaatttagagcaatgttcctttagccaacagtttgttcaatgtagctttgttgtctagactttttctacaagattttttttttttttacaagttctttgatttgtttttcccctcacttagtatgtaaataaacacgtaaattgatagtgacttaggggttggattctgagggtaacgttctaaagttagacttccagtgcattatttgcttatgctttttattgttgtgaaacacttgcttgccttcagattgaactcttttaagactcatgctttaacaacttggtgtgtcagctggttaaatcaggcatgcttcattctccttggattccagcttggatctcttctgcttttggtggggagtggactgaactgggtgtgggaatgcctagtttctgcagtaatacgttttgaccttgggcagataaacggagcctctctgtttctagttgactcacataaaatggtgtaacaccatttaccctgcttagcaaacagagttgtttgaaaatcacatgaactaagtgaaagtgaaagtcgctcagccgtgtctgactctttgcaaccacatggactcatccgtggaattctccaggccagaatactggagtgggtagtctttcccttagccaggggatcttcacaacccagggatcgaacccaggtctccctcattgcaggcagattctttaccaattgagctatcagggaagcattcccccaaaatgctgaactgtttttacaaatataaaagtttttatattgttttattaccccaaaattacccattttgaaaatcacttgggtcccagccttttctttgttctcctaacttcagtgtcttccaggacttttgggatgatttttaactttgggaacaagcccaaactgtgggtttgtcttgctacttaaacttgattttctggtgttaaatctggatttattcagaattgtttacttggaggagaaaaattggccttctcacgatggctccttccttattaagtaaagctaaagtacagtttctcagaaccttttctttcgctccttttcatttttcttccttttgtgtccctgcatacacagtccctagaagattgattaagggcgtgggcttaagtgtcagattcctgggattgaatctaggtcctgtgtggctcttgagaaactgacttgtcttcattgcacctcagtttcttcttctgtaaaatgaatgtaataatattgctctgtttacaaggttgctctgtttttaatgtaaattgcttaacacagggcctggcacatagaaaatgctcaaaatgctttactcttattacataattgttgataatgatttcggagaatccattcaacatcccattcttttaaattaaagtaatatttgaatgtattttgatagattctttttatgtacacttcttatatcctatatacagaatatgattttgaattttgtggaaggcatgaactatactgtttttaagttttaatatttatgtttcattttacttttcagtaataaatattaatatctaaaaattgtttattctagatctttcaaattattgacacaattaaccactgcaattaagatttaacaaactttttaaaagatatgtcgtaaaccaggaaaaataccttttatcatcgtcagccctgtgatacaggaaattattttttcttttattagtgtttaaaaactgaggcttagaggatttgtgagacctactccaaactaaagcacagtttgttttgtttttttcccttttttgttcaccacagtatcttcagtgcctgaaacagagccaggcaaagagcaggtgttcagtaggagcttgttggatattacagatgaatcctatgggcaggggttcttacttcaagccataattttcttactattgcatcacagagaagctgtattagccacattaacctgttagcaatgctcagtactttttaaactgctctctgggatctttataaagctggctggcacaggcatttttaagcatgcagaattgatgaccatgcccctggaggagcacttggtgtcgcctctccagctcagctgaggcttgtgagtgagacggtgtgtgttgctcctccgacgtggactgactgacaacagggagaggggtgaggtgggggtaaagtgaggaaacagggcggctttctgatctctctcttgttcttatttcagtgttgttcaatgttgtgaattcctggaatattaaaatgtagacgctaaaacagtctggcaccacatgcaaatgattttctatcttattttggtgtttttattcctcggaaaggtctttctttagtgagattcagtaaaaatcagttatatttgtgtttcaactcttgaagaatcttcatcatgggttgtgtaaattgtcccttttttatataacttaattgtgaactcttttatattaaaactttatattttacagataaagttcagatatacttccttttgtgatataatgaattttgcagtctttattgtacaaaatgcggaatcttccacacttcttattcatcactagtgatgttttcaaaaaatgacctctctatgctccttccaaatcttatggtaggccctttcccctctcaccatgttaggaccaaaacaaaactgtctgggagaaactgctgtctatcattttctttaagtcttctggaaaagaagtcagaattcttttaggctagcctagcatctcacatccctgctattaggaacctttcacttctgaatttgttagtataaatccttttctcctttttttctgaaattgttcagttgcctcagggattccttcatatacaagtaccatttatcttactttattcagtgaacgttgctgtttaaatggaaactgaatcatggtatattctaaatgcattagggaacttttctttcaaaagaagtccttttgtaaggcaaataattacccattcattatgtctggggtttgtttttgtttgttttcttttcagttgttagtggctgttttctgtttcattttttctagatttgaattgtgcaaatacatggtttacttagaaacagggtgtagttagaagtggcttctaaggtcatggctgaactttctttttcccgggttaagatgcaccaatacaacccgtaatttgaggtttttctgcactggatattaaggtggttcttttctaagaaagaaaacaccaccagtctcctcagagtattgtgttgtctgtaccccagtagaagggtttttaaagataacatgggctggctctcattacgccagtctgacctttgtgtctgcagtcccgtgggcctgaccctccccttctgtgttgcagcgggtggacagcgaggtggtcatgctctccgcgcactgggagaagaagcaagcgagcctccgggacctgcagcagcagcttcagcagcttccaggcctcatcacagacttagaatccctgacggcaagtctgagtaagttccctgtttgcctctagacgctgcttctaggaaggaaaataatttggcgtgagtccaaagctttctaagaatacattaatcttattggttaacaggatttggagggaaatagttctaattaatttcatattctgattaactgatgatttgacaaaaaagcgatgatttaaaatgtggaaatgatttttaaaatacaccactacctttttctgcctccattctgctcaaaaaacatacttttgttgattcttaaagtgactcggagttgtctttctgactttaggtctctgtttaaaagtgtaaacgtaggaaatgaaaggggttatggtgcctttgttatgactaaaggctgtactctggaagttgttgcttttaatactgggtttgctcagagcttcatgtcttgaaatatgctctttttttctccttaaactgataaaatattaaacagatacaattaaatgagggtacctgtttggctaactttataccttgtggaagattatatatttattttttgtttttattgggatgaatcttgctgacatttgtttcttgagcttatattcagaaaattgacttttatgctagacagtgccacatcataatataacattgtggcttattattttctaaccaagcttaagatcttagtgaagtaagaggtaggggctacctacataggagacgaatttcttgagctaataacctgagtcttaatagctaagaaggtgtaaagctaccccatcatctcttctgtttttcaatactacatttttaaaagcaaaacagagctgatttacaaagcaagtaattaacaaagcataaaacttgtgtgtgtgaataaaatgaaccccattggtatttggaatgccgctaacgtttgtagcgcctactataggtcagagatggttaggtgccttacagacattatttacaatcctcacaagatccctgcggaagtagcttttgttatcccactttacagcttaggcaaattgggcttggaggggtggagacttgctcagggtcacacacagtaaggtgttcaggatcccagtccaggatcccagccgcagtgatgacgtactcaatggaggatgaggcatttggagtggcatctgtcagcagaccccatgacccgcattcctaaagccctggaatcagtgttctgttatttctgaaagcagggtgggggaaaagagactctgggtttaggaggcaggccctctggccttatttccctcttgtaggtgtaggaatggtccttctcaagcctttgataactgacagaaaaagcctccaagacactgggggaatattccttttagccattttctattcagcatctcttcctgtatctctttgagtctttgtttttcaatggttgtgttatttctttgcagagacatccacctatgatactatcccgctttgctttccagccaagagtaaattctgtttataaatgttatttgtttgatgccactctgctgattaaatgcatttggcctcagtctaattattctcatagttaattctacttaagatagaatatagtgtattttccttctcaattaggattctactgtcctgaagaagtaatgtttagtgatgtgataccgtcttcagaaactgcgttttgactttttaaatgaatgtgatgggtttcccaaatgctcacttgagttctgtctttactaatctgagaacatcgaccaccaaaggcaaattaaagctaaattaaagcaaattaaattaaagcagaagtatcagtctcgacaatcacttccaaataatttaattcttatttttcattgaagtatagttgacctgcaatattatagtagtttcaggtatacaacgtagtgtacacttatgtacacggtgtgtacattgtgtcttatagtgattgaccccagttcaattcctgggtcgggaagatcctctggagaagggataggctacccactccagtattctggggcttccctggtggctcagctggtaaagaatccgcctgcagtgctggagacctggattcaatccctgggttgggaggatcccctggagaagggaaaggctacccactccagcattctggcctggagaattccatggactgtctatcccacagggttgcaaagagtccgacacgactgagcaactttcccttttttcaccctttatatacattatgaattgatcaccattttaagtctagtagccatctgccaccatacacaggtactctaatattagtggcattcctcttgctgtaaattacgccccatgagctgctctgtaattgggagtttgtgcctcttagcctcctcagccacttcacccagctgccccactgccctcccctctggcgaccaccgctttgttctctgtgcctgcgagtctttttctgttttggtcattcacttgttccattctttagatttcatatacaaatgcagtcataggtatttgtctttctcagttactccacataacatatcaccccctaggtctatccatgttgctgtgaacggcatcatttcattttgtgtgtgtggctgagtaatactccgttgtatgtgtaccacatctcctttatctgttcctttgttgagggccgtttcagtttccttgcgtattttgactgttgtaactaaaatgctgccgtgatcatggcgggggcacgtgtatctttcctcatgagtgttttcattttctgcagataaataccaaggagcagagtagctggatcatacggtagctctacttttgatttttaaaggaacttccatattgttctccatagtgggggctattccaaattacattcccaccaacagtgcccgagggctccccttgccagcacttgttgtctcttagtaataaccattctgacgggtgtgaggtgaccctatggttttgatttgcatttccctgatgattagccatgttgagcatctcttcatgtatctgtttttcaggtccttgggcaaatgtttattcaggtcctttgcctatttttttaaatcagattgtttgttttgtttgtttgttttgtttttgagttgtgtgagttctttacttattttgtatataaactccttatcatatatatcatctgaagtatcttttcccattcaggaggttgcccgtttcattttgttgatggttttctttgctgtacaaatatctttatagtttgatctagacccatttgtttatttctgctgttgccattgcctgaggaaaacatttggaagccaaatttgctggcttgtataaatacatgtctatattattaatatatgtcatgaattcattttaatgagattatgccccattcttagaaatttgaatcatttggttttaatgcttgcccataaactgtggatttcttattttggaggtgaagtgaaagtcactcagtcgtgtctgactctttgcgaccccatggactatacagttcatgaaattctccaggccaacatacagagtgggtagcctttcccttctccaggggatcttcccaacccaaggatggaacccaggtctcccgcgttgtgggcagattctttaccagctgacccaccagggaagcccaagaatactggagtgggtagcctatcccttctccagcgatcttcctgactcgggattcaacctgtggtctcctgcattgcaggcagattctttaccagctgacccaccagggaagccctgatagctccccttttgcggggcagcctcagaatgctcgttgtcattatctaattactttgatatagtattacaaggtttagtcgagcaataatgaaaaataaaaattacttagaagaaaatagtaactaatctatatgtagtcacaggattctcttaacttcgctgaactttttaccctttctctgtcaaatctaataccatatccattcagtccctgtatttcctaggccacttaactcttttagtcttgccttgctctctagagggtctgcccttattaaagaataagggattaatatgatgtgagcaatttgaacctttgatgatgcttttagctgtgttaccctgtggcttaataaatatggctcctgattacatgctccctcaggaattaagtaagaacagataatccactcatgttgtttttttaatgggatgtgatccatccaacttgcaaagccagtgtaatagataatcactggtgaggcttgtcatttgaaaaaaaagagataataaataaaggtatgctgggaattgggaaagaagggctgtgaactgactttcagatctgggtttggaccgcagttccccagcttcctaactgtgagactccatgcaggtttcctgacttctctaagctttagtttctttgcttttaggattaaagatgagagaacctgcttcacagggtagctggagggcccgtagtgaggggagggtgcctggtacgtgataggcgtctgtgggtcccatgcaccatttgtgggctgaggggacacagcagtggacaagaccaggcagctgccgccaggatgctcactttctcctgggagtctctctggcctttgcagatttacaaaaccattgactttgacaggaggatttggatggatgttacacaatttagcttgtcctacactggaaaaggtcagttttcattccaatcccaaagaaaggcaatgccaaagaatgctcaaactaccgcacaattgcactcatctcacacgctagtaaggtaatgctcaaaattctccaagccaggcttcagcaatatgtgaatcatgaacttcctgatgttcaagctggttttagaaaaggcagaggaaccagagatcaaattgccaacatctgctggatcatggaaaaagcaagagagttccagaaaaacatctatttctgctttattgactttgccaaagcctttgactgtgtggatcacaataaactgtggaaaattctgaaagagatgggaataccagaccacctgacctgcctcttgagaaacctatatgcaggtcaggaagcaacagttagaactggacatggaacaacagactggttccaaataggaaaaggagtacgtcaaggctgtatattgtcaccctgcttatttaacttctatgcagagtacatcatgagaaacgctgggctggaagaagcacaagctggaatcaagattgctgggagaaatctcaataacctcagatatgcagatgacaccacccttatggcaaaaagtgaagaggaactaaaaagcctcttgatgaaagtgaaagaggagagtgaaaaagttggcttaaagctcaacattcagaaaatgaagatcatggcatctggtcccatcacttcatggggaatagatggggaaacagtggaaacagtgtcagactttattttgggggctctaaaatcactgcagatggtgattgcagccatgaaattaaaagatgcttactccttggaaggaaagttatgaccaaccttgatagcatattcaaaagcagaaacattactttgccaacaaaggtccatctagtcaaggctatggtttttttagtggtcatgtatggatgtgagatttgttctgtgaagaaagctgagtgctgaagaattgatgcttttgaactgtggtgttggagaagactcttgagagtccctcggactgcaaggagatccaaccagtccatcctaaaggagaccagtcctgggtgttcattggaaagactgatgctgaggctgaaattctgatactttggccacctcatgcaaagagttgactcgttggaaaagaccctgatgctgggagggattgggggccaggaggagaaggggatgacagaggatgagatgactggatggcatcactgacttgatgcacatgaatttgagtgaactctgggagttgatgctggacagggaggcctggcatgctgcagttcatggggtcgcaaagattcggacactactgagcagctgaactgaactgaacacagtagttaagagtgcaaaaccctggtgtgaaatgtgagaagaacagtgtagtattctgtatattgaaaaatagtgtgtaaggatagaatggaatattgtcctccagattctgtacgctttcttggtttagcgctaagtcatgtccgactcttgcgaccctgtggactgtagcccgccagtctcctctgtccatggaatttcccaggcaagaatactggagtgggttgccatttcctcctccaggggatcttccaggtttgatccctgggtctcctgcactgcagacgctctcctgtgttgctggtggattctgtactgactgacccaccaacactttcttgttgttcagctgcacgatgtactctgcatgtaagttaaacaagcagggtgacaacagacagccttgacgtactcctttcccagttttgaaccagtccattgttccatattgggttctaactgttgtttcttgacctgaatacaggtttctcaggaggcaggtaaggtgatctggtattcccacctctttaagaatttccccatttgttgtgatccacacagtcaagggctttagtatagtcaatgaagtagagatagatgtgcttctggaattctcttactttttctgtgatccaatggatgttggcaatttgatctctggttcctctgcctttttaaaaatccagcttgtacatctggaagtttttggttcacgtactgttgaagcctaggttgaaggattttgagcattactttgctagcctgtgaaatgagtgcaactgtacagtagttagaacattctttggcattgcgcttctttggggttagaatgaaaactgaccttttctagtcctcgggccactgttgagttttccaaatttgctgggatcttgagtgcagcacttttacagaatcaccttttaggatatgaaatagttcaactggaattccatcacacgcactagctttgttcatagtaatgcttcctaatgcctacttaacttcacattccaggatgtctggctctaggtgagtgacaacaccattgtggttatccgagtcactaattggactgactgtgactcagatcatgagctcctattgcaaaattcagacttaaactgaagaaagtatggcctagtggttttccctacaacacttgttctgtgcattttgctgtgaaactggtaagatgtttggaacatatttattgaattctcctgaacttccactagagggtagtctaatcctattcctattttaaaagtctaacctgtcaagagcttttctgaattctgttgtttagtttattttgtatgagctacttaaaaagacaccttcatctagaacagaagattctgttaattcttagataacacagttctgtaagagaatgacagccttgtactgagcttgcttgcctcttcctttcaatctgacctgaccagatacattaccgttctgctttctctgtacagaatttgagagtgcatctagctaggagactgtcacagtttttacggtttcatgaaacagattatattatggtccaggttacgttctgagattagacccttcaaggggcatattagctctctttcgacacggtttagtatatactgcacagatctcatttgttccatgatggatttttaatgcactcttcaaagttccttgttaccacaccatcattaccctatcacatgaagagtgacaaaagcattagaagactcttgtggtcgtttagtacctggcctcctgtgacccatgggtttgcaaagatttctttgttccctgaggctaattatttttgctagaaaatactcattaaatgtgaagttatgaattttaatgtgctgctccactcttcatatgtcagtggtcacgctacacgtagtatgcatctgaaaatggcacaaaggaaaattccagacagcacggctcttcctctggggcggtctccacacgagggcctgtgatgctctttcctgcacagctgtcaggctctcccagatggcccttcccagtaagatccacccatcctccccaccgatcgctaactgagacatatactgttgttatagtgagcaagatggtgaggctggaacttcttgtgaaggtacttttgtgtctgtggaggcctgctagtgtcttatgcacacgcattctaagtctagttaccagatttactcaaatctgcgactgtttcctagcagatgagccaggtgtgacggggagattaaatctccgcctgtttaaattcaatataaaatattcagagtacataccatatatatgtttattattcaaacagatttttgtaaagtttttcatacaaaaagggaagaaaattcatgttcatcggtacagttcttatgtattttattactgacctccagcctgattagagttaaaatggagaagttccatggctgcttctgctttaactcactggggcctaacttgatatactgataacagtgttttcaaagttctctgcccatgtttaatttgctcattgacaaaatttagcataacctcctcatatgtaaattagatgaatatgaatcatagatttgctttctttgttattatttttttgttttaaagtgatagaaccattgtatctccagaaatccttcttaattgaattcagcagacgaggtgttttgttgttgttcaggcactaatttgtgtccaactctttgtgacccaacgggctgcaagcatgtcaggcttccttgtccttcaccatctcctgagtttgctcagactcatgtccattgagttgatgatggtatccaaccatctcatcctctttcacccccttctgctgccttcaattttcccagcatcagagtcttttccagtgagtcagctctttgcatcaggtgaccaaagtatagagctggagcttcagcttcatcatcagtccttccagtgaatattcaggattgatttccattaggactgactggttggatctccttgcagccaagagactctcaagagtcttctccaacaccacagttcaaaaacacagttctgcggtgctcagccttcattctagtccaactctcacatccgtacatgactactgaaaagaccataactttggctagatggacctttttttggcaaagtaacgtctctgcttttaaatatactgtctagatttgttctggcttttcttccaaggagcaaacatcttttaatttcgtggctgcagtcaccgtctgcagtgactttggagcccaagaaaatgaaatctgtcactgcttccactttgtccccatctatttgccatgaagtgatgggactggatgttgcaaagatatagtctttatccttaaggtatttacagaatgctgagaaatataagagtgcaaaacagtggtataatgtcagagtatgagtcctgggcaggggtcataggtcaatggaagcacagatgagggggagagagctctgacatgaacctgccagggaggtgtggagttggggggggggggaagcaaagactcctcaggacaggcaggcacaggcgggaccctccttggagtgatgagcggtcgtgaaggagggtggtggtgaggctagaaaagtagtctctgagcagggagtgagagctccctgaatgctcgggcagggagttaaactgtaagtcctcaggagcctttgaaacttctaaaggggagaactgggagttgggcaggagccataacgtgaccccggactctcccaagcactttaagtctcaggttgccgtccagctccagcacacactgctggcctatacgtcaaagcctctctgttacccagccccctgtatgctgaggataacatgcgtgatgctaaaggaaccaagtagcttagagctaaatggattccgtattaaatgtaattattccagttcttatcactaatcaaagtgaaatagcctttaaataatcctgttagctatgatcgtcttgtaagaccctgtcaaactagttctaacagagtgagctgaacactcctcctttagggccagtagcatgagctcccaggctgagctcccactcgtttttccatttaataacaagaaataatctgtacagcaactgatacattaacaccatttttcctgttttcctttccaaatatatactcctcaggtaccactgatgacatttctgaaaatcttagatgtaatttttcattgattaaaacttagatttttgctaactgtttcaggttaggctttccatagtcacagatagtagctgttgtatgcaacccctgaagatagattcaaaactgttatcaactgcattatcagtcttttccagacttacactgatctacagtgatgtatcaattatgataagtcattacctaaaatgttcttgaagaggagtgctagactacttaccacattttaactttttagtaaaatttaatttttcctcctaaatccatatctttttaagccctaaaccctaccaagtacaaaagcacagatatttagtagagttaaaatttaggatattaaaaaatgtggggagttccctagtagtccagtgattaagactctgcctcccagtgcagggggtgcgggtttgatctttgtttggggaaccgggtggagggaacttcactttcccccaagtttaagggctttctttgtggctcagctggtaaggaatcaacctgcagtgcaggagacctgggttgggaggatcccctggagaagggaaaggctcccactccagtatcctggcctggagaattccatggactgtatagtcggacacgactgagtgattctcagtggggaactgaggtcccacgtgccataccatgtggctaaaaaatttttcttttaatgtgtatgtttctggatttaatatctgtgggtcaaacaattcatttaaaacaggcaaaatttgcatcttagtaaacctaaaactgcaagttgaaattctggaaaagaaaaagtgaaagtgttggtcgctcggtcatgtctgactctctgcgatcccatggaccgtagcccactaggctcctctctccatggaattcaaaacttgctccttatgttggtgctacggaaactaacttagaaagtcacatggcagtctggcggctaagggaaggaattaggcccagcgcccttgaatcttagctgtttgatggaactgaggctgtaaagcagcacagccagcttgctgccccgccccgacccccatgacgcacattcttgctgagtcgcacactcacccgtctgtggtggatgcctctcctttggtgttcacaggccctcaccctctctcaggctgtgttgtctctgaaaaatgcctccccgccactttgagctctctgagcacacagtttctctttttcatctttgtgtcccagtgtctgggacatgtggtgagtgcctggtagacggccatgatgctgtctgaggtctaaaagctttgacccctgaaacttttctgttgtctaagaaaacaaccggtcctcacccttgcagccgtgaaatcttggtttacttaagcacctatcaactggaaatcattgtgtgaaagagagactcagttttgatccctgactgctcatcactagctaggtgaccttgggcagggcactgaaataatctctgcaggctgtgacttcagtgttttaaatgaaggatttgacagagaggatctccgtctgccgagttctgtggcctagaggcaatgtggagtggttgaaagaccagtggacagtgagcgatgcttcctgagtgtgtgttcagtgccttggagatttatgtatatcatgttcaaggcaaaacaatgcaaaagtaacttgaaatctcaaatattaaattatgtttggcgtaatttgtgttaattatattttgatatattcttattatttggaaattgattattcatgtgtggtatatgcgatcattaagatatcaacatcagattaatcaagatactctgtttccctatcctggttaacgatgtgtaaactattttgggaagttgtgtcttaaaaatgttcgagatataaaaatatactcaaaaataatttgaaatatattttaatgttggtacattttatttcgcttcaagaaagtttaataaaaattttaaataaatgcaaaataatctcaacaattcaaacttttaacttttagacactttttcttttctccatgatcaagggttctgatttttgacgtttatttccttttttgaccttgtatactttcagctcatttagaggctagttttgaggaggtagaaaaccacctgctgaatctggaggatttatgtggacagtgtgaattagagagacacaaacatatgcagtctcaacaactggaaaattacaagaaaaataagaggtgagtttggggaattggccccgatattcatgtgcaatctcaaagtttcccacagtaccttacatgccagtctttataagtttggagtgataaaagacaggggtttcaggtgaagctctttaataagctttccaaaacatgttttgcttggtttggttttgttttgttggtatcactacctgttgccgttttatggagatgagttctgaaaagctgagcatgggataaacggtggagggagcagtgcaacagacagaacatcccgagagaggagaacccctgacctcgggtcctccgagcggcagatcctgggtggccctttccctttgcttccttttcttgtctttcctgtagagcaggaggataaggaacctgagtggtggctgtggaaaggggctcagctttgtcacttactgtctgtgagacctttgggaagttatcgaatctcttagcctcaacgtgtgtagctcgcagtgatgatgacagtgtccctgccgcctggattgtggtgaggcggcccttaccagacgcggtgtgtgctcaacgtgtgtagcttagatgacagtgtccctgctgcctggattgtggtgaggcggcccttaccagacgcggtgtgtgctcaacgtgtgtagcttagatgacagtgtccctgccgcctggattgtggtgaggcggcccttaccagacgcggtgtgtgctcaatgtgtgtaacttagatgacagtgtccctgccgcctggactgtggtgaggagtccgtgaggcggcccttaccacacgcggtgtgtgctcaacgtgtgtagcttagatgacagtgtccccgccgcctggattgtggtgaggagtccgtgaggcggccctaaccagacacgctgtgtgccctgccacagcggttatcgtggccactgttttcactgggtgaaccagagctggagatgggcaataagatttggaacactgaaattttatttgtcgttcttcactctcacccagtgacttagatatattagatatagtagtacattatagtttatatgttacaaaatgaaaagtgtttggagaacagcctaatctgtaatttaagtaaaagccagagtgtactgggcaagtcttaacatgtgttacgtaacggaaatatcattttaggtctggggtggtgtcatagaaagagagcactattgatagagtcagaagaccccagtcctggctccatctgctactgattccgtgctcttgggcaagccattcgctttcctctatcctgttgtaaaacttttcttgactagcatttggaagacttcttaaaagattacatcgttcgttaggcctctttctgatgcctcccagaaccctggccgtcaaacttgtctcccctgggcagaaaactggagaggtcatctgagaagctgaccagcctgtgagaaaggagctgcggggatgggcgctggggtgtctctgatgaaagagctgggtctgcaccctagtgcccctggcgatgggccccacccctctctacgtgcttctcatcagcctggtggtgcctcactcttgagtatgaatgcacagctaaggagtaatacccaactgaagaaaggttccaaaatgaacagggccaaaataaattaaaaatagtaattgtttttaaagacccacagaggaatgagacactatgatgggagcagaagaaaacctaagaacaaaaactaactaataacctcaggtgtgtcttacaggaggccgttttgcatttatgaggcccgaggaggatgctctagagaggggattattagagaacaagaaagctcttgggcatcaaagacatggttgcagaagcagaaggctttaagcgaagcattaaaaggcgacgttaggacttccccggtggtacaatggatgagaatccacctgtcagtggaggggacacgcgtttaatccctggtacaggaagattccacatgccatggagcaactaagcccgtgtcacaactactgagcccacactctagaactggggagtcccactgctgaagcctagagcctgagccaccctggtgagaagcctgcatcctgaagcgaagcgtggtccccttctcacgacaactagagaaaacctgcaccccgccgtgaagacccagtgcagtcaagaataattttaaaaataaagttgttttaaaagaacaaaagataatgttaaacctttacatgcgagaacaaaaagaccgagaatgcttagaaaattagttaatttttaagttctttatactaggagcttgagaaagaaagggaagagaaaaagaggagacaaattcactaaagaagtaatacaagaaaattgttcagaactgaaggatatgactgagttggaaagggtccaccaaggacataatgagtagggagagagccatcttcagtatgtacttttgtacatttcactacagtcagagtaaaaaatcacgaaagccttcataaaggtcctaaggaactgcaacttttcagcagcaaccctataagtagaaaatgatttttactgtatatttacttaccctggttcaattcctggatcaggaagatccgctggagaagggataggctacccactccagtattcttgggcttcccttgtggctcagcaggtaaagaatctgcttgcaaggggagagacctgggtttgattcctgtgttgggaagatcctctggagaagggaacggctacccactccagtattctggcctggagaattccatggatggactgtatagtccatgggatcgcaaggagctggatatgactgagcaactttccctttcactttatttacttagctaaagtttcacccagtgtgaagaaatagtaacttccaggcatacaagggctccagtttagctcatgtgcagactttatcaggaagtggctggaggatatgctctacaaacgagggaataaaccagtaagaaggaagacagagtgtggaagagagacgagctgctcttagcacatctgtccagttcaggagagaaacagaattcctaggatgatggtgaagaaaagcttcagcaggtctggggagcagcccagatggaagcaggaagagcccccagaggattccaggagcaatgttttccaggggagactgtctagtgtgcttgagcatgttgaactgggtttataagctctgattggagagtttgattatgtattagtgataggactgttttctaaaaaactaagcaaataaggtgactattaacactaagaaaatgcagttttacaagaaaagaaataatacatggctcagttatagattatatatatatattctgataataattaaatgtggcatatggattcaagccagaattgtaggttattgggaagatgcagtggaggcgtgtttgtgtggagggatgggaggggtttaaggaagctagtcctcagctgccacagcagaaaatcagtaagcaatatttaaaatgggaaaaaatgaataaatatcagtgttgacatgttatttagaaaaaatgacggtaaatactggaagaactgactgtagctgctttcaaaaaagcaggacagggacttcccttgtagtccagtggttaagagtctgctcttccagtgcagggggcatgagtttgatccctggtctgggaactaacagagaaggcaatggcaccccactccagtactcttgcctggaaaatcccatggatggaggagcctggtaggctgtagtccatggggtcactaagagttggacacgactgagcgacttcactttcacttttcactttcatgcattggagaaggaagtggcaacccactccagtgttcttgcctggagaatcccagggacaggggagcctggtgggctgccgtctctggggtcgcacagagttggacacgactgaagcgacttagaagcagcagcagcagctgggaactaagaccttgcatgctgcctgatgtggtttaaaaaaaaaaaaaagggacagaaagatggggagcactgagtgaggcactaatctgcttcatcatgaatccttgtgggtactatttgacttaaggaatatacgtgtactattttgataaacataatttttttgttttttgttagctgcagcacttcctgatgtattttgcagaaacagaggactgaaaagatagcctctgataaaacagtccatgatcaaataagttccagaaacactttaccctgaatttgcctcatttaacttttaatttgcctcattatagtacatgtacatatagtaatgtattacacatggtacatgtcagtgtattaagggttctgagaattcttatgatagagaaataggtttgactcatcgcttcacaacttacttgcttacagaaccagtttgtgtataatgtatattaaaattctgtgagttggtatcctatagtataccattgaaaaaattttccaaaaccccaaattaaacatctgtggtccacaagagaagagtctcttagaaataaacctccttcctctttacaagcagccctacaaactaaactagtgatttttcttttctggctctggaggagataacatgtaatataagggttggctatatgatgtgagggcattacagtgttcgcccactacatagcttcccagaaaatctggatcgaacacctcgatgaggctggagagagcaggggacggaaaagtaaggtccccttcgcctccagcgctggtcgtgtccatagtgcactgtttcatcccgctcctgtcggggactgggactgggcgcgcagcagctgtgggagttgggacagagggtgaattattagtacatgaactcgtgtaaccgcctaggggccaaggttagggccaggtccgtttctgactgttgcgttggaacagacgggatccatcccaggtgctagtgcatctgtagttgagagtggagatatgctatttcatcatgcatttgataagcattctcggcacagacgataaattcctgccccctgtgaaaggaggaacgtgacccatcccaacagttatgagggttacatggcagattctcagtgtgggccgagggaaagagctttagaaccctcctggggtgcatccacccttgaaaaatatttgaataggtggtttaccctaagtggacttccctggtggctcagtggtaaagaatctgcccacagtgcatgagacacagcaggaaatatgggttcagtcctgggttaggaagatcccctggagaaggaaatggctgccactctggtgttctcacctggagaatcccatggacagaggagcctggggggctacagttcatggtgtcacgaaagagtcggacatggctgagcacgcgcctgcattgccctaagtgtttctgcatggaaggaggacatcctgctttaggtgactgtctaatgaacatgacatataagcgactgtatagttgtgggggggaaatacccataaatagcttttgtaataactcttctgtatataaagtgatattagtatgactgatgcttttatgggcaggaatagacaccaccttgatcagtagtaaaacatcagagagtggataaaccatggctgtagggagagacaagtactggtaccagtagtagttgggtcgtcaaatggttcagaagacgagttaaccattacaagtgtaactgctggatgccttgtgtaggttttcctaaccaataggaaatatatttttcatcaagtaagaagcattaatattgactatatgagccaaaataaagaacataagaccatttccatgggtttgtctaagctagcagtgagagaaatggacttgagatgtggaagtcagcttgcatttgacttcccaggtagctcagatggtaaagaatctgcctgtaatgcaggagacctgggttcgatctcctggagaagagaatgactacccactccagtattcttgcctagagaattctgtggacagaggagcctagtgagctacagtccatggagttgcaaagagttggacatgactgagcgagtaacatttgcattcgtagtcacggatgtagggggagatagatggtaaatgtgcacatgattttttaaaaaggataatttcagacaattgtatcgaagaaaataaagcagggttatgtgacaacggtagggaggaagggcccttcctggaggtcacatgaggactgaggcctgagtaaggaggcaagcgcatggggatggagtggacaccctcccctgcagaggggcagcaggtaaggttaggagagtgaagaagagacgctaaatcttttcagtaccaccataatattccttagaatgattgttgagattctttcataataattacattaaaatcatacataagctagtgatctaattaaaatattttttacttccagagttctagaccctttgttttccccttcagtttgtagcataccgtcagaatttctctgaaaatagctgcatcttaaaaaacagtgtgattttagtaagttagcttaattataaatgactcataattttaacacagccttccattggacttgaaatctgctgtggggcatactgaactctacaagcatttttcactaattcatttaggctttgaaacttaattgtcatcccttataaactgtctcttgtgagtggggggcatggcttcggttgatatgatttagcatccaggcatattctgaaaaagtcattgttccttttgctttatgtattacagctaaagctaaggaactatgctcttctttgtgtttgtgttgttgtggctgttgatgtggactgtagactaatttttgttgctgctgttttttagtccctcagtcctgtctgactctttgcaaccccatggactgcagcacatcaggctttcctgtccttcaccatcatctggagcttactcaaactcatgtccattgagttggtgatgctatccaaccttctcatcttctgtcattcccttctcctcttgctttcaatcttccccagcatcagggttttttccaatgagttggctcttggcatcagatggccaaagtatggaagcttcagcatcagtcctttcaatgaatattcagggtttatttcctttaggattgactggtttgatctcctcagcccaaggaactctcaagagtcttctctaacaccacagtttaaatgcatcagttcttcagcgctcagccttctttatgatccagctctcacattcatacatgactgttgggaaaaccatagctttgactagctggactattgtcagcaaagtaatgtctctgctttttaaaatgctgtataggtttgtcagcttctcttccaaggaacaagtgtcttttaatttcatggctgcagtcatcatctgcagagattttggagcccaagaaaattaagtctgtcactgtttccattgtttccccatctatttgccatgaagtgatgggactggatgccatgatcttagttttttgaatgttgagtttttaagccagctttttcactttcctctttcactttcctcaagaggctctttatttatttatttattattattttttttaagaggcttagttcctcttcactttctgccataagggtggtgtcatctgcatatctgaggttatgcagactaagtttagaaaagaggctctttcattcctctttgctttctgccatacgggtggtgtcatctgcacatctgaaattatgcagactaagtttagaaaaatctttaaggcaaagaaggatagatttgagatgttaatggcatgtctttagtagtagttgaccagcttaaattctagagaataacccaccaaactcctgagcgtcaagaaatgactgtccaccagacaggttgtgatcatgggtatgcctgttcttccattacagagagttgaggggattgtgctgggcagacttgccacaggcctggctttgctgagaataggacaaggaggaaccagtggcattctccaaggtgaaggtgactctggaaccagaagaggaggtctggtggagacgggcaggaaggcagtaactaactagcccctgaggttctgtgtggagggtggtttgggtgctgaatgggaaatagatgagcagagtgtcccctcaggcagtgcttttatgtaaagggtcctccccaggtggaagaacatggaaccagactgactctcccccgacccagccaaaaaccagacacaataagtgaaataacactcattgggacactttacgttgggcagagaggagatgtgatccttgatcagtaggagacaagccctgtggtggctccagcattctgccaggagtttccaggctgcatgcaggaaggaaaaccagatagagtctggcagaccctctgagttgaagagtggagctgagtgtctggaaccccaagactgctggagtttacagggctcagaaccagagagcaggaataccaagaatctgcagagggctccccggaaagttcagcaggggaccggtcattcatatgagcgaacgacccagggaggaggagaaggaggggactagcacccagtaggattagtgagcagtgcccatcagccagagactgagaattcctggggaaattcctcgggaaagcttccttcaacagttagcccttgactgagccccgttccagacctgcttaactaatcataaaagcaagcatcaaagagatcaagctgtttccaaataaattaaccatatcccagcaaaaatgtttctagaactacaaaaatagctagtagtcaacaaggtagatcattctaacaggttgcttgtgaatggacaagatgcatgacacaccaaagttcaactgaggttgccagagaaagatggtctacaggttgtgtcatattaagacttctatggagaccaaatccatgatgcactttaaatatttaacctgtatttctcttcttaacactttaggtaactatgcccattgacaaatcagtccttatttacgtggcctcttgaagctgtctctaacactcgcatcctaagttttcttctctactgccattgtagatgctgtagttcagttattctcttgggttctgttattggttattgcttcctctcattctgcataataaagatgtcttattctgtatgtaccccctccgcaggatctgtgtaaggagcaaatgacaacagggcttctaaaagttttgagaaaattacctcaagcacgtgggccagctcttctcgcccttgagagtaaaagtctctcagtcgtgtccaactctttgtgaccccatggactgtacagtccatggaattctccaggccagaatactccagtgggtagcctttcccttctccagagatcttcccaacccagggatcgaacccagatcttctgcattgtgggtggattctttaccatctgagtgacaagggaagcccaagaactttatccaacttctcagccacaaactcaccaagccaggaagggtatacatcttcaggactgcagaatgcttaaacaaaagattagataagagtggatagtagctggtctttcaggagagaaatctttaagatctttcctagccatcagtcataacaaagggacactcttctactgtgtttaatgcaaaaagtattgctggtcaaaaaaaaaaaaaaaatgcccctaaatattttcagatgtggaaaataagagttgatcttgcaccttacattttgaatggtattttgccatctagaatcattgtgttaggtttttaacatgggtttgtcctgggggaagcagtttagtgtttaaagaaagtacgcttccatctctgagatgactgtgtttatggagacatttatccagggctccagtctgttaagtgtgcatctgtgggtctgatttagttgacttctatacatgcatggatttaatatacttcttgcaacattccatggatttatttgttaatatgatgctttttttgtttttattctgccctcataactcaacccctgtggataaaatgataaaatagcatcttcaccctttggaaatattattagattttgagtctagtgttatttgttgaatgttttagtttcagggtttgtcatgctaaattttgtgataggatttgctgaactgagtaaaatttaaaatatagtaaaaacctaaaaggaggtatttcaattcttcctacttaattgatcttctgaaaatattattaaactttggaaatgaagagactcagagttttgaaattgcaagaggcaaacaagttgttatatcagatgaattactgcatggccaaccttttattttttaataaagaataaaatcctccctagttagaataagggcttcttttaagaagcaggtatgtttagtccttctgcagccagagttcttggtaacctgacttgctgaatgtgtgtcgtgtgtgaccctgtgcacacgtgtggtcagggcagatgacccatcatctttgcacttcaggatttcggcagtatgattgtagagacggcgtgtgtgctaagtcacttcagttgtgtctgactctgtgcgaccctatggtctataacctgccaggctcctctgtccatgggattctccaggcaagaatactggagtgggttgccatgccctcctccaggggatcttcccgacccagggattgaacccacatctcttacgtctcctgcattggcaggaggattctttaccactagtgccacctgggaagccccatagggatgacacctgtatggaaatcatggtgttacaaggcagtgtaggaggtgttatagcactgatggacgtgagtcccgtaggaggtgagataagaggtgacggccatgtgggtgtgatggatgtcttcatggaagagactaacttggatactgttttatattggttattaccattaaccatttctgatagagtttggagagtaaccagaacttaaaactcctgctcacctgtgccttttcacttggtgagccgagaaggtgacattaatgctcaagaggaaagtatctgcggtgtgatcatcagagttacctgtcctcctcacttacactttccctcaagactcagttcagtcctggcttctccaggaagcctttcctcttggtccttggtgtgtgagtcaccccctcctctgtattcctagagaatcctccgtgtggctggcattagcagagtgctaatctatgatatcaatttctgactgttgctttacttctgtatacctcactaaattcccttgaggttgtggagcgtatataactcaaccctagcattattcctactgctgttcctaacattattgctaatgtctaaggcacaatacatttttttgttgctgttgagtgaatgatcaaactcagaggttacattcagtataagaaaattagtatttatccaaggcgtgacatttatcatcatgacagcagtaatgatggacagaaatggatggattcgggacatgttttgagatagagttaacaggttgtgttgagggactggatgtggcgaaggagggagacggatcaaccaaagcttgaggagtggtgatggccttgagtggaggcgagggagactaggaagaacaggctcttttacaagtgttgctgggatgcctgcttcacttccgagcagtactctcaggtgggcagttgcatatgagtctagagctccaagaagagatcaagacaggaagtacaaattgagagcctgtggatggcatttaaggccatggagctggatgaattgccttgtgagagcaagtaagttaagaagggggccaggattaagctggcagagctctggcgtcttgtggcctggaaggggcggggaggtagcaaaaggaaccgggagaggaggaggaaaacttgagtaaatgctctcaaggaatcgccagcggagtcaattgctgctgagggattcggatgaaaagtgagagcgaacatcgcctttggcagcagggtggttgtcggtggtctcgctgtgcagagctggggtctggaagccaagctggagtgggttcaggactgagcgggaagtgggggagctaagtccttgagtgggttacaggggtggggagtcatggctcaacatcgccagccttaggttccaacctcccagattatttcgttatgttccaaatggaactcacacactgccctccaaaatctgttcctcttcctgttttctgctgatgaattccctttgcttccagtgatgcagacaggaccctcatggttatatacttctccccatgggtcaactgccatggtctgtcgactcttctccccagcgttttcaaattggaccccctcccttcattgccctagaggaggaaatggcaacccactccagtattcttgcgtggagaatcccatggaccgaggagcctggtgggctgcaagtccatggggtcgcaaaggagctgaatatgactgagcacgctttgttgctggtgccgctgcacttgctctttccaggcactagttagatctgcaaactcctctagtcgcttcttgagtgctccctgcttcattctccctgctgtcagtacgtctatccatcacaactagaacattctccctgaagcatggctttgctcgtgatattctcctgctaaaaataaaagcagatcctttcagcctggcactcagaagcctctgcctcttcaacgtcatctcccactactttctcttcattcagcctgctgtcctgacgggcttgctctttcctgaagataacctgcaccattcagcttccacaccttcactttggccctgactgccttccctcccttatacttctgtattgctagatgctgttgcctctggcattatggagtctgccctaaaaattatgacacttcttgcttttctttatcagtctttaaacttataaaattcttccgtcatagtgatctttaccttaaaccacagtcacctgtaccaccccaacctccactgtcttcttgattaaggaattgggtacaggactcttttactttctaaaagaaagtttcttggaagtttcttgaattgccatgggtcaggatattctgtaaataagggcctagaaagaggcaccctgctcacctttactcttttctcgtagcaacttcccattgttttgatgaggcagccagcaggttggaaggtgggcacagtaactccaatgaaagctcttaatcaggcaatgactcattactgggcttcccttgtagctcagctggtaaagaatccgcctgcaatgagggagacctgggttcgatccctgggttgcgaagatcccctggtgaagggaaaggctacccactccagtattctggcctgtagaattccatggactgtgtagtccatggggtcacaaagagtcagacacgactgagcgactttcacttcactgactcattactaacacagacactggattcttggctccacggttgttatttggggtagcagtagggaagagctgctgctgctgctgctgctgctgccaagtcgcttcagtcctgtccgactctgtgcgaccccagagacggcagcccaccaggcttccccgtccctgggattctctaggcaagaacactggagtgggttgccatttccttctccaatgcatgaaagtgaaaaatcaaagtgaagtcgctcagtcgtgtctgactcttagcgaccccatggactgcaacctaccaggctcctccatccatgggattttccaggcaagagtactggagtggggtgccattgccttctccagtagggaagagcagtgtctgtgaaatcattcttcccagtttcacctttttttaaaacaggaggtgcctttttgaaatttcactgcttcgtgttctgaaagaaggacagcagaggccctctgaagactgtaatcagagaaaagagaattagtgtttagaatactgaactgaaggacttccctggtggtccagtgctaagcctcggcattcctaatgcagggagcccaggttcgatccctggtcagggaactagattccacaggccacatctaagtgttcccatgctgcaactaagattggcacaggcaaataaatattaaaaaaaaaaaaaagaatactgagccaggtgttctgtcatcctgtccgccccttggtcgccgtggggagtggctcacacgagggcatctggaggggtacgtgaaggtgccccctcaggatgctgtcttcggcaagtgctgcctttctcttcggccttttcggcattcatcccatttgttgttcagtcgctaagtcacgtccgactcttttgccaccccgtgaactgtagcccgccaaactcctctgtccgtgggatttcccaggcgagaatattgcagtgggttgccacttccttctccagtcatcttcatctcattcagttcagttcagtcgctcagtcgtgtccgactctttgcgaccccatgaatcgcagcacgccaggcctccctgtttatcaccatctcctggagttcactcagactcacttccatcgagtccgtgatgccatccagccatctcatcctcggtcattcccttctcctcctgcccccaatccctcccagcatcagagtcttttccagtgagtcaactcttctcatgaggtggccagagtactggaatgtaaaataggtttcaggcaggtttactttctacctaatcttttaaaaatgaagctgggctattggccaaagggaaatgattgcacccttattaaagacaggattgaaagtaacttttattccttagttaatgaactctggtgctggagtaatgttatcatgagttagtatttttagggggaaaaaaaaaggagtgatatgaccatgtgatttaaaaacctccactcagctgtttcaagaacactggcttttcagtgggcagcttgccagtccttcctggccagctgttcatggtagtcaactgttttggaacatgagcggtattgtaattagcaatgaggaattctgatttgagaatccagaatagctctagattttgcaaataaaagacaaacatctcatattttaagtgggataagcctttacaaataaatttgcttcctcaaaattacttttaattagtactgatagtgagaaaaatataatcataaaattattaaggaaaacctgaaaaaaacttgcttttgacttctttgtcaaaaatgttttacgaccgttcatctatcttccttggctatacgtctccccaggagactttgtgtttcagcattcctaagtgacacgaaatcacacaccagagcgtttcctggaggcttggcccttttgtgacaggatggtctgtggacttcaaccctttgatatatgatttcccctttcatttagaaaaggaaataactgctcctcttttgaatgatttttaattaaagatttttaaaaaatctattattatttatccatgaaaggaaaagtaagttgcttttataaactggtagttaaatatattagatggttcatggctggcattaaaatgctctgtttttttgttttgtttaagtgtttcagtgttttaatagtttaaattttggtagaacttttttgaaccattagtagagtaatagcagaaaaactgagaatagtagctttaggctaactatattggtaatttcaaagagtaatggactccatgtgagcatccagaaataccactctcggcaattaaagtacttaatattttattataatctaagagcagtttccattgggagtagattaataaatgtatgttttctttgtttttcctacaggaaggaacttgaaaccttcaaaggtaattttgtgtttaattcttcactttaaagtagatgagagttaattgatgtcagatgttttctcttgatgatgataatgaacgaatgcattcctttttctttaaatcagacagtttacatcagaaaatgcaagtttgcttaatactgtttttgtcaatttatttaatcacggtggttttgatatcagctgtaacacatgtaccaagtgagagtttctgctaatggcatcataaatagtatgttaggatgacataatgcagacttagaggctgttgagagtcatagttggagaagactctggtttctgttgcgtagagagagtctgggcctcacggagaggtgatggtgatagaggtggcttgcaggcaacccagagtcccctgaaccgcctgcggggttttcagtgctggccctgctcagccaccatcttgtcactttggataagtctctacctttttcaagcttatctgtaaaatcgtaagctttgctgagctatattctgagatactaaaagtgcctagcattgctttttaattttagggaacttttgcaagtgagtgtgagaaataattcttggtcgtgctgactcttggaagcactcatgaaaaatagggaaaaccacagagtttcagaagctcaaagcccttccagcttgccacttttcaattacgctttagaggttgagtagtgaaatttctattctcagagaatttcagtaactgagaagactctgaattgttgtttattatgtttcatttgtaaactagtattgactttttgagttactggttaaagattttccagaacattatttacagttgaattgtttatctctgtgatctgtttggatgttttagagaaaacaactaatacttgagataaaaggtataaaagcttattcctgctacatctgttattaaaccatcttgacttggctgggtttctgtttggctgcagttatagtgaatgatttagttcgccagtttgttgagggccttgttaaatgatgatgatctgatgtattatcgtggttatcattattcttaatcaatttgtgaaccacactcatgtacattatttttcatcactggtttaaaataagatttgaaatccccataaagtgttatttttctctctcctcctttcttttagtctactagtgtcttcttatactgtattgggggaggaaaaaaaaaatcaagttaatattaaaagacaagcagagacccagattatgcaacatgtcaactttgcttacatctcagtactgaggctttttttttttcattttgtatgacagtattccagaaaaagaggagaccagcagtttgcaagaggatagacagtgttgtgtattacctgatagaataattcaattcatgcggaaatatcttgtttttacatatatccctaattatgtacagcatttaacagcacgtccaacccacccacaggtcagttaaagctctcaattagaacagaccctaaatggattattgtatcatatctagttttttaaagaactaatattcattaaaaattatttcctcttgagtgttttgctaatacttcaaaagcatgtgtagcttgcaataaaaaaatataactattcttccaagacgttactggagaagagaattcattcaaaaatataataatttgttattttttgaacattgcttttgcctttgtttttccttttaacatttcaggaaaacagaaagcatcacttcctccaactgttttattcaagttgtagttatatttagaagctttttgctaagttggggaagaactaacttttcggggcaaaattagtaaccctcaaggttagtaacatagatcagtgtgatccactgagttctggattcttccttctgtactccattgaggttaatgggttcatgtttatcttgcacttgagatatatctagcaaatctctacagtattattgaaacagttaattatttgttttgtttttttaatattggcagcaggaaggtcttctcttttctccccaatattgcctttctttaaattctttagtgttagtcacttgaatattatacaatatgaaaagggtaagatctttaaagtcttaattttttaattctcagtgagaaggaaccccattattataactacatgtagagtaaataaattggggtgcatgtatatttttacattcgttttctccagatatatgcccaggaatgggattgctggatcatatagtagttttattttattttattaaggacctagtggttataccaatttacatgcccaccaacagtggggatgttttctccacaccttctctaggatttaatatgcagtttaattaaatatcagcatttaatatgcagtttaattaaataccagataaagtgatgaaacctctattttaaggagactgtttttaagaaaattaagttgactgctttggaagacctaatacaggtaaatagctttttaaaaaattactgtaaaatgttaaattagaaattagaaaagacttgggggaaaataataaaaattctgaaagagtccatacacaaattgtttttcacatcttaaattccctttctgcttttaaaaataggctggaaattttatccagtgctgaatacgtggcttatacgaggatttttttcaaccagtggacctatactcaaagaactcaggagaaaagtttggttatattttaagttgaagtgtctgtatctgtgtttttaaaaagcctttgctttggctgctctgggtcgtcactgctgtgcccaggctgtctccagtggcagcaagtgggggctgccgtccagttgtcgtgcacgggcttctcatcgcggtagtttctctggttgcagagcttgggttctaggatgcttgggctcagcagttgccccacagcctgtgggattttcccagaccagggaccgaaccgatgtcccctggcccaccagggaaggccttgcatgtgtgtgttttttaatgatttcctatgttaactgctttattaaaaattaaatgagcagcatgggatctagttgtgttgtataagtggacatctactgtaatctctttactatagcactgcccagccatgtcagaaatgtgactgacagtgtgaaaacatgccaggatttagtggttatcactgtcacagtgagtgggtcaccagagaatgtggagagaggtggctaacaccagcctgagggagtgtgatcccacttaaggctttgtcctgggaagcaaagccagtcaaggatacagagccagtgaaagtgaagtcgctcagtcgtgtccgactcttagtgaccccatggactgcagcccaccaggctcctccgtccatgggattttccaggcaagagtactggagtggggtgccattgcagtaaaggcaatgaaggatacaggaccagagcactcatcaaaactgtccaagacagctctgtgacaggaaggtccagagaggagaaggcttaaaggagaagtggtcatcagtgctagaagtaacgtaggaaggttgagcagaatggggaaatcccactggagttgacagtgaatagataagtggtgacctgatggagctctttgtaaagggagactccagattgcaaatcagaagcatgtgaggcatttaggaaagaaatgaaaaggtcacttgagatagaatcagggtcaaggtcagggaagaaggtgaagttgaagatgttaaggacttgattaagatctagagaagatggagaaaaaatacccagataggttgtccttggagaggatccaaggatctctctttttctgagactttagagaaggaaaggatggcaggtcataggggaaaaaatctgtggaaggaaagactgtctgaacttgcaaggctaggctcaaaagtagaaatataagccaaaacaaataatgctttgcttaacacaaagctgggaattaaagagcatatacgatgggtcagcagagcacggtgatcttgggtgctaatgagaacatgactaaaatgattggccatggaattcaggccagaaaggagaggccggaagagaccagtcaaatgagcaagatacgaggtactggggatggtgttccccttaaagatgggaaacacttgggtggttgagtatatggttaaccacgcttcttgtggtcaaataaagaatttcagtttgacatcattgagatagagcagatgatcatggctaaatctgagtgaaaaagaaggcataaaatgacaatgtcattggggaattctgaggccgttaggagtcgcacttatttgggtgactcagatatgaattatccataccggtggctcagtagccacagcaggtcatgaatttagatgtggcagatagatggagaacttgggtagaacatgttgggtcaattcaagagttagcttaacacataaggcaaaacttctgctgccatttggcaatatttaggcaatggaaactcaggttggataataccactgtccactgtcctctgtcctcaaggggctaaagcaccatggcaaagcttctaggatagaaaggcaaatatatgattttaatacaatgacaaaaatattaaaatagaaataagcacactatggtgggagtaatcaatcttttagagagaggcagttgaatgctgacctggcagaaacagataataaggacattccaggaagaggaaagaacaaccgcaaagatgcagggacgtttatcttatttcaagagcacaagttaaaatttaacttcttgttcaatgaggagactacagttagttagtgctgaagcatctggtgcgtgggtacagtagtgaggggtgaagttgagacgtgggcagggcacacatgccacacagcttgtatgtcacgcagaggagctttggctttttcctttggactagtggtctccaaagaggcccatgagtatgcagagtaacgtcagtagtggtgcagaagaaaactggaacttctgtttctttttttatgtcatccttttataattcaatttctgtgcatattctataataaactaggacaggtattgatgtatatgttatataaatgtacatatttgggggtgcatgttaaatgcttttgttcatggcaagactgctcagcagtcactcttgtagctgagagagatgaggtagggatgggagaaccagaaggttcaatttagggtaacaggaggcagtctgcatcatagagcaggttttctgggatcataggttttctgaaagacagattggaaaagagcaggtctagagcaagaacggttagttgagaaactactacatatactcgaatgatggcagtggttaaatggagagaaaggcccagattcaagaatcaagaatttcatcactcttgtgagaagtctaggatgactggaattctggctaggacatgtgggtggacttttcttttaccaggaaatgtaatacgggcagaagagcagatttgggagggaaccatagtggattctgttggttttgggaggaggaggtacagtatcagttgattaatgataataattaatcagttcattaatgcaagcaagttcccagtgaccccacaaaagtgcagtttgatatctgatagagaaatgctttttaaaatgttttattgagattttactttcatatcacaaatttcattcatttttaagtgtacgattcagtgaatcttagtaaatttatagaattgtgcagccatcatcagaatacagttttagaacattttcatcacccgtaactgttcctttctgcctccctgcattcagtacccttttgtgttcccagccccaggcagtcattaatcagtttctatctccatagactttccttttctggacctttcaaacgaatgcagtcatgcgacatgttgtatttttgcttctggattcttttagtcatgttaaatttttggagttcatccatgttgtaccatatattagtagacggttctttttattgctgaattaatgtcccattgtatgaatttattgcaatttgtttatcctttcactggtttatggacatttggattgtctccagtttggaactgttgtgaatagtgctgctatagacttccatatgcacgtctgtgtgtagacgtatcttttcatttttcttggatatataactaagactggagtttctggatcatatgatatggttgtgttgtgtgtgttagttgctcagtcatgtcagattctttgtgaccccatggtctgtagcccgccaggctcctctgtccatggggattttccaggcaagaatactagagtgggttgccatgccctcctccaggggatcttcccaatccagcgatggaacccaggtctcttgcattgcaagcagattctttactgtcttatccaccagggaagccctatgataaggttatactttttaggaaactgccaagctgttctctgcagcggtggtaccagttacattcccaccagctatctaggggttgtggtttctcctcacccttgttaaccttgatatccttgactcttatgcctagctctgtgatccattttgagtcagtttttgtgtctgtgtgatgtaaaagtctaagttttcttgcttttgtttttcacatatatccaattgtctctgaactactttttgaaaagatttttccccccattccattgaacttctttggcactgtcacaggaaaccagtggccataaatgtaaagaagagtatatttctggactttcagttttgttccttattgtcagtaccacactgcctgaattattgtagcttttgtaatgagttttgaaatcgggaagtataaatcttcgaactttgttcttttacaaaatcattttggctattttaggtcctttgcatttctgtataaattttaggatcattttgtctgtttctaccaaaaaaaaaaaaaaaagaagcagcagcctgctgggattttgatagggattgttttgttttgaatttctagttcagttaggggagaattactatcttcataatattgtgtcttccagtccatgaacatggatgcatcttcatgtgtttgtagctttgattttcctgagctgtattctgttattttcaatgtgcaaagtctcacttcttttgttagatttactcattttattcttgctgagtgaattcagtcttgggcatattaaatctgagatgtcattacagatggaaatgtccagtgggttgctggacgtcaggagagagacgtgagctggaattgggagcaggctgacccgggtgggggtggggagccttggatctgggtgcagttgctcggtgagaccaggcagaggaaaacaaaggagaggggggttagaagtctaggaagcgctagaattcacctgacggcataagaagagagcgagctcccctcgccgggggcggagtacagtcagctgcagaggtggggatgtgtgtctcggggcgtgtctcagggagcgccaagcagtgccacgttattacagagaggacagaagggaagatggtctgagaaggggcatgtggtctgtcaactaaagttcgctggtgacggtcctgggagcgatttcagcagcacgggggttcccgtgtggtctgggaggggaacccagctggcggaggacagggggccagggggaggttctgtcgtgttccccgtgtggcccgggtgcctggcgcgttggtactgactaaacatttgagtgaatgggggagtagagcggggctttcgaaatcacaggcttaaaggggagaagagaggagaggctggaggggaggagggtttattgatttctgagaaacttgagtgcctttgtgtgaaaaggggggagaaaagaggctgcagacggggagtggctgacagtgaagctgtgatgcagagaggaccacggtgaggggctcagagcacacgacttcgaaacaggaagagactgtcgacaagtctctgtaactgttggaattgtgaggatttgagatacttattaaaaatacatagcaccttccaagctaccagtgagtgtggctgaatttgaaggaacctttaggctaaagctgtgctgaaagtgaattggggggagtttaaagatccctttgtgttgggaggcaagctgtattcttcgcctttatcttaatgcttgcagagcactgggtctcttctctcatctgatatgttgtcactaaggcgtctttgtgcctctgtgatggactcagacagatttagtgtgttttcagcctctcccctaccttctgagcagcacttggtatggccccagatacgtgcatacatctttgcacaccagagccctcagagcttgcatttggcttttatagaggcagtagattctgatacatgtctgccgaagtcatcagcagaaaactaacaggcttaatagaatttctttggaaaaacctgcttctggctccagcctcagttcctttgttctactcccagaagatgcacagcaggggagctgcctggtaaactggaggcttcacttgaccagcctgagcttctgctcagttctgcttgctcagtgcccacatccatgtcatctccaggattcaccgaaaatagtcagaggaatccctgtaggtggaactttactttatgtttttttctttcactgcttttctttaaaaattttacctccatgctacattgcagtgtttggtggtgtgcaggtgattcatcactaaaaagcagaaataaaatttcaactcgattggaacctctaaccagtaacatgttaatgaaagcattatttgtttctttatattacaaagaagtgatagtcactataaattaatacttaaaacaagtggaaaatgtttcctggcaatctgggactttgctcttataattttgtgtcctagccccatcgggtgaaattcaccagtcatctttatgaggcagcacccttataattgaaagataaatataaaatgccaggcattagagtaatgagtccatttctgacgtacagctccgtaaaaccaactcggcttctctcgctgctggtatgtgcatttcccaagaagtggctacttagttaaacatgtgagccatagccaactcgatgtgaagttaaagttccttccatgccgctgtgttgggctcaactaaaatggctgattttccaaatgggttttggaaaggtaataatgcttcatacagattaaaacctctatgttattttcctaattttacagaactttggtgtttcctgtcatgtgttggtaatggttttgtgatattttattttaataaatagcacatgtaaggatattaaacttgtggaatttactgcaaaaattataccttaaaaattaactggtagctttttttttttcagttgagtaatgttattctacccatggagattactgaagaataatttttaataattattgcatttttaaaaactccatattatgcctctaaggtggcacatgttatgacatgttatatatcattccctgtcagatggatcccacttgtttctaaagggaaaaaatgaaagaaatacatgtcgtctgagcttttccttactttattgtgatttttctgttcctgagattacatgttaaagttgaacttgaattaaaaggtaacttccttctccctttcttaagtctatcttgcatatagtgtggccgactctttaagctcaggatagacacattaatcaaagcaaaatcatagctcaggaattcattctaacgccggagcattcatgaaactctaacccgaggtgttcctgcattctaggtcattatttgttaagtgttcaggaataaactggtaagaatagagtgagaaccttagagcttattttttaaagtatttatcagtaatatatgacaaatgacactttctcctcttccctcagttacactgtcttaacatggtggttgtgagtaaatatttgaatgtagatataacctggtattaattttatttttttaaattatttaagaaattactccctgaaaatcttgacttcttggtgaatactggctagatctttttttttaatctgcttccttttttagtttattaaaaagatggtttatattatgtagcttagtattttagtaaagttagtatctatatcctagggtacagaaatattcatatcctgcctgttgattttgtctctaagtcagtttaaagacctagttgattgtttattctagtaactgtcataagatgttacactgtggcatgacctagaactctcaaagatgacattttatattgaagaggattgtaattctaacagcttaggtagatgttaaactgcaaaaaagtagagccttgatcagagttgtggtgcttaaatgttacctttctgtgctttcttataatgagtatatagcactcttctgtaaacaataattatagcaatagagtctttttagaaatgtatcaggacaactttccgttgtatatcatgtgtgtttggtatcatgaataaatacagctgttctgtttcattacctttttgctggaacactgtataaacttgacagcaaaaattatacctttcagaaaaactagattccagtaaaactaaactccagcaccacgaaagaagaggtaagtgaagattttacctgtcaggctcaaaaagagagtttatctgttgaattcatatgaagccttatgattttctcttagttttttgaaggttcgtgctggaaaataacctaaagggtcttgtagctctgctgtttaaactgtttgggcaggtgatggagttagcactttctcagaagactggtccatagctaatgatttttatggatttccagggccaatcaagtggctgactgagccctacaggagagccatctagtcaccaaggaaagtcagccatggctttccttggagagatgtgctcatgccataaacagaaatagatgctggtgaattgttttgttcatgcttctggccactttcaggtgggatttcagtgcacttaatgatcctgagtgaggatgttacatactaaggatatcaaattgttgacatatgtattagagatatttaaaatctaagcttggttatttgccttttaattttgtttgcttttttcttacacatggaagtttcatatttttatgtattcagacaggtattttaaaatgacatcctccattgtttttatgcctaaacagttctctcccaatccaaagaaataaatgttaacttgtaatctcttctggtttttattctagcttaattatcatttgctgattttactctaacaaatttggaacttatattgatgtatagcgtgaagtaagcatcagttttttgctgtagaagtaattaatttttctagtactatgaaatcatcctttgcagtcctcaacctcttattgccaaattttgttggctacactttaaaatttttatttgttgatttttagttgtgttgggtcttcattgctgcacggatttctttctcattgcagcgcgcaggggctactctctagttgcagtgagcaggcgtctcatcgcggtggcttttcgtgttgctgagcacacgctccagggcacacagccttgagtagctgcggctcccagtagttgcggtgcatgagcttagttgctctgtggcatgtggaatcttcccggaccagggatcaaacctgtgtctcctgcattggcaggcggattctttaccactgagccagtggacctttctctggcactttctccctctttcttcctgcatcatctgctgaatcattccagcacttactctgaactgtaaacttcttatctggtattggagtatatagccaattaacaatgtcgtggtagcttcaggtgaacaacagagggactcagccataaatatacgtgtattcattctttcccaaatccctctcccatacaggctcgcacgtaacattgagcagagttcagtgtgtgctgtacaaataaagaggtccttgttggttatccattttaaaatatagcagtacgtacatgacattcccagagtccctaactgtcccttcacccaggcaaccacaagtttatgttctaagtctgtgagtctctttctgttttgtaagtcatttgtatcatttctttttggatcccacatataaggcatgtcatacagtgtttcctcttctctgacttaacttcactcagtataacactctcgaggtccatccacgttgctgcaaatggcgttatttcattctttttaatggctgagtaatattccattatgtatgttaccacgtcttctttatccacccctctgtcagtgggcatttaggctgcttccgtgtcccggctgctgtaaacggtccagcgcttactctgatggtccccgtgcttcactcttatttttccgtctcctttgcctcattgtcctgcctaccccaccatcccaggtgggaagaacctctgggctccctccttgggccttttcactcaccgttctgtggtctcatccgttccaaggctttaaacaccatctgatgctcatgactccctgatgagatggctcctgacctgcctctcccctaaattctagactggaatagccaactaccagctcaaatctctacagctgtgcctacaggaactctcaacccagcacggcagagcctggtctccacacccatcttcccaccttcctggctgctccgtcatcccagcgacaccaccattcatttctcctggggttctgaccacgacaaacacacgaccgaaaaataagatgctgcttgatccctcgcttgctctctcacctcacatccgattctacaataaatcaatcagcccaaactggatcccagatctgaccggatcttcccatctctcccagcaggtccaggctgcctcagtcctgggtagaagctctggtggcatcctcgcccagtccctgccacgcctgtctccctccctccccacccagtatcgccttttccccagatgccctgcagcctctcatcgcactgacaacagcgcccttctctctgctcactcagcccgctgtttgcccccacccctgacctcacctcttcccactctttcctggctcctccgtccagccccgccggccacccgctcttcctcccgggggcccagcacggcccccgtgcctggggcttctcctgagccctctgcctgctctgctcctcctccagacagtgtcctggctccctcctttccgctaccttctcaaaggtatccatgttttcagttgtgcattcttctctctctccctttacctggctttcttttatgacatacctttcttttctttctcttacgtggaaacctgatatacacttactcttctctgctgcacaccgtgcgcagagacagggaccgacccaggactcggcgagtgttcactggctcgatggagtcccagggcagcatcctgtccccttgccttctggcttggattccttttaactctgtcttctaaacactgtggagccatctaactagctatctaaaaattcagatattcagatagaatccccatcagtcacatcatgagacctagaagtggctcctgattcttccagcaccgcttcctagctttagtcacgagagagtcacagtcacagactcacatccacatatcggctgtaccgcttctgactttcttctctaagtcaactcattttaaagagagattttaaaatacacttcttagggaattccctggcagtccaggggttaggactcagcactttcactgccaggggccagggtttttgagccctgatcaaggaactaagatcccacaagccatgtggcacagcccaaaaaaaaaagtttttagtaaaatactcttcttactataaatggaaaacgagtatcacttgacacaaatagaaactgcataagtaaatacataactattaaaagacttctgccaccacaaattattctgcatgcagtattttggaaaactgagcttcaggattaagtgcaagctctttaacggagtcaataaaattcttcccaaaagcccatgcttgcctctccggcttcttcagtttgtttgtttggtttttttttggtactgaaaactttgaggatgtattattacttgctggtttatcttgaaccagacagttttttgtaaagtgtttttctcactgatctgttaagaaagaaaaaagaaaacaacactttaaaaagaaaggctgtcacactgaaagcaattttgccgagaggcaaaccttgatggccaagcattccccgccttcctgccccgggtcctcttggcaggagcatttcttcactgctacttttgcaagttccaccatttgcacttttgtgagaccaacgtgaaaatgccagtcccagccgtaaaacggcaacatggaatctaggaggagctctcctgtggtctcttgcccgcacgcgtgactttggagagtggtggccgctttgtagggtgagcagactccgggtttctctttcactctttcgttcctctctattcagtcttctcacatttcccgtgcagcgtcagtaattaccgtgagaggatgctgtattctatctaaagagcaagtgcattttctcacaactagggtaagaaagcttatattacagtgtctgcccccttttctctctctctctctctctctctctttttttttttttttttacaaatttcaccctggaaaagcccaaagaagtgttagagtccatgaaagtcagatggagctatgcctttaaattgctaattcggttggtgtagagtcaagggtgaagatattactgttttctagagtaaaatggttctgttaggttggcaaagttttgtgctttgtattaggggagaacacatagcggaaaactgtgtttgtagaataaaccagttttaaatgatgtgttcagaaaaatgagtacttagagccccatggtggagagccctcgactgagcagaaccccccctcctctttctgaatgccgcttggattaggagaaaaacattagaaggtgtcacctctgactggcaaacggaattgcatgttctcatgtccaagtaactccttagagtggctgctctcctcctgctccctgacatgcatcttttgagcatttgggtggaatgcttggtgagggctgtgctctctatgctagaggatgcttatttccgtgctcactggagagcacgactgggcttcccccgtagcgcaggggtaaagaacctgcctagtgcaggagacacaggttcgatccctgggtcacgaagatcccctgaagaaggcaatggcaacccactcccagtattcttgcctggagaatcccatggacagaggagcctggcgggctgcagtccaggggtttgcaaagagttggacacagctgagtgttgatacgttggagagcatggcagtggattcacttctaatgatttttggtgaaagcactatgctccgagcagaatgagatccacagtatgagacaccccacgttgtacaagtgatgtgtccgcatcttcacttgggttttgggactagacacctgcctcccctcacctacttaatttcctctgtctgaggggccttgggttcccccacacaacccctcagggcttgaagtgatgctggttcccttagtgaacacccatgcttgttgttcttgccatcgactctctgcacacctgggatgtgcccaccaaggaagagcccgccagtgctggcataccccgccgctgatgcagcgcctggcacctaccaggccctcggcccgtgctcgcaggagggagggagggggacattcatccatttatgcaccatctctgtcttctctaactttctgtttttgtgatgaggcggtctgtgtgagttctgccttggtgtgtgggctcagattctggagaacggtgggcttctccagagacaagctcactttgaagtgcctaaccacgtgggtttgtcatctttctgttgtgaagacatttttagcaatagcgacagactctctcttatgctttagaataatgctgagaacttgcattaactgcgtagaggagaagaaactgtttagagtgaccgttctgtgttttcacttttaagaattttgcaaagttgactttttttggatgagggtttttgtgatttctgttttcatttattttgggtaaactatctaggacggtgattgctttctcatggtcagtatatgtttactttttaaaaaactgccacactcttttgaaagtggctcttctgtttttcaatcccaccatcaaatatatgagagtttccattgctccacatcctcatcaacacttatttttatccactttttaaattttagccattttagtgagtatgtaatatggcagggttttggggggcagttttaatttgctcttctttattactaataatattcaacatcttttaacgtgcttatttgccattaggacgtcttctttgataaaatgactcttcaaatcttttaatttcaatatttatttatttgtttggggtttggattttttattgaaatatagtttacttacagtgttgtgttagtttcaagtatacagcaatgtaattcagttgtgcatatctacatattgtccctaagtcgtgtccgactctttgcgacctcatggattgtaccctgccaggatcctctgtcctccactatctcctggagcttgctcagattcatgtccattgacttggtgttgctgtataaccatctcatcctctgtcgcccccttcttcttttgcctccaatctttcccagtgtcagggtctcttccaacgggtaggctctttgcctcaagtgaccaaagtattagagcttcagcttcagcctcagtccttgcaatgaatattcagggttgatttcccttagggttgactggtttgatctacttgcagtccacaggactctcaagagtcttctccaacaccacaattctacataaatatatattcattttttacattctgttccattataggttattacaagatagttaacatcatttcctccaaagctgactttttatgatgacttatattaaaagctcattagcattgacttgcccagacatgttattgatttgataaaccaaattcttgaatttataaaaacctttgctttagttttctcttattctgtaccatgtatcagacatttcctatatggtagcaggatggaaactttgggcattgaaactagactataaaataaatatacctggggaaaaatagtcaaagttaaaaacaaacaaataaaaactggtaactttgctccagagaggatatacaaagcttaatccttaaagcacacgttctagtttagcccaggttatgtgttcctcttgggcactggagcccgtgattaagagcacggaatctggagccactcagagtgctccctgggcatgttatgtaacctctctgagcttccatttcctctttgaaagatgaaaatgagaacaggacctatatccttgaattgctgtaaggactaactgagttggtacatgtacagggctttcagcagtgcctggcgtttacataagagttagctgctgttactgcagagatgaggcagatagaataagtgacctgttttccattatttgctctctgtgtgttgtacttgaaggctcagtgatacagaaaaagggaagaatcaagtccaaacctctctgggttacagagctgagtttctgtacgtcataaatacgggagggcttgtcagcagttcagcacacgggctggagttttgcatccttttatcacttacagctgcatatccttggcgaagtgacttaacctctgagtctgttggcctacctgtaaaacgggaataatagtggtacctgtctcatcgggcttttatgagaataagtgaaataataatagtactagccatataataaatttggaatgatgttaagctctaattatgagttcatactaatcataattcttattgatgggactcgtagctctccatttttgattagccatgggctgtctctctaaatgaaaacagtggcaaagctctgtagattaaggtaattgttcacatataagtatgagttggctatttttatcataagtatatcttcaggactcaaactttggtttcagaaacagtttaacaaatgtgtgttagtaagattaaactagagtattaaaatagtttttagaaaaatgtcttgaaattacaaatgaaaactaacagaatattttgagttataaaacgagctactaacttttgagatttatagatttattctctcatccctcatttattctgctcctgtcgagtccaagtgcaggatgtaaaggtgaataggacttcatgtctgctcccatcaggaagttcacagcgcagctgggagacagtgagcagctgcaggaccaggagtgaactgtggggtcagcgcaggctggtgtggggttctgggggtgcctgccagacacggaagggcgcccggaggaaggccatcagacttccttgcaatgacgtggcactaagcttgtggcattctgggcacctgtcttatgagtacgcactgatctggaaaaagatcccacgtggctactgaaaccccgggagcagtacttggcagggaaactaggagggagacagtggagggaacaaggggagggaagcttcttcacgggtcagtggtttacagtctttaaagagattacagtgaggcttaatatgacaggtaatagaccttatcagtctcttaatttagattgacagttctttgaataaatttgaactgggactagctgaaatccttcatttgatcaagtagacagttaaaagaattattatgcttcccccaccccctttttgttacggaagttatcaaacatgtacagaatagagtatggtgaaagtccacgtccccatgcttcagtaccaacacacagcccgtcctttgaaaacaaattcccttatgtggtataatttcttccattagtatctcaatgtatacctctaaaaaataagacttaactacaacacaattatcatacctaaagtagttataacttcttagtaccattaagatagaaagaggttgtaatgctggttttttaggttaataagtgaaatagaagtttcacttattaatagaatagtttaagtcatatatctttgtatgtacatttatctctgtaatacctagtttactaatttctagtttactaaaagtatgcttttgaattattctttatttgcatattgtctcattcggttcacaaactgccttagttcacattaaaatgttattattttatgcagaaactttaaccctctttaagtggaaatttataaaagtctgtgagcatagttggcttatgtaaagtactccaaggaagaacagagtgatcactttatagagtgtttactccacaaacaatcagcatgtctcagggacctgttggaaggggaaagaatttgtaaacttttttgtctgccagtgagccccctggtttagagggtggagttttggtgcttgcccagagaggaagcagggggcaggtgcaaacatagggcttggttatggcagggagtccacggtcctcgcgcagctgatgaaatggcacgtttgcaggctcctctgcttcgtcctccttttattctcttgggcaatgagattaggctaatgagcagatttctgctgttttcataataatttttcaaaagttggccgtaaatgtcacacagaagaacttccagtagtgcccccatttgatacttcaagttgctgcatgcgctacctgtgaaatacagctgaacacccgtggatccttgttcagcagcaaaggaggaacacctctttccaccttaaaaatgttattaactctattgctacaaatatgcagaagtgattttttaatgaagagaaaaggatattttggttattaatactctattcagtacatcaaataaaaatgtgagacagccaaagaaagcattctgtacatcacaatgcatttttgaatggaactagtttttgcagaaaagtgatttaaatccttgtttcagtaagcctttatttgaaaataggaaatccattttcatgggagtgtctctcggcagggtgtgaagtgtgtttttcttttggcttctgcatcagcttcaaattttagtttattcccacgagattattgttagtaaatcaggaattgatttagtcaatctctaagtcagagtaggtcacaataccaaaatataatttgatgaaagtatgcagtgtaggagacccgggttccatctctgggtcaggaagattccctggagaagggaatcttaccttggagaaggcttacccacaccagaattcttgactagagaattccatggacagaggagcctggccagctacagtccatggggtcacaaagagccactaacactttcacttttgggcttcccaggcggtgctagtgataaagaacctgcctaccaatgcagattagacataagagatgtgagtacgatccctgggtcaggaagatcccctggaggagggcatggcaatccactccagtattcttgcctggagaatcccatggacagaggagcctggcaggctgcagtccatagggccgcacagagttggacatgactgaagcgatttagctgcatgcatggaaagagtatatagcctatgtgttttacttttagattttttaatttaaaaattatttcaatttaaattacctttgtgttcaaatatatcttatggaaagtgaaatcaggctctttggagatgatataactggtttggctttctgtttctgattaactgtctatttaaagcttcaaagtaaaaccaaatcgatcatttgcatatcggtatctgtgaaggttatccaaataaaaataaggtttttaaaagataaatttctgctataatcagtgtttgctgattcaacaaagacttgtgcctgtttctttgctaagcttaggaaaattgaagttgaaaagatttttactttcaaggagctgatagtctagtaggaagacatagaaaaatagtaagatagggtgtacaaatgtatttggaacagaagggaatccctaagttgtctcaaggctgttgggaaacatacttggaagcctaggttaatggtcgttttattctgtaaaccttaacaaaaagtaaatactagaattcacttgttgattgcccgctatgtgcttggcactctgcttgccagtaggttcacgtgtatcagtatgtacatgttcatataataagtgtatgcacacatgtgttcatacacagtatacatacaaatgtacagacagacacatcagagatggagagatgcccttgtggaggggggtccagcaggaagagacaggcagtttacaagcaatgaccgtcattatcacagggacacagtttagactggtgaggcaggtggaaaggatgactatcgtctgagccagaagaatgagaaggagaaaaccaacatgaataaaggagggggaagaaatttctagcagcaggaaccatgtgttcagcggttacaaggaagtaaagaacttggcaggtgtgaagattgccggaggctggagccacggcagaagccagaccccagaacatcttacagagaatttgaaagagtttggatttcattcgtactgcaagggaaggccgacagagtaagtagcgggtgtgtgtatccggggaaaggagtaacatcggattcataacttaaaaagtatgagtatgtgggaaaatgactgttgttttctggttaggcgcatgggaagggttaagttaagaagcagagaccagatagaaggatgagggatgggactaggatgaagaccgtggggatggaagagacaaaagtggattccgggatattttggaagcagaattaacagaatttggagtaattagctattggagagagtgggcagctttgtcatcttctcagaaataggaagactgaaataggtcctttggaactggcaacacgcggaccattggtccccacgaggagagccgcttcggtggcgtgaaggggacgtgagccatgttggacacatcttgttaattctcaaaacagccttagcggccttgtccctgttttacgaatttgaaaggtttgaaagtgactttccagaattacccagctagtaagtggtgaagcaggcgtttggacactgtcgtcttgtgctcggaggctgtgctccgtccactctgctaggctgcctcgtggaggacttgtatgttccctgtcagatcattttgatttgaacatgtccactgactaacgatgttgagcagcttctcatgcgtttattagctattcatgtttctctgattaagtgactattgaaatattttgcccatttcttaactaggttatcttattgagttgaaagagttctgtattttggatacaagctctttatcagatatgtggtttgccgatattttcttccagtttgtggttgttcatttccttatttcttttgaagcattaaagtttttaatttttgtgaagtatcttttattggaaaaaaactaatgaattgtgcttttgttgtcatatctaagaattctttgccagactcaaggccatgagactttattctcttctagaagttttatcatagggtggctttcacttaattgtggaggtcatggaatccttctgtgaggaagtggtacttaggctgaggtctggaagctgagtaggagctaaaaaggggaggggagagatcccagcaagaggaaatagcatatgcagagctgaagtctgatgagattgtgtcaagtttgaggaggcagaggaaggagaccatttgggctgggggcagggagtggtacgtgcgagactggagaggtgatgggtctttcaggccatgtgaagcaggtgtgtccagaggctttcattaggcagggagtgacatgaccgtgtttgctatgcagaataatcactctggctactgtgcaggaaaggattggaagaggactgttgaagatctgactgaccagctaggaggctcttgaacagttagtgagaaatggtggtagcttggacccagaggaagtgggaaaattaggactattagggacactcatgggcttgcctgccttaagttctgcatggttgagcttcccaaccaggaggttataataaagcacgagtaagccagtgtctgtggcttctactctgttccctagcagacacctcttctgggttctgtttgttgggttttctttaccagaaggagatagtcctaatagcccacacacggcaatttagtttgaacgttttcactgttttccttctacttcacaaggttttggaaaaaaattaaaagccggttattcattcctatgtccatttcattaaaaaaaaaaaaaagagtaagtacttattaaacgctacacacacataagatcaagtccctttgttgtagaaaagtggcttataatctagagttgagtagtctcagatggaccctcctatactgttaattcaggaagttatcggggaaatgtgactgagtctgatgaatatgagagaacaatcactgtgccacaaactgtgagctctaacccacaattcaacaaaagatgattgtgagacattttcagggactatggtatcaacttgaactctgagcttttattttagttctaagatatgaaatgtggaagaatcttttctttgatttttccagagtgtcctttaattgactcagtgaattaagagaagcaaattactgtttctcaaagggattacaaaaaaaccaaactcactttatctttcaaaatacaacagaaagcactgggatttctagcctgatggtaagaagtatcttactcagaaaactaaaacatatagatttttttctacatgcttccattctgtctgtgaaattgatacctgtgaacaaatttcctcttctacaatttcctgaagtgtacagaaaatccaaagcttctttgacttcagttatagagaaagaggtaatgaaaggctgctataaagaaggaaagacaatgtgatgttgaaatccctttgccaggtcgttttagcttcttaagggcatacacggtaaatgtaggaccttttagaccctcaaaatttagcaattctagaaaatttgaaaatatttcatctcacgtgcatacccatgatggtaaatgggaaagaattaggattaagaaggggcttaaaaaaaaaaaaaagtcgtaagaaatgaactatcagattctgggacacgtaggtttttataagcaaacttaagtactggcaaagctgtctgagtggaaaaggcagagctacctgttgccaggagcttcgtcattaactgccttgaccatggaggatcagagtccccctgtgtacaaaggaaggcaggtgtaggacagagaaaggcctgggcagtgtgtggcagagtgctgatcggatcacttctgtccctctgggacactgtgtggttctgtctcacccaaactgagaacagaatatacatgtatctgtatggcgccatcacacataacatgaagtttgtgtttttaagggtttaaaaatcttaagtctctatccaaggccttagttcatatgctaatgtattcaaagaatacggaaacccagggctgctccactctttaatatagtcaattcagtttgtattactataccttcaggcagactttttcataagatagcaagctttggaggcttttttggttggtaggtttgtttttctcctctgcttatgaaaaaataaagtgataacctgaaattagttctgtttttgtttaaacttctttcttgagtgggtgtttcccgaatactgtgccttcttactcctatcttgtaattagtcatccatttgctattttcacaatcattcttaagtacctactttgtacctagaacaggggaagttccctaagaaaacagtatttctctgcagtggattggtgggcaaggcttcattctaaggaatatcgccattacctggaaagttcacggaaaggaccctgtcatgtcatcccagcttcagaaccctccaggtcttgttttaagagtggtagctcagcttatggacttttcttgaaaaagaataggcttcttatagatcttgctgctgtgttaagtacttatcatcgagtacatatgagggaattcccataatctcatgtatatgttgaactcttcatcaaaaggataaatatccttacggttgtatgcttctgaataaactcatttctctttcagtttctcggcccactttcaattgtcagccccaagggaaagttcactgcatcattttgtaaatgatggattggattttaaggagtggctcagaggctgtattttattgatcatttaggggtggcattatttttggaatgctgtctgcacccagcccgtggaagctagttccataaccagggatagaacccaggccccctgcgtcgggagtgtggagccctagccactaaaccaccagggaaatccttggatgccggttttaacggttcccaggactctcggccagcttgtccgcagtctctgggtcatggcgtttctgtattagagtggatcttgttaagctctggtgtttttgaacgtgtgctgcactggttttatgggctgatctgacgtcactgtccactgccagcccccgagagccagctgcaggcactcttggctcgcactcttggccttgctggcgatgcatgtctcttctcagcacacgtgatgagatgccagtttcccttcagccacagcgctctttcctgggctgctgtgtctgtctcctgcgtgactgtgccttgaacacccggcctgctgggactgccttccgtgcctctgctggcacgcagccagcgggaagcctgcttaccacccacctgtgcacgtgtccctttttcctgccagggtggttcccaggtcattcaccactcagccaggcactgagggcaccaggctgaacgtgtagggaaactctctcctccatctcttaggtttagtacctacaccgtgagcatcggcctgacaaaggacaggtattttttaaatttgatggtagtattttaatttgtatgtgtgcatggaggcctccatagaaaagaagtgaagacccagagcagcagttatactcaggggtttatataccattttaacaaagggtgtgataaactcagttcagggaacatgagtgtgtgcggacctcgtgggagacagggatcgctgaatgaggtttgctgcacagactccagtggctgccttctctgttgatgcctgctagggaaaatggggagcctgctttacaagtggaaatttacactaaatgcttcctttgcaccctgctttcagagaggggaaggccaaagagcttctcccacttccgctgtttctgtcgcctttagccatagctggaaataatccccctgccagggtggtgtatttgggggaggcatacccacagccctttaaaagacattgtatctgccctcgaggaacctagtgtctggtgggggggacagaggcaagcgaaactcatgcctcacagcaggagggagcaggaaagagcgcctgaaaggccctgcgtttgtcaggggggctgcagttgagctgagacccagaggttggctgtggggcacctctgagccaggggccctgcgggtcacaggcagggcaggggagagcacgtggttggttggaggcccaggatgttgaccacaagtcctgtgtaactggggaggcagtttctcagccatagctcctcagtaggggtctagtttccgggctgttctgatggaagtcctcactgtccataacagttgaagagaaagcaggaagagcagagcataagctaacctctgaacacagttttgaatcaagacagtgtgtctttggcacttcgtacttgtctctctcactttctggtccctctttctgctaggtgtttatttccctcgtggcctccctcctgaggccaccatcacggctgccctgccaccccctctcttggtgatcatctgtctttctacccgtttccccgccatctgcatgagctgttagtctgagagaagcattaggaagagagcaagcataagacactaagtcacattaaattttgaatgttgaaagtttctaaacactcctaaacataatattctcaactttataaaagagaaatgttgaatatgtgactctctaatggtgaaattttaggaagtagtttgaaaggaaaagcaggctgccccgtgtgtcgcgccccttcttcatgcagcctctccctccccttctggactctgggatctcgaggcccatcccccgccattgctcctggctgtgccaccagcctgtctgggaagcagggaatccatgtctcagccccgcaccctgttagctggctgtgctgtgcttagtcgctcagtcgtgtccgactctttgcgaccccatggactgtagccggccaggctcctctatccatgggattctctgggcaagaatactggagtgggttgtcatgccctcctccagggaatcttcccaacccagggattgaacccaggtctcctgcactgcaggcagatccagctgagcttccaggcattgagggacttagagtggaaggagggagggaccgaggtagccattcctggtactaatttattcgttaagtcactcatccataagcctccagcagctcataactgaaagtgataaatccccatttctaaagtattttctggaaataatgaggtatgatgggctttcaagcatgctgagatttgtcactgacccttccaggggcagaatgtttccaccttggggcacaggaacatttataagaggctggtatccaaaagcatgttgagctttgggtctcgtgtggtaattatttataggtgaaatatatgcactcttctgttgtaaatattgtgggaaataaaattcagagtcctttcaaaagtattcctgaattcataatagatctctgctgtcatgcattctctcagtaaattgtcaataaaagtgcacccactcttaaacttgaaaaggttcgaaaccatggttctagattataatttttcaactacttaatttgaaatgaaggcagcgcaagtgaaaacatgtctgaaggtaattgttttgactattactgagtgttcttcagtgttatttagcctaaagaaacctaacatctgaattattctatcagtgtagagaatccttatgctaatgtgtaacatcacactgaacctgattttgatctcccagcattgctccggtggagtgcagggaaatgcctgtccatccagtgggtcccctcccctgtggacaggacagctcctaagggggaggcggggtcagccccatgggagctggattccggtgttctgacctgggctgtcaggggacgggagatgaagagcagttcctcaactttgctttttccttgtgttaaaatgcagatgtcctgttagctagctgtacaaacactgggagctcagtctggtgctctgtgacacccaaggggtgggagggagcgccaagagggaggggacatatgtatacttatggctgattcatattgttgtatggcagaaaccagcacaatattgtaaagtggtcatcctccaattaaaagtaaattttaaaaaacgctggtaggaaaggtaacacaagctactgagggcggaaatgagcttcgttatgtagataacccttttattcttaaaaaaattttttttatttacttgactgcgctgtgtcttagttgtggcacgtgggacctagttccctgaccaggaatcaaacccagaccccctgcgttgggagtacagagtcttagccactggaccaccagggaaggaccgctcttattcttttgggttatgtcctttctgtgcatcttcagaagtggtacccttaggtgaaagtatagatttttaaaatcagattgctttttatgagtcttcttaacaattcatttcatgcaaacactggtaatgaaagcatctcacctcactcttgtcagaatcgtttttatattggccagtatgcagttggataaaaacagtatttcatctttgataaaatactgtgctgagcagtttttttctgtgaattgtcttttttctactgaaaagattttattgaggtctgatttttcctagtaggttgtcgttgttgatggtaagaatgacggccttttgccatttgcggcagctttctcctcatctgttgtttcccttttcattgtatttttttaaacatccaagaacgtttactgttcatgtgactcaggatctgtggattttttcaatactgtgtaaggtcccttacttgtaactttaaagatttaattcggttttctttttatttttccatatgtcatttttggtattcggttatttaattcatctcgtatgcccttaaattgattttataaataacgagctaattttcacattgccacttattgcaaaatgccttacttcctcatttgttccaaatatatcctgaattatatttgtttagcatatgatcaactctctcttgggggttttccattccaataatcagcccatctctttttgtttttcataatgtttaaattgttgttttgtgaagtgttttaaaatctggtgggacctacctaggcttcccctcaccccctccttttaaaaaatacatgattaagttttgatgccagaattactatgaaaaatccatcaactagcttttgattcttttccatacccatggcctttgaaaacttgaaatagtttgtttgtccattagattttgatatttaacagtttcacttcttgtgctaatgtctgtaacctgtatttttaaatcaaattattcatctcattgatgcttcaaaatgtgttagcctgtatttgggcatgatagtatggggaggaaaaaagttttcccctatcctcttagggtccttggctgagtctgaaaaataaaatggtaacatcgacaggagaaaagtatagatattaatgttaaatttgacatgacttgggggccttcataaggaaatgaagacctgaagaaacagttagacttgagtgttttgagccaggtttgatgaagagtggacgttcggggagaagtgtcgttgggacagaggctctgagtggcctggaggagacttcgcctgcgtgttggagtcttctctgtatcttgggggtaaggatgctcttctcctgtaggtacaggaagggaacacccccccatgaagaccttatgacctgcttcaagggcacgagcagggggcgtcagcaagcgcccgcttctgtttcctcaaagtccatatgccaagtcctgaaccccaacctcagtcacgtatttttcatctcttctgcctccgttgccataccctttgtcatatctcagtgcgtacatgttcttcttaatttttatttgtcagagtttatcattttaaacacagatgtaatatgacgctgtgtacgtgaatgtctaatggagatgatgtctctgcaaatggaggggacgaggacctgccgcccctaggtcagacctgggttcaggacaaagagcagagggtcacattttttgtctcctgttgtatgaagccccagggcctgtatgaagagccagggcctgggaagggattccacagaacgagagaataacattttctgattctgaaggtacttgtctcgcatcagtgaagacgactgatgagaagtcatggttgtttatatgctttggctgctgctagagactttcctttttagatgactttgtaaatatttagagtttaggagaggacatttctgtcatttccatgaattgtggcagcttccccatcttatatttctgttgtataaatagttgtacagagtacacaatctgaatagcgtggatgcacagaaatagttcatcaagagctgtggttctttgagtctggtccttggaccagcagcagcagcatcaccctggaattggttagaaatgtaaattctctgacccaaccaggtactgagtcagaaagtgagtgctggaaggcagtcatccagcagcctctgccagcagcccttgagttgattttgatgatgctataggcctactatctccatcacgcctttgaatgaactctgtaatagttgatttgatacttagacacaagcagctggtttgtactttgtctagagtgtttaattgtactaacaacaacaacaaactgtggagtttggaaggattcctatagcaatataaacctttcccaccccccaataattattaagtaggtcacaactcttaagtaaaatgaaggaatctgtcagataggattttaaaattctaggaaattgttaatagttgaatctgattttcttgaaatgtcactgtcttaaaaggtcctaaattccttactgctaatctgattttcaaaaaagaaagataggatttgggagacttcttcctgtcccaatcaaaagtaagtaaaaatagaattatactgtttaagagctggaagtgactttcttatggatatcatccaaccctatcccctttctaacagatgggaaattggaggcctggaggggtgaccagcagagagcagtagccaggctagggtcttctaagctgccttgttcctgcactaaagataaggtacagttgagcatttctagcttcctgctttgagcagacctggaacacactgtctctacagtgtccattttgctaatactctagacagtggtcatttccttcagggtaattgatagaattgttttaagtgttccagaagtttagatactagaatagtgtctgtttcctgtgacatgggtttaggaaacagctgctgcagtagctgctctgaaggactgaactttgtgacgtctccttacaaactgccatgacttgtctgagttacttactctgtctgaaaaaccagtcattattctaaactactacatttgaggtaagagttatcctttattagttgcatgtaaaagaaatgtgccatttggttcttgataaatgtgtgtgcatacatgcacatactggggtgtgttggagggagggtgaagaaaagttctgtaaagtcatttcacttgctttttaaaaatatgttgactttaacatacacagaatttttttccccaaagacttattttgaggaataagggaagagctcttataatacttttgaatgtgcatagaaataatatatggtataaaataactgtaaatctgtcttggaaactgattattgatgaaggctagacagaaaactcttaaaaactgtagaaacatagggcagagaagttggtattttaaatgaatatttaaaacctaccattctaggacagtattagttaaagctctatttgtccaatctgagacaatttgcattcatttaaggtgaggcagaaggttggggagactttaaaaatagttgagtgtgccttattgtgaaaacttatttgagatagaaataaaagttaactgttaaatggtaaaaatacagaagaggtgggggtttaaaactggaaggaaatcatgtatatttttgtcttcatctaacaagtccccagttcctgtgtagaatttttctaaaactgaatgtttttctatttaaataatagcaattactgaaagtaattaagaggaagttgagccttgtttctgacagacacctactctggggagaaggagaaggaaaggaaacgattccctgagcacacagtctgtgggtctcaccaaatgctggtgaggatgtcgaggcaagaggtcacccagacactggggatgggagccactctgcaaaagtttggcagttcctctcaaaaccaaaaggtgcactcattcgccatatgacccaagaattacagtcctgggtgtttatctcaaatgacttattttcttccggaagctggtacacaaacatttcatcacaacttcactcataatatccaggtgtccttcggtgggtgactagtcaaacttaactgtggtcccccccaaccatggacacagctcagcagcaaaaaggaacacgttatcaacatgagcaactgctgagacgaatcagggaaattccagctgaagaaagccaacctcagaagactatatataccacatgatttcatttatgtaacctttatgagatgatcatagatttggactggggagcagggaggggggagggaggggagggtgtgattacagagggcagcaggaggagccttgtggtaatagtaacatcctgattgtggttactcgtgagcctgcgtagagctcccctgccccgtacactcacacgcgtgcacacatgactggtgaggtctgaacaagctctgcggggtgtaccagagctgcagtggccgcggggctgcctgcagcccttggacttatggttttctccgggttgtgtgcccaggagggagttgccgggtcacacggcagctctgtttttggttctctttaagggacctccgtgcagttcccgcagcgcctgcaccgatgcccattccctttcttcgacaccctctccggcatttattgtttgtagatttcttgacgagggccattttgactggtgtgaggtagttctgatttgcattgctcattgtagttttgatttgcgttgctctaataatgagcgatgttgaacatcttttttatgtgcctcttggccatctatatgtcttctttgaagaaatggctattcaggtcttccactcattttttcattgggctgttagtttgacattgagctgtatgagctgtttgtatattttgaaaattaatctgtcagttgcttccaggggttaaaaccgcacttctaatgcgggggcacgggtttgatctctggttgggaaataagatcctgaacgcctgctgtgcaatgcagtgggaaaaaaaaaggattttaattttattcttagttttaattatttatattgaatgaaaaatgttctcaatcttaaaaataagtagcgattgctagaattttccgtaactcatattcaattttatcgttttctcttttaacatttctgtattaaagagactcccttttaccagagaggtttgtcctggttttccttgtatcatccatttccttcttcccagcagccctgggtgttttcagtcattaacacctcaccgtcttttattacttatcagctgtgttaaatggacttagttgtggaataagttgaaattgttcctgaaatgaacctgatggattttttatatttgatatattttgtgctatccttccctggtggctcagaggttaaagcatctgcctgcaatgcgggttcgatccctgggttgggaagatcccctggagaaggaaatggcaacccactctaatattcttgcctggagaatcccatggatggaggagcttggtgggctacagtccatggggtcccaaagagtcggacacgacttcactttcactttatgccccactgaaacgtataattgagaattgattatatctttgctggtaatggaatttttttttcttgttttgcgaaattatccatttgaaattgatagtggaggctagaatggaagttgcagttagataaagcttgagcaatgacctggagttgaaatcaaaggagacacgggcctgggctgataatggaattaaacgattacacctgactcctggtagaaaaacggcagcatcttttaccgtttgggttttttttgtttgtttttcttttaaatctttaggctagttgttgaagttctttaaatctttgtcaggttttcccgagtataataaatgacatcttagatgtgaacaagcggtcatttttccttgtagaaaatgttctataatttatgtcttccaatagtcattctcccaaattcaggtgatattaaacctccagatttgaaatactccctggtgttcttccatcatttctccactcccaaatgtagttgtttcttggcaaaagctgaactgataattctgaacaaacagcacaatcagaacacatttgctcaggcacctagctgggggtgaatccttagccacttagcaggacagttatctttagtatctgctgtgtgctttcgtcatgactgtcctgagtgcagagctggtgtagagtaaatgtacttagttcagtgaatctggcttagaattcagcaaagtgggagatgacaaagggagcttggggatgtttcaaataactaggaacatgtcttaaaacttaaaacagtgattattttaagtcattttaaatttgctaatccaaccatcccctacctttcgtgagggctggaatgttattagatttcattccaatatagaagacttaagataaaaactacaggacttatcattcagaaacacgagagaattggacttttgaggcagaagtcttgagaagaaagttttcaagttacgtaattatacatctatagaaaatcttaagataaaaagatactctttaatgaaaacccctttgatgatttctgcattgatctttgtttctgagctgcctattttggaaattttttttaagagttattgaactttgtttgaagtgtttgaagcatacttaatctattcgagggttgacttattctaatgcacttggcagtcttcaagcatttgagcagatagggtgatggctgaagtgaaataaatgaaaagacatcctcttgaattcccttttccctcttacaagtacactctcaattccttgcacatttaagtaagggcactgataggtgacttgttctgaagagtctgcacggggctgagagagctggggtgcctccatgagtacgggatgccgtactcatccaggtgctggtaatatttcctgtcatgtccttttcctaatagtaacgctggtcataatattagccatcagctcttggtcaatactgtgtgcctggtggttctcatgttacctcctgtttaatcctgccaacacccgtatgaaataagtttctctctccctgaggcccagcaaggcccagttaattgtagctggtactagacatccttgcttgggtttcttgggaagcagagcctgagacaaggattttgctaaaagtggtttgggaggtgatccagggatgtaggggtgagagggccaggaggaaatgttgacagagggatgcactgctggccacgactgcagccccaccaagatcctggagacatgttcagaatgcctccagagttgcccacccagtggctgggaggcagaacgcgcatgccctgactgctacctccgttcccagaaactcctgtgctaggccagcttataggccccctgagcttgagaacttgaaacatgtgagatgaaccttgagtgaagatctcgtgggtgtacggatgagctcacagagaaaccagaggtgggctaaagccggggtggtgtggcgtgcagaagcatctgctaaaaggggaagggcccgagccagccccgtgctctttccaaaccatctccctgtggggagagaggtttggggggaggaggcgcacgtcaaggtgacaggtaaattccgggagtgtgcagtgactgtcagtgagggactgcacattgtcgcctttcccttgagtacagtcgggaagatttaagttcctgttagtactggttcgcattcactgcatatatgaagatcaggatacaggaatatccagagtattctaagtgttgacgactgattaggggttaaaaatatacagcattaccaagttttcacagtctctgcatagacggtcatgttgtgcctgggagctgtgacacagtgttgagtatttatggagggaatgattaaggtccatcctgtgaggcctcagagaccactgttcactgcaaattctggtcttgctttttggttaaaatcacttggtaacaccatgtactttctcaaagagttttaatttttttatataactgacatataacattgtaggacttgaatgtacatcatgctgatttgacacattgtgttgcaccatgaggaccagtgtggagtccgctcacacctccaagttagcacaaggctctgcaagcttagccccctcagccaagtggctggttcacggccaggcgctcttctcgcagatcctggtggccacgtgcttgctgggcgtctcccgtgtgccgggccaagccgggtgaggtcaaggcagatgcacaggtggcctcatcaacgagattgaccctccaagtgggtatttacatccgttccggaaccctgaccccgatctctctgcatcctcagctgaactcgatgcagaacactcccagaaggtcctggagatggagcagacccagcagctgaagctgaaggagcggcagaagttttttgaggaagccttccagcaggacatggagcagtacctctccacgggctacctacagatagcggagaggcgaggcaagtcggggagccccctagagggggtgcatgtggggtgctgcccccggagtggggctggggtgaggcctcagggtcttttgttactacaccagaacccaaaactggatgcgacctgccattcttgtcttgctgttgtttttgcctctccaggtaggtctagtctttcagtgaaggtaaaatttgggatacgttatttaaaaaaaaaaaaaaaaaaaaaggcaaaaagagagaaatagtagccataaatctgtagcacagactaatccctattaccatttgaaagtaagtgaaagtgaagtcactcagtcatgtctttgtgaccccatggactgtagcctatcaggcgcctccatccatggggttttccaggcaagagtgctggagtggttgccatttccttctccaggggaccttcctgacccagggatctaccccgggtctcccgcattgcaggcagatgctttaccgtctgagccaccagagaagccctttgagagtggtgtttttgtgtgtatctaatcttccttcatgctgcatggggatccttccccaacattatcaaaaagcctttccaagagtggcgtctgcatggtcaggacgcagcctagcagtttcctaattggacatttaagatccctggcctctgtaaggggcttctccggtggctcagctggtacggaatccacctgccacgcatgagaccctggttcaatccctgggttgagaagatctgctggagatgagataggctacccactccagtattcttgggcttcctggtggctcagctggtaaagaatctgcctgcaatgcaggagacttgggttcaattcctgggtcaggaagatgccctggagaagagaatggcttaaaaaaaaaaaaaaaaattggtgctgtgctatacatctagatgtgtgaatgctcgtgtctgtggaggggccggctccggagcagcaggcagtgtgaataagtgtcctgggcttcctggccttccaacccccttgcaaacccctgtgcgctaagttacttcactcgtgtccactctttgtgagcccgtggactgtagcccgccaggctcctctaggtccatggaactctccaggtaagaatactggagggttgccatgtcctcctccaggggatcttcccaacccagggatcaaacccatgtctctcatgtctcctgcactggcaggcgattctttgccactggcgccaccggggaagcccctcggcaagccctgctccctcccagatgcctctacacgcagccttcctctccttgcctggccctgttctccatatcctgccccctcattgaagcccctaattaatgttaccctcactccggtccctgtcattcaactctgtgctcctgcaggagaggttaagaatgaggaaggaaaagcatgtagagaagacactcaggtatgaatgtgtcagaggcactggaggctgtggtgtggacatagtgctttttaaattgaggggagcagtgccgtttgggtgctgatgggttaattgagctgtgccaggtcttagtcgcggcatgtgggatctagttccttgaccagggatcaaacccaggccccctgcactgggaacgtggtcttcagccactgcatcaccagggaagccccaacagtgcagatcaagtgtgggccgcctgccccgagtcccaccgtcatcttcatctattccctgtggcgtgtcctcagggtcaggcacgggtgagggacgcctccctggtctgctggggtgctgtgcctccacctcagactggcaccttatgcacaacaggctctcacgctcttctggagcttatttggttccagtgagggctctggggtctcttctcaggagggcagtgattcccatcctgagggccccaccctcagcacctcatctcaaataatcacctccctgcaaggtgtgtgtgggcaagtcactcagtcgtgtccaatctttgtgacccccatggactgcagcccaccaggctcctctgtccatggaattctgcaggccagagtactggaatgggtagccattctgttctccaggggatcttcccaacccaaggatcaaacccaggtctcctgcattgcaggcaggttctttaccagctgatccacctcccaaaggggttagggcttcaaggtatgaatctgggagggagggcatgcattcagtccataagggacaaacaccacagatctgagcataatgagacagcaggcggcaaggggaggggagctacgagcagctgcgtgcaccacttagctgagctcagcactttcagggcacccgcagcagaggcagaccttgaaagtcctttcaggagctcgcgtctcgggtccacagcttgagacccacttctttagggtatgtcactaggaaagtgattacctggtcatatggcgagcatctatctagccgtagtgggtgctgtcacagtgctccccaggatacccacgtgtttacacttgcccagcgtgcatgcctgctcgctccacagctctgtcaacacttagttgtgtcagatacttaaacttttgccactctattttggttttaatttgcatttccttgactgtccatctttctactggttgtctccctaaagagtcttaccagacttttctgattatatctgtggctattctaatgtggcctttgcaaaatgcgtttattcttaatgtgaccagctgagcccacttttgtttaggaagcccttccctccatgttataagaacagtatggtgttttattccagaagttcaactgttttccatttggcgcctcaagccactgccagctggtccgtgtccatcgggaaggctctcactgcagttcttcacagcagtgaccgtctccacaccattctctcctccactcacagtgtttctgaagcctcagtacattcctgaggtccttttctgttccactcttctacttatctggcctgtgttgggtgtaatttatttctgacactgtcagggacccacgctttcctgggggaagagctcaactatttttctcttatgattctagaggtttgctttgcttttgcgaatttccgatggatttgtttagattctaatcttcagatccacataccttacagtctttgcagtccttggggtcaggtttgtattttgcacccctcaggttaacttgtgcctttaatctttcttcttggtatattctctaaattttgctaagtaatagttcctgggttttttaaatttttttccatcaagatttatttgacttgtgaagttgtttagaactgttttttaaatactaaatcttattgtggctggaaaagggggtttcttctttgattcgactgaccttatggccttttagagcattttcttacatgttgtgtgtagttaagaacaagattctaggtgacaggcatgaggatctgtaggtgtacgtttcagacgacttgtaaattggcctgttcagatgtttcctattaatatccattttggattgcttaattatcagaggtacagtaaaccttccttttcccctcaattatggactccttacatttttccttgtcatgcttccatattttactttaaaaataaaaccacaaaatatatagtcacacaaatttggaattaccttcctggtgaattgcatttaaaaaaaattattaaatgctatgctttaccccaatattgcttttctttccctttcacatctattttgtttgatagtaatacagccatatcagctttctcctttaattatttgcttgctgacttcctattttcccttacattttaaatgtttctaatattttaagagtgtctcctataaacagaatgtaactagacctttatcaccagtaaaacatcttccatcttcaggaaactagaaggcacctaatgagatggtggtgaagtggccacagcaaatggtaaaggaccaggtttgccacagaacagatgatcaaatcggcttcgttactaccttttctggtgcttcctactctcctgaaaatgtttcctatgcttttcagtccagtgttttttttcctcccctttgtaagaggacagccagagaaagaaaaaagggagactctgctttcaaaactgaagaaaaaaagcccagagccaccaaggcctccccagccccagagaagacccgtgtgccccctccacttccagcagtgcccccgccttctccaggaggcagccccaaggggagcaggctcacctgccaggccagcctcgcaggcccttggatggcaccgcccagtgtgcctgtgacttctggcagccaagggtggtgcggatggcaggtgccacccgctctgccacctctggtggctgtctccgctgtcccggggtcacccccacccccagccttttacctgtgccagcggtacactgcgggccccgagacgagtagattcctacctccccacgggacaaagctctcacctcgtgccccatcccatcagcgtcatccagcccttccggctggagtaactgccctgagttaggtattatcttattcggagctttaatgtttactcacacttaagacgctgtcttcactgaacatacctccctcctgggccccccaacttccgctggtctggcctctccggagagcaggctcagggggcattttacacatctcaattttaagagatggtctttagtttacctctttgaactttccattccactgtcttctgcctcctgctgttgagaagccaccagcatttcctcatctttcctgatctgccttttctctctgatgttcatcatttcactgcagttcaggtgacggtttatctgccttgttggaacgtactttgctcctaagtctctgggatgtcagatcctgcagcaggcctcagtcatcagcctcttggaatactgatcatcctgcctccactcgcattttgaactgggaaacttctgcactttttcatacttccacttgttcatttctttgctatgtagtggagaacttatccagtcttctagtttactagcaaaacttttaacttgtgccacagttttaaatttcagtgatttgtcctatttggaagttatctggctcttttcaaatgcctgtcatgatttctgacagtgttccttatctgattctaatctttaagatatttaaagccatttagattcttggggaaagattataatcatctttgtttctgctgaccctcactcagggatgtgtgtgctgtaagttctagactggactggcttttgtgtggagtttatattcctgttgagacccaggttaaagatgggtccacatccagaaatttctatctgcttgtgacaggcaccatctacttaagctacctggcttgtagttttctggatcgcagaactccagaccctggacacacccctcaccaggctcagactccttgccctgtagcgtctttatgctggtgggccgagtttttgtcttagtttgtgctttcaccgcaggaagctcttagttccaactcgccggcttgcagcagacccaaccttgatctgttgttaagatggaagacccgagaaatgtcataagggcagggaagatgccaaatggaactgtaataaagttagaggcgaccaccaccaggtgtctggcaggagtgtcagcctcttttgagttgcagctgtttagtgcagaaagggttgccttcagcacatgcaagcacatggctggggatgaacagaggatctgctggggagggtctaagaggtaacagtaaccatggttaagctagggtggatttaaagatcaaactgggacatgtcaataatacattgctccaaaatcaattttgaaggtagaaggtattttacacccagaaaacacaacgtgctaatacctaatgcagtggaaattcacccagggcaaatctaacctcctctcgtggcggtccctgcagagcccatgggcagcatgtcgtccatggaggtgaacgtggacatgctggagcagatggatctgatggatctctctgaccaggaggccctggacgtcttcctgaactctggtggtgaggagaacaccctgctgtcccccgtctcaggtaggggtgaaaagcctacacagacataatcacaatcactcttagcaccatgatttccctctggctcggtgagatgccgtgtgctaagctgttccactgtcccccagggtctggcgtcacagacctggacacacaacacactggcggtcgcagccatggatttctcaaaggttctcagtgcttttcccagatacggaaacggagtttttcttaaaattgcgtttttattttctcctctgtctgcaaagtctgacttgggtttgtgtggttaagcactagattttggggaggtggaggtctgtgtggctccccgccctccccattcagtagatggtatctgatgctgggggcaaggccaaggcgtgagttcagccgtcagcttatgttttaaaaaactagcggcaatcctgggggcatattctctccatttaataacttaccataatctcacgttcatttagatctttactggtgctccagcactatacctggcctctctaaatttcagaccatttctcctgggtgggtgggctttgaggctgtcgtcatggagaacatgtgtttcttccatgctccgaaagacaggaaggccagcccctcacagcacctgcctcctacctggtggtcccacaccaagggctccatgtcctcagtcaggcctgggggcttccccttgacctgtgtttccaacagagcagctccttcctcccctccccagtggcaggaaaagactcctatcacctgtgtgaggttttggttcctgtaagaggctccacaagcgtttttctcgtaaggtccatttccttgaaattagttcagagaccataaagaggtaaacctggcttgtcaaggttatgaggaacgcaagttgcacctgcagaacttgccattgggtcttcagcatggtgtcatcggaggctgtgggaagggttcggggacagaagggtcagctggagccccaggtggcctcggggaaccaccgagctcagcaccatctacaagagcttcctgcacatcgcggaaacagagaacttccaccccctggattcgctgcaagttcaaacgcgcgtcgtggccagtaacgctgagatgcaggacttccgtgacgggctctcctctgctctcccccccagggcctgaggcaagccccagtcaggatgcagtcactctccaggtgcccactccctcccagtccccagccacaccaccttcctcatcctcacctggtaccggcccggcctcccgagaccccagtgaaggcggggagtcgcccgtggtccagtctgacgaggagggcgtggaggtggacaccacccttgccaccttacacactgacgacagcgactcctaagcccgggcacctgcgcgccaaccaccttgaaggacaatgcagcgtgcacagaggcccgtggtgaaggcgggtggacttggggggggggggggctcttggtttttacacaattgacaataacgtgaggcgggggctcttggtttttacacaattgacaataacgtgaggcaagtgactgcaacagctaacaataaagtctgagaactttaaacgtagccagtttgtacagaaaggctgctaaatacacatgccctgcaggtggggccagggagcttggcatccacagcagctcggcgctggcgagctaagccccttgcaggtaggaaatcgggcctcctctcagctctaacagagttcgggcagaatggtcaagtccaacaacagtccctagtttatttaatagcacagcacacctgggcacaggaggcaaaaggaaacatgggcccagtccccacgccgtttcgctcctcaccagaccccggtcccagaggggtgtgtttcccccaccaccactcaccactgccagaaaatgagattaaaactcggtgttcacaccactccctggccaaggggatgtacccttagccctttgatcagtaaagagctgatttcattcactcatcttccacaagacaaacaggtgtccaaaaaactttgttttattattaaaccttgtagtacaaacctgaaaagtaaacaaaaaactggcaataaa

SEQ ID NO: 63 - DNA, 32621 bp, Hippotragus equinus
  source 1..32621: mol_type = genomic DNA
aaccataggaaatacaatttccaataaaggtaagggtttggtgagtcaaattctgttcaaattgcttcacatgtattaaatcacatgatccttctaattatccaaggtcagttaacgccagagccaagattaaaattcagtttagttccagagcttatacttaatcactgttttacagctttttccgttaggcaaataaaacaataatcatcactgaaaaaagataaggtgtaattttattactttcaacactgcatcacaatgaataaaacaaactaaagtaacacacagctttacaaaaataaatttttattaaaagcagtagagtctgagcaggagacagtacaaagagtgtaaacagtgtaaacatcactacattcagctcagcctgattgaatgctgacagacaactctaaatgctctatgtgcccttactagcaggatacattagttctattgtacacagaaaacacacgctgattttgattgggaaaagtactttatcgcagtcggtcccagcgccaaatgctggcatcatcacaaacagctataagaatgctgctgtccctgctgaaactggtttgtcgaatagcagccccacacttgtgatgagtcagcgttgtgcatctaggaagaaaacatgacaacaggttaaatatcacacacacacaatgctgtcagtatcaaacttaaaaatagtgaatgtaacttactaccaaagtactcaggaaaaataattattattagaataaaaaagaaataattcacaacatgctgagaatgtaaatgttacaaaaggtgttaaggatggcactgtaggaatcaatcacttactctatagtgacaacatgctggaggaaaagtcagaaattatgaagaggaatctctagatacttacttggctttatgaggatcttctacttctaaatcccaaacataaagtttgccaacttgattgcccagtgcaagcatctgtataaacatattttaaaaacccatcaaaaacaaaacaaaaacctatcaaattattaatataagctataaagatttcaagcaatccaaagatagctttcttattgcagaaaaatctcagctccaccctatggcaatgctcttggttatttctttgcatcttatatttatgatttgtaaatgaagataagagcaactaatgcttcacaaaggtgtcctgaataaattaagccattttgcaaatttttgaagaactatacaatatacacaattagcatatattcttcattctgccttaaagaactataataaaagccacagaaaatttccaaagctttcatatagaaagaaataaccaagtaatgtgttaccataaaattctaataccaaacttctgtaaaattttagataactaatattttgtctctatcttccatgttggttttctatataagatgaacattctaatcaccaaaacattaaatcttagtaacagatgttatcgaaagtaaacatctaactgccaccattgacacctgtcaatttcatctataataagcattgcagatggtgtgcagagccacaagggtagaataaataacatcaaaggccaaagcaaataatacaaaaaatcaaggtagattacacttaaagaggaaagagaacacagatgcactcagataaaactaaaactgcatcgttttaagtcaaatactttcaaaatgtaaattatgttgctaccttttgccagaaatccatagaaaacctcatgtaccaaatgtcacactggctgtaatcaaatcgcccaagaatagtcacattagactcactgggtttaattttatctatatcatcttccattttgccaggtttccagcatacaatggcattttcacaagactttaaaaaaagacacgagataaaaaagaaatgttaattgtagaactgaattttaaacattataaacaaagctttttctcaactgtcatttcagaattcacagctctttaaacctggttatccctcaactgagtccaatgatacacatattcatttgtatttgcagaatcagtatctacacttacagattatcaagattttaacaatacaaaagcattacactatctagaatattcatttttgaagttacaacttctcttccaaaccaagtttcagccttagatactttagcatacagagacttaagtatttcacagcgaagataaagttattagaatacacggttcttcaatacggcccctgctaattccatctttccctatttcacttccaatttcctgcggttccaatctcctgtggttccctttatacagttacctattaatcctttatctgcagtatctgtactacatggtaggtactcaacagatgtaggaaagctaatgaatttatagaagggccttacagatcagattatacagaaggcaataaaagcagttactcagtatcctgacactggtaagaggacgggagtgaaatcggctgagttacaccttgtctgtgctgcaacagtgaagtctttacatacattctactttaggaacaagcggtgaagaatgcaatgggagaagaaagtgcaacacagagggcactgtttatattactgtgtaggctagtggtttgccagttaagggatcttcggcaatgtctctggcttccagttaagagaggccagagaatgctgtacactgtaaagtagagaatggctcctcccacaaaaaagaactgtctgacctcattatctcagacccaggaccgagaaatcctggtggaggtgaagggtgcttactgacattttacaggacacattccacacaaccacatatggtagccctgtggggttcactggcatttcaatggtttaacagcacagtcatagggagataagagagtgaagaacatgttttcttcttctctgccttttttagattatataaaaccccagggttgcagatccattacacaagttctttattgtaaagtaccttagagagcacccagtctggtgactcttttaaatgcacagttggattgacagcctgtagagctttctttaaaaacacatcttggccccaaccccactgaatcacaatttctgagagaggaggccaaagcagcagaattgtaacatagctcttcaagtgcttcttactgactgtactggcaaaggacccttagtcagtagagtcccgtcacagagagctaaagcatagggaggtaaagagtctacccacactaatggatgcctgtacttgaaagtcatccagagagtttctaacaattacaaatccgcaggtccctgtgccagatgtagaatacatggggatgaagcttaggaatctgttttacaatgtcctcccagtagttctgatgtggagccagatttgagaccacaatactcagttcagcctcttacctaaaatgcagaaatcttttcctatcatctgattaagttctaagagcagaaattttagacctactgcctttttacatctgcttccagcaaccaatgaagtagaggtacttttccctattcatctcactgaatacaacttagaagtttgaagggcagggaggaggcagactggtgaaggaccctgggacatgaggggcactgagttctttggttttcttttgcctcctttctgtatcccagactgcatgctagagaaggcagtgactcaacaaagctaaagacaaaacaaagacccccaaagcctactctctccaaaggaccaggaagtggcaacccagcgtgagagaaaatcttcaggtaaacaataccacagaaaaaactgtggacccacccacacatgaaccagcaaagtcccagtggggatcccttctcacaggtggtaactaaacacttcaagtacagaataccctgctgactcctccctacccctcatagtaatgacgtgactcctcctcctctctggctggggttgtattagaggcggcgtagcaaagagtcaagagaagtgggcgacagaggatgagatggttggatggcatcactgactcaatggacatgagtttgagcgagctccgagaactggtgatggacagggaggcctggcgtgctgcagtccatggggtcgcaaagagtcagatacgactgagcgactgaactgactgactaaactgagcagagagccaggatgttcacaaccacctaccacagtgtcagcagagaccacccagggagcagtcatgagggctccaaacccctccctgctagggtggtgtcagcagagtccccgtgaaaagcctgaactcctgccccacagaaaagagacatcaccaccaagtcaaccaagtggggaatgtcccctgccacctgccaatcatgaagcagcattcactttacagctgaaaatgtatcaaaggaagcctgctgtaagagagctaaataacagcccaagtttcctaacagtacccaatatatccatatctccgtcaaaattcatttgtcataccaagaaatgtaaaatctcaactttaatgagaaatgataacaagagacacaaacaatgagatgacacagatgttacaactgtctgacaaggattttaaagcaaagagtcggacacgactgagcgactgaactgaactcatcataaaaatgcttcacccaaatacaaaattaaaagttcaaatctggaaaaaaatggttcagtaagaaattacaaacacacttagaatacagtctcagcagagaaaagaaccatgtggaaattttagaactaaaaatactataatcaaaataaagaacaactgctcaccagcagaagagagatgagagtagtaaattcaaagttagaacatagaaattacccaatttgaacaagacttgaacaaagaagttaccaactgaacaaagaaaaacagacttattaaatgacagtctcatggaccaaacgaaaaatctaaagtaccattagaggagagcagggagaaaggggggggatacaaaagaatttgagtaatggctgaaaaaatccccatatttgggacgaattatgtcccctaaagacctacagattcaagacagtaaatgaactcctcaaagacatcaatatcaagcagagcacagtcaaacttctgaaaactaaaactaaaggagaaaaaaaaaaatccccaaagcagttaagtcagaaagaataccttagctataaggaaaaaccaattccaatggtggcagatgtctcattacaaataacagagaccagaaagagggggaacaacattgttcaaatgtttaaagaaagaactgtgaacacaaaatcctctattcagtgaatatacccttcaggaataaacgggaaatgaggacatccctaaactaagaaaaactaaaagaatctgtcaacattctaaatcaatagctacagaatgttctaagaacagaaaggaaatgataaaaggaatcttggaatattagaaaggaggaatgaacgacagaaaaagcaaaatgagtaaacacaaaattctcctttccttcaagtttttaaattctgcttgatggttcaagcaaaattgtaatattatttaacgaagttctcaattgttaaggaaatatttaaaacaattataagtgcaggacaaagtgggagataagctccctatactgcatttgaagtggtaaaaggctaatatactgatgatcacatacatatattgcaactcccagagcaaatataagaacaaaacaaactacacaaagaaatatacttagaggtagtacagagaaatcaaattggaattttaaaatatgtgcatataacctacaggaacttaggggagaaaacccagagaaatgcaaaaaaaaagaggccagacaagtaacaattgaaaagttaaggctcaaatataaacagtctaaatttacaagctaaaacagtttctcaaagtgaaataaaaaacagtatgacccaactgtatgttgtaagaaactcacttcaaatgtaagaatacacgtagattaaaggtgaagggtttgaaatagctataccatgtaaataagcattaattaaaggaaagaaagaacagctatactatactataagataccatacagatatactataagataaaaggagacatcaaagcaaaaaaatctaccagagatagagatggaccttccacaatgacagaagggtcaagctaccaagaaaaagcaatactaaatgtgtatatgctaaccaacagagctgcaatatgtcacagaactgaaggagaaagggaaaaattcatgattatagttgaagacttcagcacttaagagcagacagacatcaacaaagacacagaagaattcaaccacattcaaccaataggatcttggagaaggaaatggcaacctactccactgttcttgcctggagaatcccagggatggggaagcctggtgggctgccatctatggggtcgcacagagtcttacacaactgaagcgacctggcagcagcagcagcaacaaccaataggatctagctgacatttacagaacactccacccaacaatagaatacacgttcttttcaatggaacatacccaaaacagggtcataaaacaaatctgaaaaattttaaagaatcaaaatcataaagaatatatactgactgaccaaaatggaatcaaactagaatcagtaaaagaaagataatgaaaattttccaacacttaaaaaactaaatgggcttccctagtagcttagtcagtaaaaaatctgcctgcactacaggagacccaggttcaatccctgggttgggaagatcacatcccccgaagaagagaatggcaacccactccagtactcttacctggaaaatcctatggacagaggaccctggcaggctacatacagtccatggggtcgcaaagagtcggacatgacttagtgactaaatcactaccaaaaactaaatagcacattgcatatcaaaatttttgtgagaagcagctaaagcagtgctgactgggaaatttacagcaccaagagcttacattagaaaagtcttgactaaataatctaagctccccaaactagcaaacagaaaaccaaaatacactcacaggaaactaaataaaggagacagagggtaacaaaataattttgacaaactcctaaaaagactgacaaaagagaagatataaattactgatttcaggaatgaaacaggggctatcactaaagaccttgcagatatcaaaaggataataagagaatattcaaacagctctccacacataaattttatattagatgggatggatcaattcctgaaatagcacaaactaccacttccctggtggctcagacggttaagcgtctgtctacaacgtgcgagacccgggttcgatccctgggtcgggaagatcccctggagaaggaaatggcaatccactccagtactattgcctggaaaaacccatggacagaggagcctggtaggctacagcccatggggtcgcaaggagtcggacacgactgagcgactttaccttaccacaactcacccaatatgaaacttcattcaaacaaccttttcacttttaaggaaatcaagtttttaatttttaaattcctcctcaaaaatttttaggcccaaatgccagtattattgatatcaaaaccagacaaagataagtaacaaaactttagatcaatattatatctcattaatacacataaaattcttaaaacaaaatattagcaaacagaattcagcaacatataaaaagaattataaagcatgaccaagtaaacttattcaaaaacaatcagcgcagtccattgcattaacaggctaaaatagaaaaaaccatgatcattatcaattgatgctgaaaaagcatttgacaaacttcaacacctattcatgataaaactctgaaaaatttaggcaaaagaacaactctcaattggatatagaacatctacaaaaatcatacagctaggacttccatggtggtccagagtgtttggcaatacaggggacattggtttaatccctagcgggggaactaaaatcccacatgctgcagggcaactatgcccacgcaccacaaccagagagcccatgtgtacgaggaaagatcctgaatgaggtgacgaaggtcccgagtgccgctactaagacctgacacagtccaaaaataagtaccagaaaagaatcatacagctgatacgtataattgcaaaagactgaattctttccccctttaacatcagaaacaagcctaggaagtctgctcttaacacattactgaccagagacattaatatatcttttgttacctgaatgctattgattggagatgtatcaatatgtttttagagtgatacaatcaatatcaccatgtgaagttgttaagagcttaaattgcaccaagggttcatcatacaacttatgactgtcattatcacttacattttgttccatcaggcttttgttccaactctgtgtatattataaacataaaattttcagaagtgacatgtcacgaaattttgaggaagaatttttcagtgaattttatgcggatacgttctatgtctaagtgacatatatactagtgtctcagaagatgatagttcttcagaacttagttaattcagatgatgtgaatatcagaccaacaaaaaatcttagtgattgattctgatacaaagagaaaatgcaatagtgctggagactgctcctgtacttctacagaaaggtggattgaagacaacatttcacaaaaattggaggaattacaggtatgtcaggtgtaactgactacaggcacctgtacagtgttagtgaaataacagaactaatttttgaccggtcaaaataaatatcaccagccacaggagttagtttctgcaaaaatcccccagtcattaatgagttaacactgctattcaatgtagcaccagaaacttgtcagtgaaatgagacaaaaaatggaaagttcttttaaaattcagttcagaaaggaagggtacaaaaactgtccttatttagagatgaaatgatttacgtagaaaatcccaagtaattagccaaaaaaaaaaaacaccccacaaaccacccttcttgaattataagtgttaaaatagataggattcaagattaatagacaaaaataaatttatttctatatattagcaatgaacacaaagagatggaaatcagaaataccatttattatagtcactcaaaaaagagacatacttaaggtatacatctaacaaaataggtagaggacttgcatgctcaaaactacaaaatgctggggattccctggtggctcagtggtgaagaatccatctgccaatgcaggagacatggcttcgatccctgatcgaggaaaatcccacatgccacagagcaactgagcccatactctgcagttatggagcctgtgctctgcaacaagagaagccactgcaatgggaagcccatgcaccaccacgagagagcggccccgctcgccacaacgagaggaaagcctatgcagcagcaaaccccaccacagccaaaatcaaaataaaaagttatacttaaaaaaacctacaaaatgctgataaaaaatcaaagaaggtctaaataaatgaacagacataccagtcaaggacaagaaaactaggcagagtagatattaattatccaccaaactgatgcacaggtttaacacaattccaattaaaatgttccttacccccaaagaaattccagcaagattttcagtaaatgtagacaagataattctagaccttatacagaaaggcaaaggaactagacgaaaataattttaaaaaagaataaagtggaagaaattactctaccaattccaagacttattacagagctagagtaatctagcttgtgtatgtagtgctggtagagggaacagaacagaataaccagaaacagcctcatacaagcatggccaaacaattttgaaaaaagtgcaaaagcaattcaaaggaggaaagataggctttcaacaaatggcactgaaacaactggataaactataggcaaaaaatgaactttttacctaaatgtcatacaaaaactaacttaaaatggaccataaatttaatataaaacattataaaaaacttttgaaggaaacacaagggaaaatctttaggatccagggcttagtgaagagtgtttcaaaataaaagcaaaagcattatccataaaaaaaaataattaaaaaaaaatcaataaattgaactttatcaaaattgaaaatatttgctctgcaaaagaccttgttaagagaatgaaaagacaacctacagactggaagagaaaatttgcaaactacttatctgacataggatttagaacatatgaagaactttcaaaactcaacagtaaaaaaacaaaacaaatccaattagaaaatgagcagagatacgaagagacatcattgaaaggatatgtggatggtaaataagcacataaaaagatgatcaacaccactaaccatcagggaaatgtaaattaagaccatgatgatgtatcactacacacctatcagaacagctagaataaaaaatagtgacgataccaaatgctggcgaagattcgaagacactgcatctttcatacattgctggtgggaatgtaaaatggcacggccactctggaaaatagtttggcaggttcttaaaaaactaaacaaacgtaaccatgacccagcaattgcccttctaggcatttatcccagagaagtgaaaacttacgtaagtccacacaaaaacctacacacgactgttcaatagcagctttatttgtaacaggccaaaaactggaaaggaccaaaatgtcctacaatagatgaataaggttaaataaactgtggtacatccacaccatgggtactatttagcaactaaaagggagacctactgatatatacagcttggatggcattacactgagtgaaaaataatcttaaaaggtctcatacagaaacattcttgaaatgacaaaatcacatgcgataaaataacctacagctacacatacactgacaatgtcagtttcctggatttgatactgtatatataaggtgtaaccaatgggacaaactgggtgaagggcaatgtgaaacctctctaaactgactttgaaacttcctgtgaatttaatctcaaaatcaaaggttaaaaaataaaaaaagtaaaactataccttcattggtaaggaaaaaataaataatcaggctctacccaagaaaaagtgaaatgccctgaaacctataccaagaagaaactggatagcaatttgttcaaatctgacaatcctaaacgttcagatgacatcaccaccaaattccctaaattatcagtagaaaaaatatgtatcaacatactagagcaggggctggcaaactagagcccatgagccaactccatctgtttgtttttgtacatgtaagttcactaaaatggacacgaacattaaaaacaaaaaccaaaaaaaaccctactactggctttagacattggtaattttacagtaacactgcatatcagagaatatcatcttgcaagttaacattttttttcttactggagcacaaattatagttcatcagaatgttttatgcctaaaataagtttctgaattttcaaagtatcatgagacttaaaaaaaaaaaagcaatttcccatctgttacacaatttatcaagtgcataaaaaactgtgctccctgcagagttccaactcacacaaacaatgaaattcagcttaacagcagttaccataccttggaaagtatcaaatcacctaaccatcgcacacaatcgacataatttctatgtatgtctctggtagaaaagtcagggaaatgaattttctgggaaataaatggcctgaaatggaaatatcaaaagtttagagaaaaatgtgtagcagaagctaattttctttttaggatttataaaactctgaaaagaaaaacagatgagtattagttcatctgtgttcctataaaactaaataccttctgatctgtttattgggaactaaaatctctttctgtttttgtttctacattttactccattattagctcaaaactgaagtttgtattcatcctatcaaatttcatttataaaaactgaaacttcctgccttactatatatagaccaaaatcaattacttaaattctggctatcctaaccaataacaaaagacatctgcttagagctgaaattttctcatagaaaatgctaagctaccaactcaatcctttcatattaacaatggtctatgaaagttaacacacctaccttatttcaaaagatagtcatctttcagaaacaatgacacatttcaaagtctggtaaagataaagttagtgagaatcctgcctagaacaacaatttctgaagatgatctgacaggaatttgacatttattagttagaacttttcctgtatttagaaaagtaaaacatggcacaatttttccttaaagatgtttgtgacaaaatcataagctagagaagttgctaccaattcttcagttaattaatgtatacctaacatttctaatctagtaagtgattccgtttttaaagtgaagtaactgaagaagtatcatatatcatgaattagttgtatcttgggcacaagtcttctccttggctttttcctcatacataaaaaggatattgggctcaatcatttcaaatacattttccaattcaaattgtgggatctttttttcacctttttttggtggctcacaggatctcagttccccagccagggactaaactagggccacagcagtgaaagcctggaatcctaacccctcagctcaggaaactcccagatcttttctttattaaaacattaaaatgttattaatgacttgatataaattcttaactgcaatagcttaattgctttttatccaaatatgtattataatctacggttaaacctctttcaagaagaccagcataattcactgttactttctgtaagctgtaaaatacaacaacttctatttattccagagctctagaaaatacaaaaacataaatttaatattgtactaacccctggtgttttagaacagaatttaaaagctgtgccaattcttaagaggcctgagatgtgatgactgtcactgtaattaaaatatttacttatggttacaaattcaactaacaatctactcataatgtgggtcgataaccagggaattaactgctaaaatgaaaagagcaaacaaagttaacatttacaaacataggatagtcatagtgaaagagtaaatagcttgataagattctgaaaaagatagttaaattaattaagaactgaggtttttcaaaatagtgagtatcatttaaaggagagcgtctgtcatgaattaaagctaagaaccccactgaaaaaattatgacttactgtctttaattagaatttacagtgctgacaagcagtgctaataaacattagcacatatgtacctaaaaaaaatatgtgaaatgggctactaaattaagataaaaatacaacagaaagggattttgaaaaatgagccacaaacataattagataaaataaaggttttcatttaaattcaatgagttttatggcatataaattataccttaaagttattaaaagagggggttctcaactcaatactggagacttatataacaatttttgaaaaagtaaaacactatttaaaggcataagatagcacattgttttaaatactacagctgttacctgttagttttatttgggttataatcataagattccttaatagcattcatcattctctttgaattgatcctccaaagtttaagagagtgatccataccacaagacattattttttcacccaaaagatcataatcctgtatataaaacagaaaagctttaattaaatatgtacattatttccccaaattatgctcattttcatctcatgtccagtactgtgaaaattgtatttcaaaccacaacactaacattttgtgtttcatatatatagggcataagtcacaaagtttttaccactttcaagatttagttttaactgacttgttatcaccacaatatatgagcttatgcaatatggcagataagaagtaaactctcttaatttagttttatctattcaattatctttagccaaatatttcctttgtttgattttgaaggtgaacctaatgctgaggtaaaacaataaaaacctgaatggttgttatttttctttgtccaacccagatgaagcaatgaaactggttatctgcatgtgaaattaggagtcctttaaacaactgaaatttacttgtacatctaagccaaaatacttagataagtggggtaccttggttttagagttcactttttaaatgaataaagaaaaataggtcttaaaaaggaagcaacatttcctcacttgctgtttacttttaatgagctcctaacagatcatctattgtaacaaccttatccacatcatttcacagatcagacactaaggctcagagatcgttcctttagcacatggtacatgtgtcaatgacaacctcacacatcaatccttctagcagtgagctcctattggtacaaaagagatacaaactaacccctgctttcattctaagaaataatagtagagagttctatttaaggagagtactttcctcactaatctggatagtctatgttaatccaacctttggatcaatcatgaacacagttttacaaaagcctgagagcttcaggtttggtgtttattgatttcagaagtctggcagctgctacttttcctaataacctcactgtcaatagcaacaagacacctctagagccaggagctctcattcagtttttaaggaaggacagtagtctttgttttttcacacataaagccagatggaattctgcaagttctagaaaatcctttaaggtaggtatgattctcacaaaagcataggaatatttagtacctccaattaaaatatcacatgcttcaaaatataatgccctttaaaaatagtttaaaaaaaacaaactgaagagctgtaagactactaaataagtaagctacacacagaaggtaaataaacctaaacaacacaaaatctgaaacttaactaaaaacacttaatatcactacaacagatcaacagactgtaatacaaagcataaagacaacaccatgccatcaaaaggaagttatctaaaagtcagtgtgaacaatacctcctagaaatgagtaacttatatttcaacttcaaataaaaggtgaaaaaatttcttaattgccaagtaggttaaccttttcctttaataactgagaaacaacaaaaagtaacttggtgattttagattaaaaaaggaaaagaacaagttcacagaattttctcatgagaatccaggtgctggtaaaacatgtgcaagagtacagataaaacacaaagagcctacttgctttatctcttcatctttaagttaaaaccttatctgtcagagtaaatgaaataactgcctgccaagctacatgaaacaaactacacgctttcttgtagggattgttcacagctttgtaacccgaaggtcactaccctgtagctttcaacttacagcacttagaacttcatctctgtgcccttctacacctccaaatattgccaccagagtgtccgtttggatattccataatcgtaaagcatgatctagtacagacataaaaaaattaacataaacttttatcattcatttactgtggacttttaatatctctttaaagaaaaaactaccaaagtttggacttaactcatgcacagtaatgactaagaaggaatccatatcgtataggaacttaaaatatttatattacttgtagatttaactaggtatgagttcaaactttcaagggtactaggttttccctctaccatacccacatttacaaattgaagaggacaaagtagacttataagatctctacagtaaatctaaaaatatgattgaaacatacacatattgggacattatttagagtattctggacctttcaaaaattctaaaactgtaatctgagcaatctcattttccactgaacatcagcaacaaaataaatagaaagcaatattcataaataccaagcagagtttgaaatataacaatgtctatactgtgtaatattaacatattatacaacatattgttagtagtggaaataaacattgctacaaaaatgatgtctttttgtagcaatttcaatctgcatccaagtctttgtgcagacatttacatttctcttgaagatacatgtacctaggagtgtaattctatgtttagctttttaaggaactgccagattgtttttcaatgtgcttacacattttacattcctaccagcaatggatgaaggggttccatattttactgtctttttcactgcaatcatcctagtaggtgtgaagtggtatctcactgtatttttgatttgcatttccctaatgattaacaatacccactccagtgttcctgcctggagaatcccagggacgggggagcctggtgggctgccgtttatggggtcacacagagtcagacacaactgaagcgacttagcagcagcagcaatgattaacaatgagtgcttttccaggtgcttatcggacattcttgcctattctttcaaaagatgtctacttttaaagcctttgtttgcttttaatttgattgtatttttattactgaactgcatgacctcttgatttaagtcccttattagatacacactttgcatatctttttttcccctataagttgtcttttcctttcttgagagttttacttgcagaaaaattcctgttcattttgaaaagctgtttgaaaatgctctaacacaatgggggaagagcaagattaagaaactgtgatattaagaacaagtaaggcattatggtctatgttacctgtaaaagaatatctgagcccagttactgttattaacagaagagaaaaagttatcagctctcttcttaggtgtctatttccaaacaagccttgatagttgaaaaatcacattgaaatatttttcatttaagagttttaatttgaggatatcttttaatatgggggttaggttataggtgtgatagctgttaagaatacatttgactagaataataatgtagaaatgaaaagagaaagggcgataaaaaacagaatgtagaaataagaacaattcaaatcactttagagagctcagaaatttaagaatgattcagaggcctgtctgaacccaaaataaagttacaatgccaacataggcatacagagcaagacaatgctttctctttgcaaggaaggaaaacatttagaagagcttacgctggataacttagcattttaaggaatcctgtaaggaatcttttataaaatagaagctttatagagagagaggcaaaaaaaagcatcatggattttcagatacactatttcttattacatggttggaaagcatcagagatttgctagactaccttccaactattaaaaatgttgcaacttcagtgacctgccattaaaatagtttagtatgataattcaattgaggataaagttctagaacaatcataatgcaatatggtaaataagggtaacacacacctaatcctcagtgtcaattatcttatctacatcttacaggaacagtgtacttcatggtcccattctccagttcttggtttggggatgctaatgtagcccaaaatttttctaaaacttatttctttttaaatttgcaaatttcccttagattagtttgtcccgaagtcaaacaaaacaaaacaaaaaacccaactcactcccaaataaatactactatacaaggaaattatttgtttcttttacctttacttactgacaggagaagatttggatctcttgggtggaatttcagctcattgatagcatttccatggccaacatagtgctataataaatttaagacacttcaactttcatataaaaatcaataaattcattttcattaatcttcaaagaatggaaaaataatttcacttgaagtagtagttctcaacattggctgcatattaaaatcacccagcttgaaggaaaaataagtgatgctgaagtcccatttgcagatattctgagccacagcaaggatttaaaagattctcaggtgattctaatgtgcccccagggttaaagtgatttgtaaaatttcttttagtatcaacttccaaggcttcactttttaattctttacaaagtatccttgactccatactcctatttaggggttcttgaaaaatgaactcactctttagttattgttcatttagagcttctcaggataaagcaaaagaacaaaaatgatttcaacagaaaacagtgcaaatgataaaattttcccatttattccttaatttgcatgatccaaatgtgacaaaggtctcaaaagacttgtctaaagaaagcaacaggcaaagtacaaaccaaactaaaaactgcacagaaactgactccgttttaaattcaacatggcaagtttttacaggtgtgcatacaaaagcagatctacagtttaacaagaaaacccacctttatgcactgcattgttatgggattaattatcctaattatgcctctagatccagcaacagccagcagaggatggcttgtattactatcatatgtccacgcacaagtgtaaaagttttcatcagcctaagaaatcccagttaagaaatataatttgtttttgaaaaggaaacacgtcaatgatcacaataatgttcaaagaattgctgaagctcttgacaaagaagttcccattcttctttataccatcagggttgaaacaatgaagattttaggtctaaaatctataccaagtgatcaaacaaacccaatccttccactcaattttgattactattttgctgtttgcacaactgtttacctgtcttttgaaagcagccacagccaatatgtaaatgaataggcataggttgtatcctccccaaaatttatctataaaaacaggtttctgggggaagggatagtcaaggactttgggaagatcatgtacacactgctgtatctaaaatgcataaccaacaaaaacccttgtatagcacatggaactgtcaatattatgtgccagcctggatgagagtgaggtttgggggagaatggatacatgtatgtgcatggctgagtcccttcactgttcaccagaaactatcacaactgttaatcggctatttcctaatacaaaatgttcttggtattaagaataaataattaaaattaaaaaaacaaaaccaaaaccaggtgaccagttccacaacctataatttactgaccctggctctatctcaataactctatgtgcctctagataaaaatcagctaactattcagttttccaccttttcctatgtgagacttttccaataatgccaaaggtcaccttccttatcacctaagggaagactaaaatgttctttttcttacttgctaggtttttcaaatggatctggaagaaatcttatcaccaagctttgactgttgtatcctttggctttttaaagctttcttttctttataaacccatgttttataatatttcatttcctaaataaacatgcttattttttttccctgtaggctctgctgaccaaatacttgatataactgtcagcacagcttctgatcaacccaaattcaccaatatccttgccctgaaatgataaaaatctaagcaaggtcaaagaaacagcaagttttaactactttctgctataactttctattattggatttccagcgctcatctctagccacctgtactgtccgccctcatatccaccctgacagtgcctttccgggatcaggaaaatgagataccaagaatctcttgggtaacagtgaaggaatagcattggataaagttaagaaagtaaggtacaaaagttttgaggtacttattcaaagtcaatttctttagccaatgataccaaaaacccaggaaaggatacatcagcatccacataagactgcaacaaccggatttctccttgtgaatgacattcatataaggtaacctaatgaaaacaaaaatacagcaaagtttatctcaaacacagaaacacactcttcagcttttgaacatactttattttagtgtgcagtacagtcaaaaaaaacttttttaaaataacttaaataatacagaaaactatttaaaaagaactcctttaaatttaaggaaaccatcataaactctaatgcattacataatttccagagtatattaaacactgtagtaataataatggtttctatttctgatgttttcaacttattcatataactggaccaattcttccaagtaaatagagttgagtacctcacagtaaagtatgctgttgctaagtcgcttcagtcatgtccgactctgtgcgaccccacagacggcagcccaccaggctcccccatccctgggattctccaggcaagagtactggagtgggttgccatttccttctccaatgcatgaaagtgaaaagtgaaagtgaagtcgctcagtcgtgtctgaccctcagcaaccccatggactgcagccttcaaggctcctccgtccaggggttttccaggcaaaagtactggagtggggtgccattgccttctcccacagtaaagtagaactacttcctaaaactgtggtttatcctttttttttttttcagttgtgccatatggcttgcaagatcccagttccctgaccagggactgaacttaggcccacagcagtgaaagtgcacagttccaaccactggacctccagggaattcctgtggcttaacctctttaaagtctttgggtagttttagagcattcattaattacataaaagaaaatctaaaatttgcctcatgaacattgctcatcaaatattaactttctgttgtacagtggccctttccatttatcattttctaaaataacatattcactttactcaattatgtacagttgtccctcagtatctgcaaggggataggttccaggacacccacagataacaaaatctgagactgctcaagttcctcatataaaatagcatagtatttgcatataacctcacacatcctccagtatactttatctttagactactcctgctgctgctgctgctgctaagtcgcttcagttgtgtccgtctctgtgcgaccccatagacggcaggccacgaggcttccccatccctggggttctccaggcaagaacactggagtgggttgccatttccttctccaatgcatgaaagtgaaaagtgaaagggaagttgctcagtcctgtctgactctgcgaccccatggactgcagcctaccaggctcctctgtccatgggattttccaagcaaaagtaccggagtgggtttgcactgccttctcctaatacaatgcaaatgctatgaaaataaaggtgccagcacaaagcaaattcaagttttgcttttttggaactttctggaattttcttttctgaatattctcgatccatagttggctgaatctgtggatgtggaaccccaaagatacagagggcttactctgtaatactaacattttttaaaacactttttgatgtggaccattgtctttactgaatttttttacaatattgcttgttttatgttttggtttttcggccccaaagcatgtgggatcttagctccccaaccagggacagaatttgcaccctctgcattggaaggcaaagtcttaaccactggatcgctagggaagttcctgtaaaactacatttttaaaactctttccagttttttacagtttagtcatgttagcaatactgttactaattttaatacgtctctaagaactctataaaaatcctttaaaatacctattaataagataacctacattaatattctaaaaacatattctttatatggacattaactaagttatgtctttacaaagtattttgctttatttttcttaaaaaaaaaaaaaaagaggtccaaatagcagttcagttcagttcagtcgctcagtcatgtccgactctttgcaacccgatgaattgcagcacgccaaaagttggcttaaagctcaacattcagaaaacgaagatcatggcatctggtcccatcacttcacagcaaatagatggggaaacagggaaacagtgtcagactttatttttgggggctccaaaatcactgcagatggtgactgcagccatgaaattaaaagacacttactccttggaaggaaagctataatcaccctagataacatattcaaaagcagagactttactttgccgactaaggtccatctagtcaaggctatggtttttcctatggtcatgtatggatgtgagagttggactgtgaagaaggctgagcactgaagaattgatgcttttgaactgtggtgttggagaagactcttgagagtcccttggactgcaaggagatccaaccagtccattctgaagatcagccctgggatttctttggaaggaatgatgctaagctgaaactccagtactttggccacctcatgtgaagagttgactcattggaaaagactcatgctgggcgggattgggggcaggagcagaaggggatgacagaggatgagatggctggatggcatcactgactcaatggacatgagtttgagtaactccaggagttggtgatagacagggaggcctcagttcagttcagttcagttgctcagtcgtgtccaactctttgcgaccccatgaattgcagcactccctgtccatcaccaactcccggagttcactcagattcacttccattgagtcagtgatgccatccagccatctcatcctctgtcgtccccttctcgtcctgcccccaatccctcccagcaccagagtcttttccaataagtcaactcttcgcatgaggtggccaaagtactggagtttcagctttagcatcattccttccaaagaacacccaggactgatctcctttagaatggactggttggacctccttgcagtccaagggactctcaagagtcttctccaacaccacagttcaaaagcatcaattcttcggtgctcagccttcttcacagtccaactctcacatccatgcatgactactggaaaaaccatagccttgactagctggacctttgttggcaaagtaatgtctatgcttctgaatatgctatctaggttggtcataacttttcttccaaggagtaagcgtcttttaatttcatggctgcaatcaccatctgcactgattttggagccccaaaaaataaagtctgacactgtttccactgtttccccatctatttgccgtgaagtgatgggaccagatgccatgatctttcttataattcagtaacttataattcaatgtcattttaagtgagactagggattctttttgttagaaagcctggaacattacaataggcattctgaagcacaagttgtattaattctaattataccaacatgacaattaataataattgatgttgaagttagtgaagtatgcttacagtgatgtcttaaaagcgaattcaaatcaattaatggattatattcccaattttggggaaaaaaagaaaaccttaattttttctttgaactgcatcacgttccctctgaatcattgttttcgagctacatatcacaacatacatttggctaaacataaaaaaagggctgttatccaggttatcaacttcagtagtgagtttcaaattttcagaactttaacaaccaataaaagcatgttctctgaatgcagggcaactaactaagcctgtgcgccacaactactgagcctatgctctacagcctaggagccgcaatgctgagcccacgtgtcacagctactgaagccccaaagttccagagcctgtgctccgcaacaagagaagccacctcaggaaaaatcctgtgtacctcaactagcgggtaatcaacaaacacccagcagagccaaataatataattacatatatatatatatatatatataaactgctttgaagacgtctaggaaattatttgaagccaaattttacttcttggaaaacaggaatagaaaggatttagcccagtaaaaatagatgcatgcatgtttgtaagattttcaaactttcagaaaaaaaaaaagcttggaaatatgctgacatttggaaaatactcagctgacaactcccaggttagttttgtttgaaaacagaatactaacactaaacacataaatataggaaacagtgcattcaaaatcatggtcttttatttctctaacaagcttagcacaattactaaagaagcataagactgaatttcactcaattaaaataaagttacagaatagctcccagattcacctccttcccttcctcttgggctaaaggtaaagaaagtgactttactgtcaacccatatcagttagtcaatttctcccatctttctttttccaaatacaccaatctgtttctgttattcctcataactcctagtatattattaatgaataatcagaatgtaagttaattaaaagacttattattaggaggacaacttttccagaatgattttaatttaacagactcctgagactccctggtaggccctaggaatcttcctttttcccattcatttagaagtgaatggaaataagtctttgcaatccactttatcagccccaggttcaactaaaaagttaaataacagtttacatcaaaacatgtccatacagttttttttcatgcattctctcttcaagatactctggcttcctcaaataaaaataattcaaaacaaatgtttactgtgtataattaaaatattttcagtaactattatacaaatccattggatttatgctttgcatttatagagagcaactaattacatttattatttttaagaaatcacagacctgttactccaagttgacaaacaactatcacagtcacttggaaaaagccaagccaattttttcagccactcagaacaatatttatgaagacaaagtatagagacttgtttcatgaacaattttgtgagtatacatgaaaaaagatgtattttcagtcatgaatattagttttaatttttgacaatttctagaatgttccatttttacataaaggaatgatactgtcaaatcggctatacaaagtttacttcaaaatcattacactttagtgttacactaataccagagactgatgagccaaatgccaaatagccccttaacactcactctgttgcttcctacagttgcaaacactaatggatctccttctttactgtgccagttaaactgaactccaaacaatggttgattatgatcttcctataaaccaagaaataagaaaaatcaatatattttaagaacaaaaaaggtagtaaactgatcattcccattaaaaaccttcccctccacaaaatgcaagctgcaattttatgtatcatacataaactgacttttgacacttaaaagatatgttagtccagttttcacattttaaaatactggtgcatgataaaactatgtaacaattaaagacttagaggttaggtaacaagtactcatcaatgaaaatactttaatagttgctctctatcttcttaaacccaaatgccatgcttttgaatcaaaatataatggataattgtgacaaatgcatttaatctctcaggacacaatttatttttctgaaataacaaataacctgagttaatacagtttctccagtactcattaaacgttttctggttgaattcttcccttgtgaagtgaagaaaattgattccattcaaatcactgctctccattagttctatagaaacaatttaaaattactctgaatttggatcctaaaagaaaaaccacctaagaagttttataatgaacaagaacacttgaaagtgggggccagggaggcagtgggctgtaactccacagttaccaggaggttataaggaagtgtataaaaacaagcattcagttttttgtttttaattggagcagccctgattaacaatgttgtgtcagtttcaggtgcacagcaaagtgattcagccacacacacacatccattctttttcaaactcttttgccatctaggtcaccacagaattctgagcagagttccctctgctaaaagtattcagttttgttcataaagttatttttcagccttaggattttactggcaatttcctgatgtttaacagtaaccttcatattcactttaaggcactttaaagtctgacaacattcatttcttatcctttaaaaagccacagttttaggctttggaaatatttaataaaaataatacagttcaaaccactttccaaatatactacataaaaataggttaatatacctaaatattaacatgaaactacaaagggacactttgctttagaagaaaaacacacacacaagaacactgagattaatttctctccttttaagagagtataatttgacatacacagcaatgaattttgctacctagataggaaaataatttccatgtggaaataatttccaataatttccatagcttcttatgcttttcaaagactttaaaaggatatttagatatttttaaaagaatctaacatatgcacaagacactataaggtacattttggctcagtataggaaaaatatccccaaattaaaaaaacaggaaatgaatatataagacacttaaaataaatatcagtaaacattttttaaaaataaaaagactattgagaaagacagtaaataacgccaacctattatttctcccaaaaattaactatgcaaaacaaattataatttataccttttttcttgaaaacaattacaaataagagttcaatttttaaagactgacttccaactattataactttaaaatatttttaacttgacagagaaccttgagcataaaatgtttgccattgagaaacctgcaattctggaaccctgcattcagcccatagattgtgtctttctccacataccttgagactatttacacatttgaaagaatatttgcatttctttgacttccattttcccttcccccaactcttccttccaggtgcatttggcgtatttgtaggtgtatcagggcgttctgtgttggtaccgctttctatactgacagcatcatcctataagcagcaaatcagaaaaaactattatgaaacagcaatactgtactaaatcgaatcctgataagaataatactgcctttaaataataaggcactggtttgtgccagccatgacactacactgcctcacttcatctttactgctcttcatacaaggtatcgttagataagaaagtgttgcttagagagcctaaggtggtgtcttgctggttagggttgctgggattgaaaaccagggctgactcctaaatctgactgacctacatgtccttatagtttatttgactgcttgctgctcagtttggagcatggcagtgggtggctgtttgaggccagtgtgttagtacttcctatgttagatgaaaatcctgattatcactcaaactctactaatttataacacttaaaccatttagaaacttttttaggttctacatattacgtgctatttaccagtgaaatctgactcatggctctaaaatactcatgattcagagctccagaagctcactataaagtaaaatctttccaaatgcagaagtgactataaaccttaaaaattcacctaatttatatcctgtctccagtccacaagacatattaatggtcctctactctcagaagaggatttcactacctcttccaattacacattcctaagtgttctttggaataaagagatttatttaaacctgtatcaccttagggcagtagttactaaattcattccagaggaaccttttttcgtggagtgcccactaacatctacaagaatacagactagaaaccattgccctaggagctagttttaaattattgctttctaaagttagttttacgatattacagaaagttaaaaatccactagaatatcaaaaagtatattaaaaattcacattaatttgcttaaaaactgtatggtattatatggtagtttttaggggtggtttccaaaacttcaaatggttcataccaaaatgaaatgcttttaaaaagtacacaaattattctaacactacaatgggaaaaaagcaatggagtgggcagatggcacacagtagtgctcaatatctagactgtaacttaaacaaaaccagcttttagatcagaaaatataaaagttcagttcctaggtctaaatcactgctttttaatctctatttcttcctacctttcagttgaatttacacagttaaaatttagtgtagaaaacaattttgtgtttcactgggaaacttcatgtctactgcacacttttcttccatgttatcagattctagtctgcttcactgcctttgaacaatcttacatctcttacactgtggacagccaaagggagaggttcgaaatgtcttccctttcactctgaagaaaagtttttgtctccatttgcaacttcatctctacattcctttcatctgtatagtttgtactgtgtgacttaaattgaccagttcccttacatgagtaagatgtttctgaaaattatcttttaacactagagaaatgaaacaatacaatgcttagacatttattcaccagcttttttccactctggctaaaaattcaactgctaatcaagaagccacacaaaacagtaaataactggggaacattacacacacacaccttttacccatttaatttacccatctcctcaaatagtcaaatcaagacagaatcaaatggaaatgcaatacactcacaatgctttcattttaattgtaaattcaaacctttcctgagcatctagtatgtgcacaagctgatatccaccttgactcctcctcctcaaagtatagaatggtactgtgtaacagacatggcactaccaccttcatctgctcaacaaggaaatggggatagtaatttgtcccttgatcttgccacaggttccttaagcaaagtcaagtcttcagattcagacttctgatcttactaccaggcaacaatcagtattctttcagaagccaattatgctgcacttatatgaaaaagttaaaatggcaggtacatatacaatgaacttaaaataggtcggatattaactacacttactgtgctgatcattctgcaatgcaaatactgaattattatgttgtgcacctagaactaataacataatgttattggtcaattatatctaaactttaaaaaaagtttaacatcctaccagttctttgattcactttaacagtatcaactgctcagattaccataactccaacttacaaatagcacattctttcctccacttgcctttggccttcctgttattatttggctccctcaagagttaaaccactgcccttattagctttttctgaattcatttttatagagttctctactcccttcctttactgcttctcttatgtcctagatctcggtccctggatggaattcagagggcctgtgaacttatgcagttgaataaattcataaataaatttaagattgcatcttaattttcacatttttaactgaaatctattacttccttctactataatacaggcagtatatgtgctaatgttactgtagctgtaacattctcagcaatggaaatcatgaatttttatattccattatagttgttgcagatctcaaaagctgtctctacccatcagtactatcagtcattgtgaggtctagttacttaatgtaataaagaagtactttattaaacctgaagtttgttttaaacaattttataacttccttataattttatcattgattctgtttgtgatcatatatattgtattttatacatttgaaaatattactcagaagtttcacaggattcattaaagtgcccagggcagagaaaaggttaaaagtcgccatctaaaggaaggaaccaaaacaaaggcttagtccaaccatgtagctctgaacagcttcagtatgcatcaaagaatacattcttcttaagggtctgtaaaaagaaaataacttttcaatttatttagttccctgaaattttcctcagtctaaattgggtattgacatcttcattacatttctgactgataaatatctggaagggccagaaacacaagtctagattacaaaataaggaataataattaaataacatttgcatggtatttatgaacgtggcattcataacaggttcagcactttacctgtatcatctcatttaatcctcacaaacatcccatgaggtaaatactgttattatccccatttttaagataagaatccaaggaaactaggtaaagtacctagatcaagcaaccggtaaagagtagagtggcaaattttaacctaacacctggatccagtttgtgctcctagtcactaatctaatctgccaagagaaatttaagagaacgtggaagtaaaacagattccaacggctggagtgaagagggtcaaaaatgttagatcccaatatataataagactggaaagcacaaacaggaaaataaaaagatttaaagtaacaccacctactaagcctttcagatatttcaagtccaaatcccacaaactgacaaccccccaaatatctttcctctatctgcaaaaagaattctttcccatctgttcagtgaaaattttggtcttgataccatgccatacatgtgcttcagtcggtgtgtaagatacaccatttattcttaaaactaggcaaactgagaaaaagaacttataccacccttctataacacttcagaaggcattccctcggaggattcacattttagagtatcacttttgaatgaaccgtcgagacatgttttcctgaacttattggatataaacttaaaaaaacatgaaacggcaaattaacgtcagttcggttatcactggcgtctcacctaaacacagtggggtcaactgttgggacggactagagttatgactatttttaaaaagtttaaaaaatctgatttcagagcacctttacacatgcgagaccacgagcctacacctaaagccatctacctttaccacagttgcttagtgtcttctaggttgtccccgttatcctagcgaaaaccgactgaagactaactgtcccttctcattccttcctcaagagtcgctccccctccaactctggagacgactctcgcagttctcctcctccagaagtgaggccgactgtcaggcgcaccccttctccacagacgagacaggagcaaacacaaaagcccctttaagagagtcaccggaatccctgacgtccgagatctgctcttcccattgtggaccgcctggaagggtctaaggacacggtccctaaatcccctttttaaaagtccgtaacacacgctggcccctccttccaactgtcttaggaaaaaaacacctctaacttgccttttaaactactggaatctcagatccgcactttgcccccaaaggcccaaactctcccactccacgcaaaacgctctcagggcagaccccctccgaccctccgccaccacgctctggccccaaccacattctccttcgcgaagtttcctttcgctctcggcgccccagctcaaaaaaaaccccctcagagacgagtttgattttctcctccacgcccgcgttttcctcagcagagcggtgacacctctccctccccccaccccaccttaccacagccgcccgcccgcccccgcgcccacagtttaaaaagaattgaaaactttgacggtcaagtcccgtccggactgccctggggggctgcgctcacattctcgtctccagagaggtccgggttgctattctcgtcgctgctcagcttctgcttcttggccgcaggcatgtctgttcccgccggcactgtcgacacttccctctcggacatattcctccgcctccctccaggttcctgccgccgggggcggggcctccgccacaccgccgtcaagcaagcccggccggagcttgccgcaaagctgccgccgccgccaccgccgccgctccccccactgtcgcaaaccgcgcccagccgccgaggcgggcgtgcgtgcgaccccgccacactgctgaaaaaggggcgcgcgcgcgcgcgccctcccgcgcggcttcccgggtccttccctgtccccgctcccgtcttgccctcttcccgccgccctcccggcagtttgcacggagcgggtgtgggatccgtcggcttccgagggcagttatttccaacgtcccccttccccgcgaccgccctgtaaagggagaggcggaactctgaagagggggtgccccctcacccccttcttccttccagagacggttcagccgcaattggcccaatccttcgatcccccgaccccgctgcgaggactcgaaagtctgtggaatggacgg

SEQ ID NO: 64 - DNA, 186748 bp, Hippotragus equinus
  source 1..186748: mol_type = genomic DNA
ggcagggaaaacagaccaacttgggaatgaatctgtccgtaactcggagaaccgcttcaaaagaagcaatccagtcccaaattatccacttttccaaagagaaggaccacagaagcgagaaattcatctaaacccgcaacgctcttcccctcccacctttcctcctgccagcatcaaatatggcgctctttgcttccttccccggcagcacgcaggttctgcaaagctacaccacctctccttggtaaatcctccagccccgcccccgcgcgtctggggcggggcttgcctggaggtggggcgtagggatccggaaacacctgaactgtattagctattcccttataaatttagcgtccagcagtgtttttcccggctgaacctgcagtccaacttcttaggcgtctcctcgtcgaatcttttgagggcagcccagaggctgccgcagtttgggccgcggcctggtgccctgccgtgtgggccccatattagctcgagccatgcccgcggctgctgcccccatcatcagctcggttcagaagctggtcctgtatgagactagagctgtgagtaccccgcgccgtggggcgccggcgggaggatggcggccgagtaggtgtggggcagagacagcattctccccctttgctccccccattttctcagttcccttatccccgcagaggggaatgtgtccggggctgggggtgggggtaggggcggtcttcgccttgtaatcgcaccctgggcactgctgcttttgcatgcaaacatttccacttaaaaagccacggtcggagcacacgggcaacaggtgtttgtggtatctcagaaactgttaatggcgctttatacgagttactgaattcttttcaactttcagaaaggcttaagagttctgcagttcactggttgcagtacaggcaggggtatggagagtatttttgatcatggcatagcattgctgagattgatgttaattacgtgcgctgtacttgctgacgtatttctcttgatctgaaaggaaggaaaaacattttctttaaagacagtcgatttgtttgggtaacattgttttgcttttcacttgacttttccaacacattttattttatttcgtcaaatctccatgaaaatagttactcgtagaataagcagactcgtttttaggttactcagttcagttcagtcgctcagtcgtgtccgactctttgcgaccccatgaatcgcagcacgccaggcctccctgtccatcaccatctcccggagttcactcagactcacgtccatcgagtcggtgatgccatccagccatctcatcctctgtcgtccccttctcctcctgaccccaatccctcccagcatcacagtcttttccaatgagtcaactcttcacacgaggtggccaaagtactggagtttcagctttagcatcatttcttccaaagaaatcccagggctgatctccttcagaatggactggttggatctccttgcagtccaagggactctcaagagtcttctccaataccactagttccctaaaattgaggcaccatcagtcgaacgtgggctgtctctgttagataggagagtataagaaggtacttatcctaatactttcttggttataacagggttgtaaaagcttgtctgcctgaggtcatcattaatgtagaaacaatgttggccctaagttaattttggtgacggcttcatctgattagatccagaccagaagatgaacttacctaatatactgtgtatgcagataccttccccctgaggagagccatgcagaagtatcattttgaaacaaaagcttctgctttctgtacaaatgctaatcaatgtccctggttagaaacatacatactatgtttaaaacacatcaatttcagcccattaagccgagcatgcctgaggactggctgatatgtgaatgttctttctaaagcaaaattcatattatagggctcttctgcttagaaacttcagtggctcccattctgaggaaaggaaactctttatctcttaagttgccatttaattactggcaactaaatagatccaaggaattaaaaaaaatggtagcaggttgtattaatgagaatagtagctaatactcttggaagagttatatagtccgggcactggtcaaaacactctacatagttcattatttaatcctcataaaacttctgaggcaaatattgttgctattactattattatttggtgaaggaaaaaatgaggcaaagaaaggttaggacattggatggtgtgggctggtaactggtgccaggcgcagatagtgtgtaactggatggcaacaaattgggtatataaattgagagtaaatgactagaaatttttacagcaatttgacagagtaattgtatttcagatgagtcagataaacatagggcttgtggataatgtctttggttttttgttttcagctttaatatggaaatttcaagaaaatacaaagtagaataataaactcccatctagccatcacccagctccaaaattaccaacattctgtcatcctctattacctataacttgttccacttcccatccaccacatatattttatatggttctttttctttaaaatttacataaattgaatgcacaaatctaagctacagaatttggacagacgcatacatgtgtaaccacacccctgtgttgtcacagaaaattcccttgtgtccatatctggtcacctgtcccttccttcctggcaattaatattctgttttttaaatgttagattagatatgcccgttaaagaagtctatgtgaatagaattgtgcatactgtcttgagtctagtggcttttgcttggcatcatgtctttgatgttcatccatgttgtgtgtgacagtagttagctgcttcttcttgagtactcatccattggatacatgttccacagctttgtttatcccttaacaatattgccttagaatgttaccacgtttagcctgttgtctcttaccgacatgtctcagaagtgtaggccagggaagcaatatgagcctggggaggggctggcctccttctcaggtcacgtgcggacaggagatagaaagcagggtaacagacacatttgtacctttaaggtggttggagtggaggtcattaacttattgagggcttacctctaagtggctattttaaaaggcgctctgggaaaagcaaaccaggaatttatggtaggacgcctcagctcactggttcatctaaatgtccacgctgttggtgtgagcagggacgagtactgaaaaatgcctaggaaccactcaaaacagtgtttttctcatcatactcaggtacagtggatctcactattacttctttaaaattcactctgatttttatgttttattgcagtaaagttgatttaatatgttgtgcttattataggtgtacagaatcttttttagttcaacatatagattctttactcaaataggtggcaacagggtgttgagtagaactcccttgctacacgatgggtccttgttgattacctgttatatgtgtattattgtggatttgttcatcccaacctcccaattgataccttccctcacccttcccttctggtaaccataattttgtattctaatttggagactctatttttcttttgtcagttggttcagtgttcagatttcaccaatatgtgatatttgtcttttttttctgacttacatcactcggtatgatgacagctactttcatgcatgttgctgtgataggagttggctcgttctttctttttcatgacggagtaatacgccattgtggacaggtaccactctttcttaatgcattcatctgtccttggacatttctcttgcttcaaggtcttggctattggaagtagtactgtagggtacatttgggtgcaatttttttttttttttttaagaattctgtttgtctatgaatatcctgttaggagtgggactgatgaaatatatggtagctctgtttttacagtttcatagttctgtattgtaccattatcattcatatactcctggagaatcccgtggacagaggaggctggcaggctacagtccatagggtcacaaagagtcaggcgcaactgagtgactaacacttacttacttagcagtgtaagaggatccccttttctccacgcctactctagcatttattatttgtagacatattgatgatggccattctgaacaccagaaggtgatcccttctgatttgcatgtctctaataatttgtgactttgtacatcatttcatgtgatttaaaaaaaaaattagtgtcagtagtacttggcttttcatattgtcttaatgacactttgccctttgtaaagatttcttttagaatacttactgaaaattttgaggacaggtatcttgcagtccagcgatcctttcgaatattgtcccctgctgctgctaagtcacttcagtcgtatccgactctgtgcgaccccagagacagcagcccaaaaggctcccccgtccctgggattctccaggcaaaaacactggagtgggttgccatttccttctctaatgcatgaaagtgaaaagtgaaagggaagtcgctcagttgtgtccaaccctcagcgaccccatggactgcagccttccaggctcctccgtccctgggattttccaggcaagagtactggagtggggtgccattgccttaagcagcagttttcaagttgtttttgcgttaaacggccacaaggcggcagcatttcttcaaagcccaactcggcctcctttagcaaacagcgcctcagtggaagtcgtggttttgggttgtatattggactggattgtgccagaaacaacaccccaaagcttggatcttgttgcctcctttttttttttccctggttttatgtatagtttttctttgagtaacagtgatatacggtgtgaatcttttacatttgcacatatacatatatagcttgatcttcaaagtcttatctcatagagattattacagaatgttgagtagacgtctcttggtatactcaagtccttgttgattatatattttgtatgtgatagtttttattcgttaatcccaatttcctcatttattccttcccagcatctttcctcttgtgtaatgatcattttttatattgtgtaatgatattgtgtaatgatatttttgactgctgtgagtctgtctgtctttggtcagttggtttcttggtattaatttttacattttacctttaagtgaaatgtatctgttttttctgagtaacatctctcagtatgcttagaactaggtccatgtgggttcctgcaactggtattattgccttctgtttcatggctaagtctcgttccattgtggacacacaccacttcttcctaattcattcatctctcgatggaaactttgttggcttccaggtctctggccttgtaaggggtggtgcagtacagctttggatcatgttcctttttgaattctggtttcccctggattttctcataggcctgggactgtggatcatgtaggtagctccagttttcctttaaaagcacctgcatgcagggagtgcagccagtttcatcccacttgcctcttaggaagttttccttttctccaggccctctccactgtggattctttgaagacttattgatgatggccattcaggctttggcgatgtgaggcctcactgtagttctgatttccttgtctctaagaagaggggaatttgtgcaccatttcatgtgttcttttctttaactaaatggtgatgataaaattgacttgtggttggctccctgaaagtcaaccaggcgttgaatttttttggatgatctgcttcaggacatttattgacagaaggttatcatttacaactccgcaactcttgtgaatattgcatgcccaagaagcactgattttaaacttgctattttggaaaacagccacagtgcggcaggatttcttcatgcccaactagttaccacggaaagcagagccatcgtggtcgtggtgtttctgggtgtagattagtgtggagcatgccagcacaaacacctgatcttgggtctcatcacttactggttttaaattaacttagttattattaataactattattttggctactgtaagtgctgctgtagtggacatttgggtgccagtttcttttagaagtctggttctgtttgaatatcctgttaggatcagactctcaaatctatggtagctctgtttctacctttttaaaaaaattaatttattttaatgggaggataattactttacagtactgtgatggtttttgccatacatcaaccttttaaagacaattccctattgttctgtctcgtggctgttaccatttgtatgccactggcattttctccacccctcctctagcatttattatttgtggacattttgatgatggtagttttgactgtgattcctcattgtagttttgatttccatgtctttaataatttgtgactttgtgcatcatttcatgtgcttttaaaaaaaatcatgtgagtagtatctaccttgtgatattgtcttatgaaatacagccctttgttaaaaaaatatatatatatttttttagaatacttaccctagacagtttttgagggctcatatcttaagtccagtcatccttgtgaatgttagtcctcataaagtgaaagtgttagtcgcttagttgtgttcgattctttgtaatcccatgtaatgtagccctccaggctcctctgtccatggaattctccaggctagaatattggagtgtgtaacacttccccttctccatgggatcttcctgacccaggtatggaaacaggctgtctcgctttgcaggcccattcctttacagtttgagacaccagggaaacccagtttcctgtgtgggtgtgttagttgctcagttgtgtctgactctttgtgaccctttgactcaaaccctccaggcttcactgtccacagaattctccgggtaagaacattggagtagccattcccttctccgtaacaattttcaagttgctgtcaaggctgtatattgtcaccctgcttatttaacttatatgcagagtacatcatgagaaacgctggactggaagaaacacaagctggaatcaagattgccgggagaaatatcaataacttcagatatgcagatgacaccacccttatggcagaaattgaagaggagctaaaaagcctcttgatgaaagtgaaagaggagagtgaaaaagttggcttaaagctcaacattcagaaaacgaaggtcatggcatccggtcccatcacttcatgggaaatagatgaggaaacagtggaaacagtgtcagactttatttttggggggctccaaaatcagtgcagatggtgactgcagccatgaaattaaaagatgcttactccttggaagaaaagttatgaccaacctagatagtatattcaaaagcagagacattactttgccaactaaggtccatctagtcaaggctatggtttttccagtggtcatgtatggatgttagagttggactgtgaagaaggctgagcgccggagaattgatgcttttgaactgtggtgttggagaagactcttgagagtcccttggactgcaaggagatccaaccagtccattctgaaggagatcagccctgggatttctttggaaggactgatgctaaagctgaaactccagtactttggccacctcatgtgaagagctgactcattggaaaagactctgatgctgggagggattgggggcaggagaaagggatgaccgaggatgagatggctggatggcatcaccgactcgatggacgtgagtctgagtgaactccgggagatggtgatggacagggaggcctggcgtgctgcgattcatggggtggcaaagagtcggacacgactgagcgactgaactgaactgaactgaactgttgtgcaatatagccacaaggtggcagcattttccaaaccgcaactcggttctctggcaaacagagcctcagtggacatgatgatttggggttggcaattagaccaaaatgtgccacaagcaacaccccaaaatgtgtgtcttgtcgcttctttcttttctgattcaatgtttaggttttattgggtgtaacagtgatgtgcaaagctggatatgtacaaaactgttatatttacacatatacacatatctattgatcttcaaattattttccatagaggttatcacagaatgctgggttgatctcccttggtatacctaggtccttgttgattgtatattttatatataataatttttatttgttaatctaaacatccttatgtattttacatgtaatggttttatttgttaaaccaacttcctagtttaccccttccccatgcaatggcagcccactccagtactcttgccggaaaatcccatggatggaggagcctggtgggctgcagtccatggggtcgctaagagtcagacacgactgagcgacttcccttccacttttccctttcatgcattggagaaggaaatgggaacccactccagtgttcttgcctggagaatcccagggacaggggagcctggtgggctgccgtctatggggtcgcacagtcggacaggactgaagtgacttagcagcagcagcagcatatgtttccactttcttaatgatgattttattttgtgactctgtttctctttggtcagttgtttttcttggttaattttcagaatccacctttgagtgataccatgtgatatgtcttttttttgagttagctctctgagtatggttagaactacttctatgttcagttcagttgctcagtcgtgtccgactctttgtgaccccatgaaccgcagcacgccaggcctccctgtccatcaccaactcctggagtgcacccaaactcatgtccatcaagtccatgatgccatccagccatctatctcatcctctgtcgtccccttctcttcctgccctcaatctttcccagtgtcacggtcttttccactgagtcagttcttcacgtcaggtggccaaatcattggagtttcagcatgtcggttgctgtggttggtattttttattctgtttagtgggtgggtcatgtaccattgtggacctgtaccactgtctgtgcattcattctcggtggacactgcctgcaggcctttgctgctgtaactggtagatgcagtgcagctttggatacatgttccttttttgaattctgtttttttccggatactcccttgacgtgggactgctggatcataggtttctcttgttttcctttaaaggcacctgcatactgttctgtgtcaggacttttccagtgtcatctcaccatcgccttataggctctgctttggtccaggccctctccaccagtattcttcgaagacttattgatgatgcccattcagattgggatgaggtgaaccctcatcgtagtatggatttgcatggccctaaaaactggcaaattaaaaaagttttttttaaaaaagcaaagtgttaataaaattgacatgttgaaattggctccttgaaagcgggccatgtgttgatttttttgactaccttctttgggacacttagtaacagtatgtgtcatttgcacatgttgtctgtgaatgttgtgtgcccataagcattgattttaaagttgctgtttgggaaaaagcccagaaggaggcagaatttctttatgcctaactctaattactacagaaagcagagactagtgggagtggtgttcttgagtgtgaattcgtgtggaatgtactagtacaaacactcataagctgtgtctcaacatttgtttttttattaatttaatttttgttttttaattatttaaaaaatgttttttgttgtgtggagaatcttctccagctctatgtgtattattcctctttggcttcttttctcacatgggttgttaccgagtgtagtgtagacctcccttgctctatatagtaggtccttttgatgatctcactgatatcactcagcatattagacctaggttcacatctgtttctgcggtagacattgtctcattctcattctcttttttttttaagcattcgaacagaacatctaattttatttttattttctttatttaaataaaaacttttaaaccccaaagcattttgtattgggatacaactgattaacaatttgtgacagtttcaggtgtacagtgaaggaactcagtcatacatattatttttcgtgactggatattatgccttcgtggacacataccccttcttctttagcatttatctgtccttgggcattttagttgcttccagctggtggcgactgcaggtgctgctgtagtgcacgtttgggtgcacgtttcttatagaaatctggttgttttcaaatgtgctgttaggatggggctgtgaaatcgatggtagctctgtttttactttttaaaaacagttccctattgttatctctggtgcctgttaagtttatataccacaggcccttttcttcatcccctctcttgcatttattgtttgtggacattttgatgatggccattttgacactgcaatgtgatcctttattgtaatttttatttccatgtctctaataatttgtgggttttgtgcatcatttcatgtgctttaaaaaaaaaatagtgtgagtagtttctacctcttgatattgccttgatgaaattcagcactttgtaaggaaaattttttagaatacttacctaggagggtttttgaggacggataccttacagcccagccaccgttgggaatgtcagtcccttaaagggaaagtgttagttgctcagttgtgtgactcttggtcaccccgtggaatgtagcccacaaggatcctctgcccatggaattctccaggcaggaatattggagtggatagccagtcccttctctaggggatctaccttgacccaagtgtggaacccaggcctcctgcatttcaggcagattctttactgtcccagtcaccagggacacccagtttcctgtggtgtgtgttagttgctcagatgtgtccgactctttgcaacccatggactggatttctccagctcctctgtgcgtgaaattccccagacaagaatactggagtgggtagccattcccctctccttaacaggttgtagttggtgttgtgggcaatgtccacaaggtggcagcatttccccaagcccaactctgtactctggcaaccagagcctcagtagacatcttggtttggggttggaaattagactcatatataccaaaagcaacaccccaaaacttgtgtcttgtcgcatctttttttaaaaaaaaattcagtgtttagtgttttggggcgtgacagtgttgtataatgtcggatgtgtacagaaacatatttacatatatataactattgatcttcaagttattttccatagaggttattacagaatgttcagttgacctcccttcgtataccaggttgattacatattttaaatgtaacagtttctatgttaatacaaacttcctcatgtattttatatataatgatttctatgtgtttctctaatttactccttccccacattgttctcctttcttagtgacacttttattttctacttagtaactctttctcttggtcagttcttttcttggttatattttagatcccatgtgtaagggatatcaggtgatatgtatgttgttttgttttgtttttttttttagttaactgtacccatgtaggaggctgcacctggttttttgttttttaatcctatttaatgagtgagtcatgtaccattgtggacctggacaactgtctcctggtgcattcattctcgaaggacgctttacctgcacatctttgctgctgtaactggtgatgcagtgcagctttggatgaatgttcctttttcaaattctggttttcttcagatattcccttaggcatgggactgctggattataggttgctcttattttcctttaaaggcacctgcataactgttcttaccagtttggtctcaccattaccttaggaggctgtgcttttctccaagccctttctaccagccttcttcaaatatttattgatgatggccatttagacttggtgagatcaacccttgttgtagatttgcatagctctaagaactggtaattttgtgcatcatttcatatgttctttttctttttttaacatcggtaatgaaattgtcttgtaaaattggctccttgaaagtgggccgtgtattggatttttttttttcaattaccttctttaggacgtttagtgacagcacatgtcatttacagctgtgcaatccttatgaatgttgtgtgcccagagcattgatttaaacttgctgtttgggaaaatggcctcaaggaagcaggatttcttcatgcccaactctagtaactagagaaagcagaaactagaggaagtggtgttcctgggtgttaatttgtagggaatgtgccagcagaaacaaccataagcttgtatctcaatacttgtttttttttaatatatttaatttttagtttgaaatttagtaagttgttttgtaaagtgtttttttgtaggtgttcagttcagtcgctcagtcgtgtccgactctttgcgatcccatgaattgcagcacgccaggcctccctgtccatcaccaactcccggagttcactcagactcatgcccatcgagtcagtgatgccatccagccatctcatcctcggttgtccccttctcctcctgcccccaatccctcccagcatcagagtcttttccaatgagtcaactcttcacatgaggtggccaaagtactggagtttcagctttagcatcagtccttccaaagaacacccaggtctgatctccttcagtatggactggttggatctccttgcagtccaagggactctcaagagtcttctccaacaccacagttcaaaagcatcaattctttggtgctcagccttcttcacagtccaactctcacatccatacatgaccactggaaaaaccatagctttgactagacggacctttgttggcaaagtaatgtctctgcttttgagtatactatctaggttggtcataacttttcttccaaggagtaagcgtcttattatttcatggctgcagtcaccatctgcagtgattttggagccccaaaaaataaaatctgacactgtttccactgtttcctcatctatttcccatgaagtgatgggaccagatgccatgatcttagttttctgaatgttaagctttaagccaactttttcactctcctctttcactttcatcaagagtcttttgggttcctcttcgctttctgccataagggtggtgtcatctgcatatctgaggctattgatatttctcccggcaattttgattccagcttgtgctttttccagcccactgtttctcaccgaattcttttcagttctgtacgtatctactcatctttgagttcttttcttctataggttattacagagtgttgtgttgacctcccttgctcagcagcaagtccttgttgattacctattttatatatattattgtggatttgttaaccccaacctcctaatcgatatcttcacccaccattccctctggtaactctaattttgttttctaattttgtgaatctgttctctctttttcagctagtttatgggcgtgaattttcagactctactgcgaaatgatacttgtctccttttttcctgacaagtgtcattcggtataattacaacgagctccatgcattttgctgtagtcggctctgtctcatcttcctctggatcgcacactatgccattgtggaggtgtgccactgcttctttatgagttcatctgtctttgggcattttagttgcttccaggtcttggctgtttgccgtgatgctgtagttcaattgtgggtgcaagattcttttaagaattctggttgtctttgattatcctgttagcagtgggactgctggaatatatggtagctctgcttttacagtttcatcattgtgtatcgtggctgttaccatttacataccactagcaacataagtggagaaggcaatgcaccccactccagtgttcttgcctggaaaatcccacggacggaggagcctggaaggctgtagtccatggggtcgctcagggtcggacacgactgagcgacttcactttcacctttcactttcatgcattggagaaggaaatggcaacccactccagtgttcttgcctggagaatcccagggacaggggagcctggtgggctgccgtctctggggtcacacagagtcagacacggcggaagcgacttcacagaagcacaacataagaaggttccttttctccatccgcagcctagcatgtattgtttgcagacatcttgatggtggtcattctcactgccgggaggtgatccctcattatgatcttgatttgcatgtctccaataattggtgattttgtgcatcatttcatgtgctttttttttttttttttacaaaatagtgtcagtagtctctgccttttcatattgtcttgatgacactctgccctttgtaaagatttcttttagaataattactcactgaaaacttttgaggacaggtatcttgtagcccagctgcccttttgcatattaagtcccctaactaacagttttcaagttgtttttgtggaaacagcacaggaaagcagcatgtcttcaatgccaactctgcctactcttgcacacaaaggttcagtgaaagttgtgttttggggttgcacatcggtgttgccagaagcaacaccccaaagcttgagtgttgtcactgttgtgttttttagttgactgtgtaattctgctttaataaacagtgatttacagcgttctctgtgttgtatgtgtgcagaatcttttacatttgcacatatacatgtgtctgaaagtgaaagtcactcagttgtgtccaactctttgtgaccccatggactgtacagtccatggaattcttcaggccagaatactggagtgggcagccttccacttctccaggggatcttcccaacccagggatcgaacccaggtcccttgcactgcaggcggattctttaccagctgagccaccagggaagctctatcaatgtttagattcttatctcatagagattattacaggatgtttattagacttctcttggaatactgaagtccttgttgattatgtattttgtatgtaatagtttctgttgttaatcccaatttcctcgtttattcctacccacatctttccccttggttaatgataattttatatttgactgttgcgagtctctgtcttcggtcagttggtttcttggtattaatttttagatttcacctataagtgataccatatgatatccgtccattttttctgagtaacacatctctgtatgcttagaactaggtccgtgtgggttgcttcttcggtgttatccttctgtttcatggctgaggctcattccattgtgggcgtgtatcgcttcctctttaatgcattcgtctcttgatggaaactttattggcttccaggtctttgctcttgtaactggtggataaagtgcagctttggagccatgtttctctttgaattctggttttccctggatgttcttattggcgtggggctgctggatcatacgtaactctagttttcctttaaaggcacctgcatcctgttctctaaagagagtgcacccatttcatcccacctgcgccttaggaggttttccttttttccaggtcctctttaccatggattctttgaagacttattgatgacggccattcagactttggtgatggagcccttgttgtagctttgatttgcatgtctctaaggactggtgaatttgtgcatcattttatgtgctcttttctatttcttatcagtggaaataaattgacttattgaagttgattccttgacagtcgatcagaagttaaattttttttcttttgattacctacttcaggacatttagtgacagaaggtatcatttacagccctgtagttcttgtgaatattgcatgcccataggttattgatttttgaagttgttgttttagaaagtggccacaagggggcaggatttcttcatgcccaactcttcagttcagttcagttcatttgttcagtcgtgttggactctttgagaccccatggactgcaacatgccaggcttccctgtccatcaccaactccagagcttgctcagattcatgtccatcgagtcggtgatgccatccaactatctcatcctctgtcatccccttctcttcctgtcttcaatctttcgagaatcagagtcttttccaaagagtcatttctttgcatgaggttgccaaagtattggagctacagcatcagttctttcaatgaatattcaggactgatttcatttacgattgactgtttgatctccttgcttccaagggactctcaagagtcttctccaacaccacagtttaacagcatcaattctttggccaactctagttactacagaaagcagagctttagcggtagtggtgttcctggcatgtaaattagtgtggaaggtgccagcacaaacacccctaagctcatgtctcattaattactgttttttaattagtttaatttttactttttaaaggagaaatttgttttaaaatgttgagttggttgtgtgtagagaatgtttttctgttttattatatatatatatatatatatatatatatatatatatatgttcaggttcttttttcatataggttcctacagaatgttgtgtagacctcccttgctcagctgcacgtccttgttgactacctattttatatgcattactgtggattggttaatcccacttgctaattcctcgtctcacatttcccttccggtgacaatgactttgttttctagttttgtgaatctgtttttctattgtcaggtggttcatgggcatcagttttcagattccacagataagtgatatttgttgttgttgttttttgactgacatcactcagtaggattacacttaagtccatgtatgttgctacagtagacactgtcttgttctttatctttttttaagcattcaaactgagcatctaattttattttttttctttattttattaacattttaatttgtatttttaaccccaaatcatttgttggggtatagccgattaacaatttgtgatagtttcaagtgtacagcgaagggactaggccatacatatacatgtgtctgttcattcctttggggatggagtagcatgccatcgtggacatgtcccccttcttctttagcattcttctgtccttgggcattttaggtactccaagcaggtgactattgtaagtgcacatctgggtgcatgtttcaaaatctcgttgttttcaaatctcctgttaggattggactccgaactcaatggtagctctgtttttaccttttaaagtcagttccctaatgttatatctgtggctgtttatatatcacacaggcatttgcgagtgtccttttttctccacctaaagtaaaggtgttagttgctcagctgtgtctgactctttgccatcccgtggactgtggcccgccaggctcctctgtccatggcattctccaggcaagaatattggagtgggtaaccattcccttctccatgggaacttcctgagccaggtgtggaacccaagtctccaacattgcaggcagattcttgactgtgtgagccaacaaggaagccccgtttcctgtgtgtatgtgttagtttctgtcgtgtccaactctttgcaacacatggactgtagcccgccaggctcctctgtgcatgaaattctccagggaagagtactggtgtgtgttcagttcagtcactcagtcgtgtccaactctttgtgaccccattaatcgcagcacaccaggcctccctgtccatcaccaatgcccagagttcacccaaactcatgtccatcgagtcggtgatgccatccagccatctcatcctcggtcgtccccttttcttccttcccccaatccctcccagcatcagagtcttttccaatgagtcaactctttccatgaggtggccaaagtactggagtttcagctttagcatcattccttccaaagaaatcccaggactgatctccttcaaaatggactggttggatctccttgcagtccaagggactctcaagagtcttctccaacaccacacttcaaaagcatcaattctttggtgctcagccttcttcacagtccaactctaacatccatacatgaccactggaaaaaccatagccttgactagacggacctttgttggcaaagtaatgtctctgcttttgaatatgctgtctagattggtcataagtttccttctaaggagtaagtgtctttcaatttcatggctgcagtcaccatctgcagtgattttggagccccaaaaaataaactctgacactgtttccactgtttcctcatctatttcccatgaagtgatgggactggatgccatgatcttcgttttctgaatgttgacctttcagccaactttttcactctcctctttcatttttattaagaggcttttgagttcctcttcactttctgccataagggtggtgtcatctgcatatctgaggttattgatatttctccccccaatcttgattccagcttgtgtttcttccaggccagcatttctcatgatgtactctgcatagaagttaaataagcagggtgacaatatacagccttgacgtactccttttcctatttggaaccagtctgttgttccatgtccagttctaactgttgcttcctgacctgcatacagatttctcaagaggcaggttaggtggtctggtattcccatctctttcagaattttccacagtttattgtgatgcacacagtcaaaggctttggcatagtcagtaaagcagaaatagatgtttttctggaactctcttgctttttcgactggtgtgtgtagctactcccttaagtttaaaaaatttcaagttgctgttgcaggatatgaccacacggcggcagcatttttccgagcccactttgggtactttggcaaccagagcctcagtggacgtggtgatttgaagttagaaaataggatgaagtgtgccagaagccatcactccaaaacttgtgtcttgtgacttcttttttaaattcaatttttatgttttttgggacataacgatgcacaatgtcggatgtgtgcagaaaattttatattcacccatatacttatacctattgatcttcaaactattttccatagaggttattacagaatgttgagttgacctcccttggtatacctaggtccttgttgattatatattttatatgtaatattttctatttgttaatccaaacttccttatgtattttatatgtaatgatttctatttgttcctacagcttcctaatttaccccttgcccacatctttcccctttcttaatggtaattttattttctattttgtgactgtttctctttggtcagttgttttcttggttacttttcagaatccacctgtaactgataacatgtaatatggcttttttttttttttttgatcacccatctgagtatggatagaactgattccatgtaggttgctgtaattgttgtttttttcattgtgtttaatgggtgagtcatgtaccatggaggacctgtacaactgtctctatgcattcattctcaatggacactttgcctccaggcctttgctgtcataactggtgatgcagtgcagcttaggatgcatgttcctttttcaaatattcttcggatattcccttaggcatgggacttctggatcacaggtttctcatgttttcctttaaaggcacctgcatactgttatgtgtcaggacttttaacagtgtcatctcaccatcgccttataggctctgcttttgtccaggccctctccaccagtattttttgaagacttattgatgatgcccattcagattggaatgagctgagccctcattgcagtttggatttgcatggttcttgaaaactggcaaatttgtgcaccatttcgtgtgctcttgttttaatttaaacggtgataataaaattggcttgttgaaattggctcctttaacgtggaccatgtattgagttttcttttttgattaccttcttcaggacatttagtgacagtgggtgtcgttttacagccacgcagtccttgtgaatgctgtatgcccacagaagcattgatttttaaagctgccctctggggaaatggacacaagaaggcatgatttcttcatgcccaactctagttacaacagaaagcacagcctggtgagagtggtgttcttggatgtaaattagtgtggaatgtgccagcggaaacacccataaattgtgtctcaatacttattgtttttttaaattaatgtaattttttaatttagagagttgtttcaaaaagtgtttttggtaggtgtagagaatccttttcagttctataggtacctattcatctttgcgttattttctcatttagattattacagagtgtagaatagacctctcttgccgtacagcaggtagttttggattttttattttatatgtaatattttatgtagtattttattctagtttatatgtattattgtggatttgctaatcccagcccgctaattggtaccttccctcacctcttcctctggtaactctaattttgttctgttgtcagttggtttatgggcgtggattttcagattccaccaagaagtgatatgtgtctttctttttccccattgatgtcgctcagtatgattaccacaagctcaggtattttgctgcagttggcatcgtgtcattcttttcttgatgagatatctgccgctgtggacatgtgccaccccttctttactcagtggccggtctctgggtatttagttgttccaggtcttggtggtttgctgtgacgctgtagtgcccactggggtgccggatcctttcagttctggtcgtcttcagatatcctgttaggagtggggctggtgaaatgcatggttgctctgtttttacagtttcatcgttctgtattgtggctgttaccatttacataccactagcaacataagacgagataccaagggaacatttcatgcaaagatgggctcgataaaggacagaaatggtatggacctaacagaagcagaagatattaagaagaggcggcaagaatacacagaagaactgtacaaaaaagatcttcacgacccggataatcacgatggtgtgatcactcatctagagccagacatcctggaatgtgaagtcaagtgggccttagaaagcatcactacgaacaaagctagtggaggtgatggaattccagttgggctgtttcaaatcctggaagatgatcctgtgaaaatgctgactcaatatgccagcaaatttggaaaactcagcagtggccacaggactggaaaaggtcagttttcattccaatcccaaagaaaggcaatgccaaagaatactcaaactaccgcacaattgcactcatctcacatgctagtaaactaatgctcaaaattctccaagccaggcttcagcaatacatgaaccatggactttcagatgttcaagctggttttagaaaaggcagaggaaccagagatcaaattgccaacatccgctagatcatggaaaaagcaagagagttccagaaaaacatctatttctgctttactgactatgccaaagcctttgactgtgtggatcacaagaaactgtggaaaattctgaaagagatgggaataccagaccacctgacctgcctattgagaaacctatatgcaggtcaggaagcaacagttagaactggacatggaacaacagactggttccaaataggaaaaggagtacgtcaagcctgtatattgtcaccctgcttatttaacttatatgcagagtacatcatgagaaacgcaggactggaggaagcacaagctggaatcaagattgccgggagaaatatcaataacctcagatatgcagatgacaccacccttatggcagaaagtgaagaggaactcaaaagcctcttgatgaaagtgaaagaggagagcgaaaaagttggctgaaaggtcaacattcagaaaacgaagatcatggcatccggtcccatcacttcatgggaaatagatggggcaacagtggaaacagtgtcagactttattttttgggctccaaaatcactgtagatggtgactgcaaccatgaaattaaaagactcttactccttggaagaaaagttatgaccaacctagatagcatattgaaaagcagagacattactttgccgactaaggtctgtctagtcaaggctatggtttttccagtagtcatgtatggatgtgagagttggactgtgaagaaggctgagcgctgaagaattgatgcttgtgaactgtggtgttggagaagactcttgagagtcccttggactgcaaggagatccaaccagtccattctgaaggagatgggtcctgggatttctttggaaggaatgatgctaaagctgaagctccagtactttggccacctcatgcgaagagctgactcattgggaaagactttgatgctgggagggattgggggcaggaggagaaggggacgaccgaggatgagatggctggatggcatcactgactcgatgggcgtgaatctgaatgaactccgggagttggtgtacagggaggcctggcatgctgcgattcacggggtcgcaaagagtcggatgcgactgagcaactgaactgaactgagcaacataagactgagaaggcaatggcaacccactcccgtactcttgcctggagaatcccagggacgggggagcctggtgggctgccatctatggggttgcacagagtcagatacgactgaagcgacttagcagcagcaacataagagggtccccttttctccatcaacactagcactgatcctttgtgaaatattttgttggtggccactcagaccacctggaggtgatccctcattgtaatcttgatttgcatgtctcctgtaattggtgattttgtgcatcatttcatgtgcttttaaaagctaatgtcagtagtatctgcctgttgatattgtcttgatgagagtctgcccttggtaaagatttcttttagaatacttagctcctaaaattattttgaggacaggtagctggcagtccagccatccttttgaatatttgtcccctaagcaacagttttcaagttgttgtggaaaaatggccacaaggtggggcatttcttcgaagaccaactgtgtaaactcttgcaaagagagcctcagtggaagtcgtggtttagggttgttatactgaattggaatgtgccagaagcagtacctccaagctagggtctcgtcactagttctttgttttttagtttactgtatagttttgctttgatttacagtgatttatggtgttctgtgtgtacagaatctcttacatttgcacatatacatgtatctattgagcttcaaattattctctcatagagactcttagagaatgttgcgtagaccttccctggtgtatctaagttcttgttgattatgtgttttatatgtagtcgtttctattgttattctcagttgccgtatttatcccttccccacatctttccccttgattactgataattttatttttgactgttgggggtctttggtcagttgggttctcgatattgatttttagaagtgatatctatgatatctgccttttttcctgagtaacatctcttggtatgcttagaactaggccctgtgggttcccgcagttggtattatttccttctgtttcatggtcgagtctcgttccattgtgggcgtgtacctcttcctctttaatgcgttcatctctcgatggaaactttgttggcttccaggtctttgctcttgtaactggcgctgcagtgcagctttggaggcatgtatctctttgaattctggttcttctgggatattctcttaggcgagggactggggatcgtaggtagctctagttttcctctaaaggcacctgcgtcctgctctgcagagagtgcacccgcgtcatccacctgcaccttaggcgggtttcctcttctccaggtcctctccaccatgggttctttgaagacttattgatgatggccattcagactttggtgatgtgagcccttgttgtagttttgagtttgcgtgtctctaagaactggtgagtttgtgcatcattttatgtggtctttttcccccctaaacaatgataataaaatggacttcttgttgtaattggctccttgaaagtcaacgaggtgttgattttttttttttttggattgcctacttcagaacatttattgacagaaggtatttattgacagccctgtagtctttgtgaatattgcatgtccataagcattgagttatgaagttgctattttggaaaacggccaccaaggcagcaggatttcttcatgcttaactctggttaccacggaaagcggagccttgatggaactggtgttcctggcctgtaaattagcgtggaaggtgccagcacagacacccctaagcttgtgtctcatgactttgtgtgttaattttattaatctaatttttattttctaatatagaatgttttaaaatgtattgttgttttggatgtgtcgagagtatttttcagttttatatgtatctatttatcttcaggtttttttctttttaatatgggttactacagaatcttgtgtacgcctcctccctcttcaggaggtcctggttactccctgttctgtatgtggtgctgcggatttgttaatcccacctgctgatttgtccccccacgtttcccttttgggaacaatgattttgttttctagttttgtgagtctgttcctctttttcaggtggttcatgggcgtcagttttcagattccacagatcagtgacatttgtcttttttttttcttttttgactgtcgtcacacagctaggcccgtgtgtgttgctgcctacaagctggtattgtctcactctttctcattactgagtaatatgccgtcgtggtcatgtaccgcttctttagcattcaactgtccttggacattttatctccttctggctcttggctactgtaagtgctgctgtagcccacctttgggtgccagtttcttttagaattctggtgtctgaatatcctgttagggtggggtctgaaatcgatggtagctctgttttcaccttttacagacggctccctgttgttatcttttctggctatagccgtttgtatgccgcgggcatctgaggaggtctcttttctccaccccaactccagcatttattgtgtgtggacattctgatgaaggccatttgactcctgcaaagtcatcccgcattgtaattttgactttcacatctctaataatttgtgattttgtgcatcatttcatgtgctttttaaaaaagtagtgcgagaggtatctatctcttgatattttcttgatgaagttcagccctttgtaaaaaaaaaaaaaattgtttttagaattcttagccctggacagttcttgaggactggtgtcttacagcccagacatccttgtgaatatgttagccctcttaaagtgaaagtgttagtctcttagttttgttccatcctgtgagaccccatgtaatatagcccgccagactcctctgatgatagaattcttcaggcaaggctattggagtgggtagccattcccttctccaggggatcttcctgacccaagtatggaaacagggtatcttccactaccggccaattctttaccatctgagccaccagggaaacccagtttcctctgtgtgtgtgtgttagttgctaagccctgttggactctttctgactcagagactggggcctgccaggagcctctatccatgggattctccagaaatactggaatggttagccattcccttcttaactgttttaacgttgctgttgctggaaacggccacaaggtggcagcatttccccagtaccaatgcaaggtactgtggcaaccagagcctcagtggacattctggtttggggttggaaattaaacaggaatgtgtcagaagcaacaccccaaagcttgtgtcttgtcatttctttttctgtcagtttaatttatagttttgcttgcagaaacacgacatacagcgtggtatatattgtgctgtgctgtgcttagttgcccagtcgtgtgcaagtctgcaaccgcatggactgcagcccactaggcttctctgtccatggggattctccaggcaagtatgtgtacacagtcttttacatttgcaaatatatatatctattgactttcaaattattttctcacagaggttagaacagaatgctgcttatacctcccttgttatttgtcctggttgattatgtgttttatatgaaattgtttctatttgttaatcccaactttcttgtttaccccttccccatgtcttcccctattacaacgataactttattttctagccttgtgaatctgtttctctttggtccattggtttcttggtattaatttttagattccacgtataagtgctatcagtctttttcttcttagttactaaccccctagcatggttagaactaggtccgtgtgggttgctgtaattggtattacttcattctgttttatgaccgaatcatgttcctggtgcaagtgtagctgttcctctttatgcgttcatgtggacggacagtttgtttccagatcttagctgttgtaactggcagtgcactgcatatttgggtgcatatttctttttgaattctgattttgcctggacattcttaggcattgactgctggttcatagggagcttagttttcctttcaggcacctgcacactgttctgtttaggggctgtttccagtgtcatcacaccagcaccttggaggctttccttttctccaggccctctccaccatgcattgtttgaagactcatcgatgatgctcattcatactgtggcgggatatgccattgttgtagttttgatttgtgtgtgtctctttcaactggtgaatttgttcacccattttatgagctctttctttcttttttcaaggttggtaataaaattgacttgttgaaattggctccttgaaagtgggacatgtggagtttttgttttgatcaccttcttcaggatagttagtgacagcaggtgttatttatagctctactgtccttgtaaattttgccagcccgtcagttcagctgctcagttgtgtgcagctctttgtggccccatggactgcagcatcccaggcttccctgtccttcactatctcccagagtttgctcaaactcatgtccatcaagttggtgatgccatccaaccatctcaccctcttttgaccctttctgactcttccagtgagtcagctctttatatcaggtggccagagtaatggagtttcagattcagcatcagtccttccaatgaatattcagggttgattccctttgggattgactggtttgatctccttgctctccaagggactcaagagcctctacagcaccacagttggaaagcatcaattcttcagcactcacttttctttatggcccaactctcacatccatacatgacttactggaaaaactgtagctttgcctatatgcagctttgttggtagagtgatgtctctgctttttaatactctgtcaaagtttatcatagcatttcttccaaggagcaagcgtcgtttaatttcatggtgacagtcactgtccacagtgatttttgtagctcaagaaaataaagccagccactgtttgcattatttctcggtctatttgccgtgaagtgatgggactggataccatgatcttactggttttttgaatgttgagttttaagccatctttttcactctcctctttcactttcatcaagaggttctttagttcctctttgctttctgccatacgggtggtatcatctgtgtatctgaggttattgatatttctcctggcaatcttgattctagtttgtgcttcatccaccccagcattttgcatgatatactctgcatataagtcaaatgagcagggtgatactatacagccttgatgtactcctttcccaatttgggaccagtctattgttccatgtccagttctgttgcttcttgacctgcacacaggtttctcaggaggcaggtaaggggggctgatatttctatctcttgaagaattttccagtttgttgtcatcctcacagtcaaaggttttagcgtagtcaatgaggcagaagaagatatttttctggaactctcttgctttttccatgatccaacagatgttggcagtttgatctctggttcctctgcctgttctaaatccagcttgagcatctggaagttcacggttcacatatttctgaagcctggcttggagaattttgagcatcactttgctggtgtgtgagatgtgtgcagttgtgcagtagtcggagcattctttggcattgcctttctttgggattgggatgaagaatgatcttttttagtcctgtgaccaccgctgcgttttccaaatttcctgacacattgagtgcagcacatcatcttttagggtttgaaacagctcagctgaaattccatcacttctactaggtttttgtagtgatgcctcctaaggcccacttgaccttgcagtccgggatgtctggctctaggtgagtgatcacatcatcatgattatctgggtcatgaagatcttttttgtatagtttgtctgtgtattcttgccacctcttcttactatcttctgcttctcttgggtccatactgtttctgtcctttattttgcccatttttgcatgaaatgtcccttggtatctctgattttgttaaagagatctctagtctttctcattctactgttttcctctatttctttgcattacctcagaaagcaagccatagtggaaatggtgttctgagttgtacattagtgtgggatgtgcaattttttattaattgaatttttaaatgtaaaaagttattgtaaaatcctgcattttctgttagcatagagaatctttctcagttctctttatatcttcatctttggattcttttctcatataggtcatcacagtgttgtacaggccccacttgctccacagcaggtccttgttgattacctgttttatctgtattattgtggatttgttaatccacaccttgtaattgatacctttcccttctgtaaccctaattttgtgagtctgtttctcttttgtcagttggtttatgggcatgaatttaagcctccaccaataagcgttatttgtcttttttttcccctactgactttgttcagtataattacgagagctccttatgtgtcactgcaggtggcgttgtgtggttgtttcatggctgagcagtacgccgttgtggacgtgtaccactttttctttctgcattcagtcagtttggatgtcttggttgcttccaggtctcggctattggaagtgggcagtgtatggtagctcgctttttaacttttaaagacagtctcatgctgtgctctgttgtggtccttaccatttgcataccgtaggcaattctagagggtccccttttcactgaccccactgtgacctttagttcgtagggatttcgatggtggtcattctgagtgctgtgagatgcttcctcatgtaatctttatttgcatgtctctaataattcctgattatgtgcatcatttcatgttccctttctttctcaaatgttgtgagttgtgttgaccatttcatatgtgttgatgaaattctgtcttcgtaaagatttcttttctaatagttactcccgggaaatttttgaggacaggtatcttacagcctgatcctccctgtgactattaagtccctttaaggacagttttcaaggtttctgttgcagaaagtgaccacaaggtgccagcatttgtttgatgccaatactgcttactctggcaaacagcctcagtggaagtcctggttggaattgtacattagactgcagtgtaccagaagcaataccctaaaagcttgggtctcgttacctcttttttttgtgtgtgtcagtttgatgtttaattttgcctggagtaacactgatacatggtgttgtatatgttgtatgtgtacacaatcttttacatttgcacatatatatatattgatctgcaaatgtttttctcatggaggttattacagaatgttgagtagacctcccttagtatacctgtgtccttgttaattatgtattttataaaaattgtttctatttgctaatcccaacttccttatttatcccttccctgtatctttcaccttgtataatgataatattatcgtgtggtttcgtgagtctgtttctctttggtcctttgggttcttggtattaatttttagattacccctataagtgctgtctgtcttcttcttagttgcccttcttagcgtggttagaactcagtcccagtgggctgctgctgctgttagttcattctgtttcacgactaagccatgctcctggtggacatgtagcagttcctcttcatgcattcacctggccagatgctttgtttccagatcttagttgttgtaactggtggcccactgcagatttgggtgcatatttctttttgaattctggttttgcctggatattctcttaggcattgactgctagttcatagggagcttagttttcctttcaggaacccgtgtattgttctgtgtaggggttgttaacagtttcatcccatgggttccttcgtaggctttcctttccttcagggcctttctatcatgtattctttgaagactcattgatgatggccattcagactggggcaaagtgagccctctttgtagttttgattggcatgtctctaagaacctggagtttgtgcaccatttcatgtggcttttttttttttttttaagtggtaattgacttgctgaaattggctccttgaatttttcgattatgtcttcaggacatttagtgacagcagatgtcatttatacctctgctctccttgtgggtattgccggcgtctaagcattgggtttggcttccctgatggtgctagtgataaagaaccctcctgtcagtgcaggagtgtaagacatgggtttgaccctgtgttgggaggatcctctggaggagggcatggcagtccactgcagaattcttgcctggagagccgcatggacagagaagcctggtgggctctgatccatagtcagagtcggacacgacctaatcagcttagcatgcagcatgcatgcatgcaagaattggttttaaagttgctgttttggaaaatggccacaagggagcaagatttcttcatgcccaactctgtttactacagaaagcagagccttagtgaaagtggtattcctgaatggtaaataaatgtggcacgtgccaggacaaacacccataagcttgtgtctcattaccttttgtttttattaatttagttttgatttagtaagttgttttgaaaatgttttgtttttgtgtgtgtagagaatttttttcagttctatatgtatatctattcgttttcgcttcttttctcatacaggttatctcagagagttgtgtagacctcccttgctctactgtaggtccctgttgattgcctattttatacatattattgtggaatgttacacaagctcttaactgattcctacccccaccttttccttttggtaatcctgatttggttttctaattttgtgagtctgtttctcctttgtcagttggttcatgggcttttccatcaattttcagctgccactgatgatactttgtcttttttatgtctaggtccatgtatgtggctgcagttggcattttctcatgttttcatcactgagtaatatgccacttggggcatgtaccacttcttctatatgcactcatctatccttggatattttgcttgtttccaaaatcttgtctattgaaaatggtgcaagattcttttagaatctggtggcctttgaatatgctcttaggagtgtgacttctgaaatatatggtagctctgtttttaccttttaaggacactttcatactgttgtctgttgtgactgttaccatttaaataccactggcgtataaaatggtccccctttctccaccctcactctagcatttattgtttgtagacattttgatgatggccattctgactgctgcaaggtgatcctgctttggaatcttggtttgcatgtctctaataattagtgattttgtgcatcacttcatgtgcttttaaaaatatagtgtcagtagtatctgacttttcttattgcttaatgaaaaactctagccttttcctaaagatttcttttggaatacttacctctggaaatttttcaggacgagtatctttataacccagccgttctggtgaatgcaagccccggaagccgtagttttcaagttgctgttgcagaaagcagacacaaggtggcagcacttcttcgccgcccggctctgcatactctggcaaacagagcctcgggaagtcctggttagatgttttaccttagagtagactgtgccagagtgtaggacttcctggtggctcagacggtaaggtgtcttgcttgcaatgcgggagacctgggttcgatttcagggctggggaaatcctctggagaagaaatggcaacccactctagtactcttccctggaaaatcccatggacagaggagtgtggtgggctacagtccacggggtcgcaaagagtcggacttgactgaacgacttcactttcactgtcagactgtgccagaagcaacaccccaaagcttgtgtcttttcacttgtcttttttttggtcagtttaatgtgtagttgtgcttagagtagcactgatatattcagtgttccatgtggtgtttgtgtacacaatcttttacacttccacatatacatatatctgttgatcttcaaattacttcctcatagagcttattgtgaaatgttgagtagagcgctcttggtatactgtgtccttgttaattatatatcttacctgaaattgtttgctaatcactacctccatattcagcccttccctgcatctttcctgtttgttaacaatgatttcattatcgactcccgtgagtctgtttggtcagtcggtttcttggtactaatttttagattccacctataggtcttatcatatgacatgtgtctttttatgctgttacctttctcagcatggttagaagcatcagtaggtccatggaggttgctgcctttggtggtgtttcattctgaggtgtgttccccagtggacctgtagcagtgcctctttatgcatttctcctcgatggacactttgtttccagtctttgctattgtacctgtgccccactgcagctttggtgcatgtttcttttcaaattctggttcttttgggttattctcttaagccagggaatattggatcattggtagctttagtctttttttttgaaagacagctgtgtactgttctgtctcggtgctgttaacagtttttcatcccaactgcaccctaggagggtgtcattttctccaggccctctccactgcggattctttgaggactccttgatgatagccattcagacttcggtcaggtgaccccccagttgtagttttgttttgcatgtctctaataactagtcatttttgtgcacaatttcatgtgctcttttcattttttttaacagtggtaataaaagtgacttgaaattggctccttgaaagtgggccatgtgtcaaatttgtttttattaccttctttgggccatttagtaatagcagatgtcatagcctggctacccttgtgaatattgtgtgcccatcagttcagttcatttgctcagtcgtgtctaactctttgcgaccccatgaatcgcagcacgccaggcctccctgtccatcaccaactcccggagttcactcagactcgcgtccatcgagtccgtgatgccatccagccatctcatcccccgtcgtccccttctcctcctgcccctaatccctcccagcatcagagtcctttccaatgagtcaactcttcgcatgaggtggccaaagtactggagtttcagctttagcatcattttttccgaagaacacccaggacccatctcctttagaatggactgattggatctccttgcagtccataagcgttggttttaaagttgctgtttcagaaagtggccacatggcggcagtgtttctacatgccaagtggtagttactacagaaagcagagtcttaatggaagtggtgtcctgggttgtaaatttttgtgcagtgtgccagtacaacacccacaagcttgtgtcttatttatttatttattttaataatttagtttttttttatggaataaattattttaaaatgttgtgtttaatataggtgtagagaatctttgccagttcttcatgtgtctattcatcacgtattggttttgtacatggggtattacagagtgttgtgtagaccccccttgctctacagtgggtccttgtttatcacctgttttatatgtattactgtggatttcctagtatcaaccccctaattgttacttttccccatttccccctttttgggtaaccctaaatttgttttctaattttgtgagtcttttctgtttgttcacttggttcatgggcatcaattttatgatttcagcaataatggtgtttgtcttttttttttttttcctgacctactttgctcagtatgattacaacaagggccatgtacgttactgcagttagaattgtctcgttctttttcttaactaagtattatgccattgtggacacaccccacttctttatgcgtttgtctggttttggacattctgcctacttctggatcttggcttggggaagtggtgctgtagtgcacatttgggtgcaagtttcttttaaactgtgattgtctttgcttgtcctcttaggaaggggactgctgaaatgtgtctggcaactctgtttttcccattgaaaaacagtttcattctatggtctgttctggctttgacagtttatataccactggcaacgtaagcaggtccccttgctccaccttcactctagtattttctgtccatagacatttgaatgctgttctgaatgctgtgaggtgatgcctcactgtaatcttgatttgcatgtttcttatagtttgtgattgtctgcattagttcatgtacttttttaaagaaaataatgagtagtatctacattttgctattgtcttgatgaaattctgccctttgtaaagtgttttttttttttttttttttttttttttagaaaacttacttgcagcaaatttttgtaataggtatcttacagccaaactctccttgtgaatattagtccccttaaccacaggttttaaaaggcaaagaaaccagagatcaaattgccaacatctgttggattatcaaaaaagcaggagagttccagaaaaacatctacttctgctttattgactatgccaaagcctttgactgtgtggatcagaacaaactgtggaaaattcttgaagagatgagaataccagaccacctgacctgcctcatgagacatctgtatgcaggccaagaagcaacagttagaactgtacatacatggaacaacagactgcttccaaaatgggagaggagtgtgtcaaggatgtatattgtcaccctgcttatttaacttctatgcagagtacatcatgcaaaatgccaggctggatgaagcgcaagctggaatcaacactgctgggagaaatatcaataacctcagatatgcagatgacaccaccctatggcagaaagcaaagaggaactaaagagcctcttgatgaaagtgaaagaggagagtgaaaaagttggcttaaagctcaacattcagaaaacgaagatcatggcatccagtcccatcacttcatagcaaatagatggggaaacaatggaaacagtgacagactttattttggggggctcgaaaatcattgcagatggtgattgcagccatgaaattcaaacacgcttgctccttggaagaaaagttatgaccaacatagatagcatattagaaagcagagacattactttgccaacaaaggtccatctagtcaaagctatggtttttctagtagtcatgtatggatgtaagagttggactataaagaaagctgagagccaaagaattgatgcttttcaactgtggtgttggagaagactcttgagagtctcttggactgcaaggagatcaaacaagtccatcctaaagaaaatcagtcctgaattttccttggaaggattgatgctgaagctgaaattctagtactttggccacctgatgcaaagaactgactcattgaaaagaccttgatgctgggaaagactgaaggtgggaggagaaggagatgccagaggatgagatggtttgatggcatcaccaactggatggacaggagtttgagtaagctccgggagttggtgatggacagggaagcctggtgtgctgcaggccatggggttgcaaagtgtcagacacaactgagcgactgaactgaactgaactgagtcactcaatcatgtccgagtctttgcacccagggattgagcacgttaggcttccctgtccttcactgttacccaaaattttctcaaactcgtgtccgttgcatcgataatgccgtctaacccacctcatcctctgttgcccccttttcctcctgctgtcaatcgttcccagcatcagagtctttttcagtgagttggctctttacatcaggtggccgtgtattggagcttcagattcattccttctaatgattattcatggttgatttcctttttagaattgactggtgtgatctccttgctttccaagagactctcaagagtcttttccagcaccagagttggaaaccgtcaattctttggtgctcagccttctttatagtccaactctcacatctgtacatgattactggattaaaaaatccatagttttgactgtatgaaccttttgtggcaaagtgacatctctgctttttgatatgctgtctaggtttattgtagcctttcttccaaggaccaggaatttttaaatttcatggcagctcaccatctgcagtaattttggagcctaagaaaataaagtctgtcactgtttccattttgccccatctacttgccatgtaaagtaattacttgctagtaaagtaatgctcaaaattttccaagccaggcttcagcagtacgtgaaccgtgaactccctgatgttcaagctggttttagaaaaggcagaggaaccagagatcaaattgccaacatccgttggatcatggaaaaagcaagagagttccagaaaaacatctatttctgctttattgactatgccaaagcctttgactgtgtggttcacaataaactgtgggaaattctgaaagagatgggaataccagaccacctgacctgcctcttgagaaatctgtatgcaggtcaggaagcaacagttagaactggacatggaacaacagactggttccaaataggaaaaggactacgtcaaggctgtatattgtcaccctgcttatttaacttctatacagagtacatcttgagaaacgctggactggaagaaacacaagctggaatcaagattgccgggagaaatatcaataacctcagatatgcagatgacaccacccttatggcagaaagtgaagaggagctaaaaagcctcttgatgaaagtgaaagaggagaatgaaaaagttggcttaaagctcaacattcagaaaacgaagatcatggcatccggtcccatcacttcatgggaaatagatggggaaacagtagaaagagtgtcagactttattttttgggctccaaaatcactgcagatggtgactgcagccatgaaataataagacgcttactccttggaagaaaagttatgaccaacctagatagtatattcaaaaccagagacattactttgccgactaaggtccgcctagtcaaggctatggtttttcctgtgtcatgtatggatgtgagagttggaatgtgaagaaggctgagcgccgaagaattgatgcttgtgaactgtggtgttggagaagattcttgagagtcccttggactgcaaggagatccaaccagtccattctgaaggagatcaaccctgggatttctttggaaggaatgatgctaaagctgaagctccagtactttggccacatcatgcgaagagttgactcattggaaaaaactctgatgctgggagggattgggggcaggaggagaaggggacgacagaggatgagatggctggatcgcatcacggactcaatggacgtgggtctgagtgaactctgggggatggtgatggacagggaggcctggcgtgctgcgattcatggggtcgcagagagttggacatgacttagcaactgaactgaacttgccatcaagtgatgggaccagatgctataatcttagttttctgaatgttgagttttaagccagctttttcactctactctttcactttcatcaagaggatctttagtgaccctttgctttctgccatagggaggtgtcatctgcatatctgaggttgttgatatttgtcctgacaatcttgatttcagcttgtgctttatctagcctggcatttcaaatgatgtactctgcgtagaagttcaataagcagggtgacagtatacagccttgacctactactttctcaatttgaaaccagtgcattgttccatttcccgttctaactcttgcttcttcacctgcatacaggtttcttaggagttaggtaacgtggtctggcattcccatctctttaagaattttccacagtttgttgtgattcacacagtcaagggttttagcttagtcaagtgaagcagatgtttttctggcatcccttgctttttctatgatccaagagatgttggcaatttgaaatgtgttcctctgccttttctaaatccagcttgtacatctggaagtctttggttcaatattgttgaatcctggatggaaggattttgagtgttaccttgctagcgtgtgagatgagtgcaattgtgtggtagtttgaacattctttggcattccctttctttgggattggaatgaaaactgaacttttccagtcctttgaccattgctgaaagtgaaagtgaagtcgctcagtcgtgtccgactctttgcgaccccatggactactgtagcctgccaggctcctctgtccatgggattctccaggcaagaatactggagtgggttgccattttcttctccaggggatcttcccaacccaggggtcgaacccaggtctcctgcattgcaggcagacgctttaacctctgagccaccagggaagctgagtttcccagatttgcttgcatattgagtgcagcactttaacagcattatcttttaggtttttgaaatagctcaactggaattctgtcaactccatgatttgtttgtagtatgattcctagggacaattgacttcatgctccagaatgtctgtctctagggagtgagcacagcattgtggttatctgggtcatgaagacccttttcttttttttaaacagttcttctgtgtattcctgccacctcttcttagtatctgttgcttctgttaggtccataaaatttctgtcccttattgtgctaagctttgcatgaaatgttcccttgatgtctctaattttcttgaagagatctccatagttttccccattctattttttttttttttgcggtttctttgcattgttcagttaagaaggctttcttgttggatcttgctattctttggcactctgcattcagatgagtatatctttccttttctcctttcccttttgcttctctttttttttccagctatttatagggcctcctcaaacaaccgttttgccttgttgcatttcttttaagttgctgttgcagacgatggccacaaggcagcagcatttctgcacagcccagcttgacttcctctgcaaacagagcttcagtggaagttgtggtggggagtataaattagcctgtaatgtgccagctgcaacaccctgatgcttgggtctcgtcacttcttggtaatgcgtcattttgcttggagtcacacgacatcaaatgatacatgagttgtatgtgtacagaacttgtacgtttacacatatacatatatagagagagcctcattattttcccatagctgttattccacaaagtctagtagagctcctgtcatatacctgtttccttattgattatgtatgcataagtaatagtttctatttgttaatctcagcctcctaatttgtctctttcctgcatctttcccctttgttagatataattttattttctaatcttgtgagtctgttacttttgagtcaactggtttcttgatattaatttttatattctacctatagagtgggttcgatccctggctctgatccctagaagggatcctctggagaagggaatggctactcactccagtgttcttgcctggggctgcaaagaatcggacacaactgaacaactaacagtttcacataagtgatagcatatgatatctgtacttttgttctgagttacctctctcatcttgcttagaactagttccatgtaggttcccgccactggtgttatttcattccatttcacggctgagatgtgttccatagtggacgtgcagcagttcctctttgtgaactcattctcgatggacgctttgtttcgtttccaggtttttgctgttgcagctgtggccctcagcagctttagagcatgtttctttttgaattttggttttttcctgatattctcttaagcgtttgatgcagggtcataggtagctcttgtttttgcttccagaccctgcacgctcttctgtgtagagacttagcggttccatcccaccagcaccacaggaggctgtctctccctaggccctctccaccaagtgctctctgaggctcactgatgatggcctgtcagacgggtgagttgagtcctggttgtttggatttgtagaccgcgtgatttgggcattttgtgcattatcacacgggttcttttttgttttaatggttgtaagaaaatctgcttgttgatattggctccttgaaagtggaccatatgttgaattttttttattaactttcatttgttagatatgcactgatgcaatgattgaccaaagctgttgtttgcaagcgtctgaatgtaatgggaattcttgttttgggtggtgggagtgtattctttcgtgaggaaggcgttatgagatgcgttaattgaagagacacactgggcaacatcgggccctgtcctgagccttcctttagaatggcagctgggtagaattgttcctgaggttacgtttatgttggtgttgtgacttgtgtttaacgatggattttgaggactgtttaggcagcaagggaaataggtttataggttacaggctttaggtctggttctattccctccagaatttttcctgttctttttgtcactaagcaccttcatttttcctttagctcactgtgacccaggcctacagatgaattcgggctatatctcaccctgatgctcatataacccagtgtaactaggagtttcccattggagacttaccaacctgttattttccgggaagaaactagcttaccataggtgatttccagtgcctagtccttgcttcgtccataataccgctggggtcttaccattgcaataagggaccattttataacaaaggaagggacacgtagtggttaactttaaaactgatagctgaacagaactgtggtagatttctgtctctgcatatgtattttgtgtgtatacggttgtgaagatcatttttactcttgctagctcaaacttattaatgtatatgtacgtatgtttgggtttatttcaagtcctgccttgttctaaaaggatcaaggtaacttctcccttctttccatcccatcacatgaaatagaattagtatgtatgaaccactttgtgaggaatgcagctcatttaatgagccttgatttggaaattagaggacaggagaggacatcacaggatgtgggtcacaaagggactagaactgggaaccagctggtgtaaagttggaaagagaatcatggtgatgatggaggtgaccaagctcccacttgcttccagaggggatttaatgcttccccttcagcaaagccctgacgccgtgaagaaagaacttggcggcgtccctctgactgtcagaaatctcctttctcctcctgggctgggttactggttgtaggattgttgggatcagcgaggtggcaggcctgcaagactgctaaagattgtgagaagtgactttgtgatgatctttaaaaataatacctttattctgaaagttcaagtgcagtttaacattaatcgaagctgtcaggacaacctaaaatgtctcctctttcaagaaagctgattttcttccctcagctgaaaactgagtgattaattagcctgtcattatcaaagaagatgataatgttagtagataactgcatttcctgttaagtggattaccttctgtatcccatgtggagttcacgtatgtactttagaaatacattcatctttaaaccaagtcactgctgttaaagctgcgtggtgagattttaagctttttcttgatacttaacttggaaaagtcagctcagagcctttctgtcttaatgggcatcttaaggcaggttcttttggtgtcctgattctccaccccagttcttgccaacccctctgcccctcagcaaatgtgctgacacacagacttgtccccagcagagtcggttcctctcatccacatgtgtgcccgcgttcaggcagtccagctgacgtgtgcccggttatgaaagtcccaaacactccagttactgctccctttttctcttggttgcttttgggcattttggttacctcctctttcaccttcaccatttgaacttcagactgtaggtacctgagatgacctttccttcttcctaaaatcccgttattcctaatttataacggtttcagctcaactttaagtcccctctcagcacgttcacacagtaggtgttcttcctggcttcatcttcctgaagcagtggctcagatctggactggttgctcctgcggcctccagctcagccgccatcctgggatctcccttaaccaccatccctcacctctcctgtgatgatttccttactttcccagatcctggattttttttttttctctcttgagttatgccttcattttggtggaacatctccttcaattgcttcacgaggaagggtttctcggcaggaatctttgagtccgtggatgtgtggaacagtaaggacctaacagaagcagaagagattaaaaagaggtggcaagaatacacagaagaactgcacacacatagaaaggtgttaacgacctggaaaactgtgatggtgtggtcactcacctagggctagacgtcgtggaggaggatgtcaggtgggcctcaggaagcattactgtgtcgaggtgatggaattccagccgagctgttcatatctgaaatcctaaaagatgatgctgttaaggtgcttcactccatatactcgcaaatttggaaaatgaagcagtggccacaggactggaaaaggtcagttttcattccaatcccaagaaagggcaatgctgaagaattcctgtacagttgtgctcatttcatgtactagcaaggttatgcccagactccttcaagctccgtttcagcagtacatgaactgaaaacagatgtacacgctgggtttcaaagaggcagaggaaccagagatcaaattgccatcatttgttggatcgtggagaaagcaagagaattccagaaaaacacttacttctgcttcattggctatatagtaaagcctttgactgtgtggactgcaacaagctgtggaaaatttttaaagagatgggaaaaccagaccaccttacctgcctcctgagaaatcagtgtacaggtcaagaagcagcagttagaaccggacatactgactggctcaaaatagggaaaagagtatggcaaggctatatattgtcaccctgtattcagagtacatcatgtaaaatgctgggctggatgaatcacaagctggaatcaagattgccacaataacctcagatatgcagataataccactttaatcacagaaattgaagaggagctaaagagccttttgatggagatgaaagaggagagtgaaaaaactggcttgaaactcaacatttaaacaactgagaatatggcatccagtcccatcccttgatggcaaaatagaaagggaaaaagtgaagcagtgatggattttattttcttgggctccaaaatcactgttgacgatgactgcagccatgaaaataaaagatgcttgctccttggaaggaaagctatggcaaacttagtgtattgaaaagcagagatatcactttgctgataaaggtatgtatggtcaaagctatggtttttccagtagtcatgtaaggatgtgagaggtggaccataaaaaaaactgaccactgaagaattgatgctttcaaattgtggtgctagagaagactcttgagagagtcccttggactgcaaggagatcagtctaatcaacccaaaaggaaatcagtccaaaaaggaaatttgaatattcctcggaaggactgatgctggagttgaaacttcaatactttggccacctgatgcgatgagccaactcattggaaaagaccctgatgctgggaaagactgaaggcaaaaggagaagagagaggcagaggatgagatgttatcatcaccaactcaatggagatgaatttgagcaaactccaggaggtagtggaggacagaggagcctggcatgctacagtccatggggtcgcagagtcagacacaacttagtgactgaacggcaacagcaatatctgaaaatgcccttattaggccctcgggtttgattgataggcctaatgtggagtttagcttgaaattaattttcccttaaaaatttgaaggcattgtgtcttccaccttcagttttgctgtcgagaatttctagtgttgtgctattcttgatctttagcttgaagcctttttttcctccgtggaagcgtgtgccagctcctttttaatcttcagttttctgaagttttacacttctccctccagagataagagctgcaacaaattttcatggctttgggggttctatagcgcaaattggattgcttcttgacttgctactgctttctttcttgggcatacttttcagtttcaaatgatttttttttcttttttctgcagcctgcttctctctttctcttgcccttgagtcttctaagaaaatgaccataaaaactttactgtgattttagtgaggtgtttggcggggggaagcagagccctccactcctctctctttgcctggaaggctacccatttgctcatcacccagctctgccgtggatttttgcctccactccatcgtggagacaaccccttgcccccagaaagactactcacaagctcttgtcctcaaaccccaccttcgtgggctctgtccgcagcatttgctcatcaagcaaaagtactcggattgattacttcttttccccccagtctaatccactagcaaggcatgtgcctaaaatatagcttcaatgtatcgttgcccttaggtatctagtccagtgcctggcacacaggaggcattcactggtacatgggcagatgagtgatgtcaataggaagccaggaaaattgttgaaattgtggactctcttaacatgttctgaaagacagtctttgaaagtaaaggcagggtgactgttctagattaaaagatattttataaaggcctggttacaagtgctatacaaaattcttgattggattccattttttttttttttaacttaaagctagctagaaaggataccgggcttctcacgtggtgctagtcataaagaaccccctgccagtgcaggagacttaagagatgtgggttcaatccctgggtcgggacgatcccctggaggagagcatggcaacccactccagtattcttgcctggagaatcgcatggacagaggagcctggtgggctacagtccatgggttgtaaagagttggtcacaactgagtggacttagcacataaaggatactattgggacatttggggaaacttgatggattataggtaatgttgtatcaatggttgttatgattatgtgggaggatgtccttgtgtttggaaaatacaagttgagagcttttgggatgatgtgttatgatacctgcaacttgtttttcacatggttcaaaagaaaaaaaaaagcttatctctagaaggaagaagggagaaaaaaaatgtagcacaaagttaaccatgcgtgaatctagctgagtggaatgtgcgttttcattttactgttctgtctattttactgtaggtttgaaaatttttctaaataaaaaatttaaaaaatttagaaaaaaatcaacagtggagaagaatttaaggaaaagatatttcagggctatttgtaagccccaaaatgctgaaattaattttgaagcatgatgttaaatataataaagcctaaggataatatgtatgtctatctgtgtgtgtatagttaatcaaaccaagtagaattaaggcctttctggaaaagttacctctgaaaaatttggcctgaaagcctgtgactcgcccaccagggggcagtgcaggagcgccattctgtgcactgctgagcgccgtgggtttcccccacataactgtttccacaagaggtcgctcttctctgcacaaaacattttcaggattcttagaccactttaatagagaatgcggatggttacactgcttcccgtttctttcttcccactccgctctgcttctgagttctgtggatttttgcctcgactcctccgcttcgtggagtgatttcacggaagtgtctgggtaagaggggtgcggatccgctctcctatgtatgcctcaaaggccaagagtgcatttgtctactcctaccccaggaattcagtctttttattacaaactgccaagtcatggtcctactgcagttcatctttagatttcctaggatgtgttgaaattctgggaattccactcagcagttttacctctcctaaagctgtgatgtggctccttactgagtgattcagatatatatagctcagacggtaaagaatccacttgcagtgcaagagacacaggtttgatccctgagtcggaaagatcccctggagaagggaattataacccactccagtgttcttgcccagagaatcccatgaggtggttgacttagaaggactgtctttctgtgcagttaaccaagaaagatggcttagtgtaaatgttgtagaaagttacccagcagattaaatggttagcctgtggtgagtgagtgttctttcatttaacatgtactcaatgcctgcagaaccagattgcactactggactagaattaaaagccacaagagtcagactccaaagctgattataataggcaaacggggtcgagtagccccaggcaaatttagcagggcgctcagaagtagtgctgacttcagatataagcaaaagtgctctggtaggggcaagagacggcaatggcagcccactccagtactcttgcttggaaaatcccatggacagaggagcctggtaggcagtcaatggggtcgctaagagtcggacacgactgagcaagttcattttcactttttactttcgtgcattggagaaggaaatggtaacccactccagtgttcttgcctggagaatcccagggacgggggagcctggtgggctgccgtctatggggtcacacagagtcggacacgactgaagcgacttagcagcagcaggggcaagagggagggatgttacttgctctgtcttggctcaaaacattgagtcctgtctagagatcctccaaggccaaacttagcatcaggataccaccagcttgctgtgaccttccccaagtgagcgaagtgcccttcatgtgttgtcgtctgtccagttcagacctctgttatacgcgctattcgtggtggttatttgcatgctctcctctcctgaggacagaggctgattactcataggttggtgtattttctccactctggttccattctcgtccagtgcatgcctttttcccctctgggtgctccctttttccctcttttttgaagtctttttctcaaatacaatgacatagacttgctaatatcttaaaaagtaaagcaaagaaaagtaaccctcactgagtgccttttttgtgttggacacttcactgtgttaggtgtttcataagcatcttctctgttaatcttgttcctctaacaaactcggcgagcttcttcgctgttcaagtctttgcactcactgtttcctttcctgggaacctgtttttcctcaagtgctcaagaaggcggtttccttttctcataacaaacgtgtagtttataggccgttcttctgtggctgagtttactaggctggtgaccccactttcctcccagtggtgggtggggtcttggggaggaactcactgaggccagcctgaggacttggacctcctccctctcgctgggtccctgcccttccagctgctcgtccagtgcatcctggtcactggatgtcttcttttagtttactaatttattataattgctctgtttcttcctcatgataactgatactttcatctagactctatttctccctagaagacgagggattcagtattttggttagttttccccttaagcatgtgctaacccatcatctttttttctttttaaattaacataattgtatttatttatttattttggccgctctgtgtggcatgcaggatcttagttccctgaccaggaatcgaacctatgccccttgcagtggaatcacagtcttaaccactggatagccagggaagtccctaacctatcatgttttaacatacagttttgttctttataatctgaaagtctagatcatacctttgtaaacagatatatacttaattaaaaaactcatccgtttttacagctctagtattaaaatggtatagccaagttctcatcttctgttatggcgcttcccaggtggcgcagtcgtagagtcaagagatgcgcgttcaatccctagttcaggaagattccctggagtaggagatgccagcccactccagtgttcttgcctggagaatccccatggacagaggagcctagtgggctgcagcccgtgggtcacaaagagtcggacacgcctgagcacatgagtgtcttctgttatgcctctcttctatttccaaccttcaaggctcaatttaagtcctaagtcctctgaggttttctgcacctttagtacctaacatcaatctttcctgctctcagtacctatacttcagtttggccattaatctaaagaatcttatttgttatttaattgctttgtctgtctgtgtcttatgtgactgatgagatggttagatgccagttgatggtggcaatgtgttcttaatttttgcagtgttgaaaaagagtcactttaaaggacttttttgaagcaaaatattttaaatatatttttcctaatggagttttacgtattttcttaaacacagtataagaattattcatctggtttaggttttctgaaaagcattttctttgactataggatgattatttttctgtatttttagtattcattttattctcagtattcattgaagaagactaatgtgttcaggtataatgctccaaggaagtgtttcagaaaagaaagaatattaattatttcctgtagcttatctataaaaagccatttcggaaagtacattcattttaattttttattgggactttgcggttgatttttacagttgctgtattaaagtcatttttagttttctacagaaaatgtataaaggtttatttgataaaatatcaatattttaatagctataattgtctaagcattcctaattatgtgttgagctttgagcttcttaccagagctgcagtttcctggcaaagtttaaacatcagtctccaatcagttaggttaatctctgtataatataattaaattcatctgacctggttactgggtacattttaaatatcagactgctaatcatgacaccacgacgaatatttcaattttaaagttgaccttttagaatcagcctttctttaatctgccagttgtacttaacagaaatatttcttttaaaaagtaacctgacttaattcatgtatttaatgagaaaaaacccaaagttattataaaatgtgtataaggcaagctgtcttaaaaaaactaatgacatttctttttctttatagagatacttcctagttgggagcaatcatgcagaaacaaaataccgtgttttgaaaattgatagaacagaaccaaaagatttggttatcattgatgacagggtaagtatcttgacaacctgaatacagacagaaacctttgtattccttgtttaatggatatgaaatatccttatagcttctagtgatgtatacttttttttaaatcatacatctaaaaatgacagtttttcatggttggctagaatttttaatctctaatctggtttctaaaattactgaagtcagaaagtttgccagaattacactttgcccttcattttgattttttatgaagcaaacactttggataagataatgaatatattttcttaaaggggtaccattttaaggatctgatataactctcaatattgcagccaccgaagagattatttcttcttcttctttgatatgaagctccttgaagtcaaaaaggacttctctactgcagacttgttattatactgctaaaagtgattggtagggtcacttctgatgacttgctagagaaatgttaagctgctattatccacatgtcatattattcagagttgggacttaattcaggtggcacaaaaatatgaggcttttagtcaaaagagaaatatactaaggtggaattgaaccattaattttaactctcaggtgagagcagctaacactttgtgttgaagttcctgtctgaatatttctgaatctgtgtggattcctggtttttcaaaggtatcaatagctgtagtttggaactcattttcactaagctctttggaaaactaatttctatggtataataattttggatatgttgtattttgtgacttctcttactcttgggtatcatggtcctccttcacccacacacataccatctggctatatttattaatatgatgtaatgatacttggctttacttgggggtacgagtggctgattggggatctctttgggaatcttataaaagctatgggccttctcacaaaaatacacgtatgcatgtataaccaaaactttgcatacagttttaaggagtttatagatttcttgaaacttgtctgtagattcctcatacctctgaatctctgatccagaagataaggttttggtataccttttttaagtacagcaatgtgtgatccagtaaccacccttaattaactgctaatgttaaaaaatttgttggctttttagaattgtagcttagtcctgcacttttatatacttctctgtgaaatagctaatgatgtaaagctgtaggaaacttttaattttcagaggtaaataaataatctaaaaatcaaacacaatcttacagattaatttgcttatttctagcatgtatatactcaacaagaagtgcgagaacttcttgggcgcttggatctaggaaacaggacaaagatgggacagaaaggctcctctgggttatttcgagctgtttcagcttttggtgttgtaggtaagaaagatgcctccctctttcaacctctttttttaccccccatatgtagactacttgaagatagtttgcaaggctcatacttatataggtttgtaaatgtgacccaccttctgggtctttggttatttaaaaatgaatcatctatcaaccaggtatcaaacagccgttatataatatctgctatatgcccaggactgtgctcagattcatataggatatgaacaaatgtagcgatggtttagacctctaaggagtctggcttgtcaagaaatgaaaaagtgaaaattggcttggacttgtaaacatcagctggaaaaacggatacaggtaaaaccagcttttaaattagaggagtttctctcaaggacacgctgcagtgtaaagtgtcacaagccccttctctgagtgacaactggtttcttactctcagagaaactttgttctctaaaatcacagtcggaaactttgctctttaaaagtgtgtcagtgagagaaaacatccccctgtcgcctggatgatctaagtcattttgacgcagagaggcagcctcggttggcaaggagagcgtggagcttcagataagggctttcgggacgcagccgactgcagctctattcactttattgctttctaggaaatgagaccccgagtctgcttcacattccagacctgatgtgtatctctttacattcagtcttgctctggtttgagcctcttcatttaaattttacctaatctctttcccaaatcctataatagcgcctttacttattcatgaacaagcatagaaatggccttggcctttaaaggagtccatggtccagcttgtgggcttttgggagatgccccgcagtgcctctggtgcgttgtccctcatgacagtgggtcagaaaacctatctttgctcctggattggtcccagggagtcttaggatgattggattggacgggggtggcacggaggggtggggggacaaaacccagggcccaggaaacaactccaggactggaatttggatcccagttgtgtagtcaatagtaaatgctggagattacataagaggtagacttcttagacctggagtggccaggaaagagttcctggagaagataagattcaggctggaccctggaggagaagcaagctgtggatggatgtggggaatggaggggagagctccaggaggggtgacggcagaagcaccagcatgaagatgcccacgggtcctggaatgctggcaggcggttggtgaggccagatcactggggccttggaagccaggcagagggcagttgggtttcagcttccttgttggcatagccatatttcaagtcttttattccacccccccaacacaaaattatctttctgcttcttaaacccgctgaactgtctgtaatagttactgagtggtgtctgtagatgttaacaaaattaatatggactgacctgtgctacatagtttcataatcttaggttcatttttctgattagcactctctatttggtgcatgtgtgcttgttgagacttggattatgcctattctgctgtgtttgaagtttgtttttctcagtgcgctctcaaagcccttcatgtggaatccctttaggtctgttttgtgtcttaggcggctgccagggaagggtgagagtggttggtatggttagtttcttctgcataggactggcgccttctgtgtaccttctgcttagtcttgacaattcccttgaggtttcatgtttaatggataacatgtgcatgttagtgtatgtcaggtgagttcatgtgtttcaattccatatattccatacatgttaaattccactctaagtgttacttaactcttagtcaaagaaaaaaaatctagaaataaaaaaagtgtcttaaatacattaggcttaatcagataaaaactcatttctttaaatgctaacactttattacaacttttgaaaaatgtaaatttcctaaggtatatgtaatattgaatgcctaattagtcagagttaaatattcaaaattgaatcttgcttgctaattaagtataatgagttgaagatcagttgtgggtgtgtgtgctaaattacttcggtcgtgtctgactctttgcgacctatgggctatagccacccaggctcctctgtccatggggttctccaggcaagaatactggagtgggttgccacgccctcctccaggggatcttcccgacccagggattgaagctgggtctcttctgtctcctgcactggcaggcgggttctttaccactagcgccacctgggaagcccgttgaactagattttaaaatagctgcccttgggtgttttggagttgtgttgggcagtttgctttttacattaagtggcctctaggtgctctcctgggctttgcaggtggtactagtggtaaagaacccgcctgccaatgcaggggatgtaggagagctgggttcgatccctgggttgggaagatccctgggaggagggcgtggcaaccccctccagtattcgtgcctggagaatcccatggaccaaggagcctgatgggctacagcccataggtcgcaaagaggtggacacgactgaagtgacttagcacgcatgcacgcatgcagatggtgtactgtgttactttaatggtactttgatcattcttcactgttctgggcatctttgcttttagcaatattccttgcctcattttaaatttattgataactaagcttgtaaaaccatagctttatcaatggcagcccacttcagtactcttgcctggaaaatcccatggatggaggagcctggtgggctgcagtccatggggttgcaaagagtcggacacgactgagcgacttcactttcccttttcactttcatgcattggagaaggaaatggcaacccactccagtgttcttgcctggagaatcccagggatgggggagcctggtgggctgccgtctatggggtcgcacagagtcggacacgactgaagcgatttagcagcagcaaccaagtttatagccaaataaatattcattttatacacagctattaataaactttggaggaggactgaagatattgctatgtttctcttaggtggcattcttagatattgtggtacatttctatcgcaatttgaggcccctttgagactctccttggatggtgaagtgactataaggttgacttgccagtaaagtgacacggtaatatactaagtaaacatttatcacttttgtggacatgcactttatttattctaattcaaccatgcttagaatgtttgaagagtaaataaggacttaataaaaggctatgagttatctagtattggatagactaatgagggctactgaaatagaaaaatgcaaattaagggcaactgaaatagcaaaacacaaaatacttaaccttggaaatagaagtagtctgattgtcagaataagacacgtgaaaggacttgaatggttgtcttctgttctgcggctgaagtattttctctctcaattttttcagcatgcacaatttgtgaatagtatttttgctggactgttttgaactgttaccatggttaatctaattcacagtctataagaatctaaagctctgcttctcaattgtctacagtaaaggaccagtcttttttccagcaatgtgtcaagaccaacacaaaagcctactgggcgtaacttgtcatcatcagcttggagcacatgtgactcaccacataagttcctaatctccaaactagtcttgtctgttcaaggcaggttcgttgatgatgagctctgatgttcctgaacccttcctttcagtttgtttgcatttcttttcttggactgctgctgaaagctcacggaccatctctggtccctagacatggattgagcctgccctgtagctgtggtgcccatttatgacttgttcctttgtggtttgacagccaggaggtttgggagaccaccagataggtcgtgagcatcactcacccagtttttctttttgttgtttttaagctcctgcaaatctgcagggtcagaaaatccatcagtgggtgccaggtgctgggggtgggaagaggggatggacatcagaggagcctgagggggtgtttttggagtgatgggaatattatgttgacctcagcagtggttgcaagactgtgtgaaagtgaaaagcgttagtcgctctcacccagttttaatgtggtcctgggacatttgggtggaggcctgtaatccttacttctctcggtgctctgaccatccagctcctttggatatatgtcctttttctgcctgtgtcaccgtgagaggatacgcttgtaagctactggtaggctgaaggggagtggtagagtgtcttcatagtagaccaagcgatgggcttggttgttctttaaagcagcacccttagaaacagatggcagagtcaagagaaagggaaaatggcaaggcacgtgggcctcgactcgtgaggggatgatagagttggtgttagggtgtcactttggtcccttgtggtttttgatatgtctctgtcagagtgcagagaggctctgaagatagtgaccagctgacaaggtgaccgaggaggatactgccctcttccctgctggtgagcttgtgggatcctctccagcccccagaactctacaccactccatcctctcacactgcccctttttatttactttgtttggtatccatcacaaatgacacagccttttctacttggagaaaaagaagtcacttttgcatgatgaccgttgtctaggcttctgggaagaacttggggaaattggtctgggatcagaagtgcatagaatgaagatgaaaaaacttgtcctggtttttcacgtgttaaaatgatgatgaggctgacttttgacagaggtctgtgccagactgaagccttttaactgttggctgaatttgatgggaacctttaaaaaaaaagagtgacatttccaattggtagtaaaaagaaaataatctcataatatgcaaaaagcacttacgctggtagagagtgttcttttgtacagtatatttactttcttaaaaatataaagggatatgtaggatgaaatagtctagaattgaaaatataaaattcaattggaatgcaggttgggggaaattattacacagaggtttttttccttatgtaaaaaatacatagcaagaacaaaaggaaaactgatttgtcttggaaatatttattacttaaactcaattagattccctttttgggtgtttatgctgcttccaggacccttgattttgtaggttttggccttcttaaaggataactgcttcctaatttgcttttaatgacattgacattaagctttatttcctattttatgtcctttagctttagtcagggaattttgggctagtctacaagtgaaagtagccaaacatgacatgaaactcagtcatgtttgactctttgtgaccctatggactgtagcccaccaggctcctatgtccgtggaattctccataatactggggagtgcattgccatttccctctagtggggaggagcacaaatgaacgtttttaaaaaaatgtgctttgtgggtctccaaaatattttaatagcagtaacgtggttcattaaaatccttatggtatctttctcttaagtattttggcttatttatattagtacgttcaattactaatctcaagaataacacggcacagactatgggtatttgccaattctagagcaaaaatttatagccccaagattctccctcagactttatagagtgcaacactccagagagagagaaagagggcaagtgcaacacgcgcacacaagaaagttagttttaaaaaacattaggctgtatacgtaaggtccttggttgagtttttctttcagggctttgaataagttacgccatagccttctggcctccgttgtttctggtaggaagtcaactgtgtgtgaccgtttctgactcccgcagtgagtgagctggggtgacaggatccggtatctgtactgggtgggatagagcctcactctgcaagtaggagccgggtagaagaaaggagcccccggtttcaggtgtgcttgcctggaataaagaatttgcagcacagagctggagggggtgagaaacgctggtggcctgcaccccctgagcagaggccggggccctagactgagagctggggaggggagcgggacgcctgctgggagtagacacccatcacactgaattgggagaagggcgtaggagggaagcaagctgtggttcagatgccacagactggctggtctttccacgatctagatttttttgaataaatgtttctccatttgctgtatgccattaggagaatttccagaaactgtcagtgttttgtttttatgattttcaccagtcaatggcgagagggtctgctgagctcctcacatagctggttcagaagtgtgcccctctgcctccccccagccaccaagagaattagttttaacccccaaagcaaaagttgtgggagccagaacatttttaccccaagactgtatggtaactaatgtgtagttgggaatttagtgttactgaaccttaacacatacggtcttcctataatcaaattgttcagtgatatttttaagtgagataaatatttctagagaataattctaaaacagctgaaaatttatatggttgtaaatcagagaaataataaagcaggaaatatgtcagagtctttttgccttttaaatatgtatctgaaagcattgctaaatgtaggaggtgtatttatctttctgttttgttgttgttgtgtaggttttgtcaggtttttagaaggctattatattgtgttaataaccaaaaggaggaagatggcagatattggaggtcatgcaatatataagattgaagatacaaatatgatctatatacccaatgattctgtacggattagtcatcctgatgaagctaggtatgtactggtgtgaactgctgtttttgtatctatagaccaattgaaaagcaaaatatagtcaatagattataaatcttaaaatgtaaatactggctcagaatgctacagcttttgttcaagagctattgaagacccatggtaattgatttgggcaagaatcaataatggctgctaaagccattaagtgagaggttattgttgacctactgtacttcatgagtatctcaacatactgtactttgtgaatattttttattatttacaaagagaaaaaaatgacaaacatacttaaccaaatggtcaaacttggcatcaccagtaatgagacaaaactgacattatttgcctcttaatatgaagcagtgggaaggacaccaatagcctgcgtagttttcttactaaaattatttaaattgaatctaagcatgataaaaatatttaaattggataataaaataatcagacaaatccatatgtgggacttcctgtaagacagctggcccagacccttcaggaatgtcagtgtcgtgaaatacaggaagagccagagggttagattttagaataaccatgacaagtgcagcacttgaatttctgttggatcctggattgaaatatgtgcacagtgtgtacacacacaggcacagagctgtaaaggactttactggaatggttttatataaactatacactagggggtattggatcagtgttaaattttgggtgtatagtgacattgtggttatttaggagattgtccttgttcataatagatacataatattaagataaataatatttaggactgtcatcatgtctggttcttactgtaaatggtttagaaaaataaaatgtacttgtgtatttaaagagagaggatgtatgtatgtataaggagaaatatttaacagtgaattcaggtgaaggacatactgctattcattatactatttccccccaccccaatttttctatgcatttgaaagcttcaaaaagttgtttggggaaattattggaacctggggcgtatggggaaagactgttaataaataataaattgatagagaaaatgctagaattggtttgatattataaaggctcaaaatggaacaaagttagcatgtttataagtttttagggaaaatagcagcttaggttttaattacactttgtacgtttatagtgttgttctagaacatgaaccagaatttaaaggtgatgtggttttcttgcttaaaaccttgttagatagtggttttctgaaactttgtgacactatccttgatgtttggaagtggggtaaaaaacaattttgtttcggacaagagtaagagtttaccagataaagttgaattttgtcttatattaactgaaaacaattatatcttatgtagtttgagataaaattgacatataccactgtgtaagtttaatatgttcagcataatgatttgacttatatatattgtgaaatgatgaccacaatgtagttagcatccatcatctcataaagacacaataaaaagaagaacattttttttcctgtgatgagaacttttaggatctactctcttaactttcatatatattatagcagcagtaactgtagtcatcatattgttaactatagtaatcatttttttaaggtatctacgaatattccaaaatgtggacctatccagcaatttttactttaggtaagtttgagcttatttttactctgtcagtctcttaaatgtttatattatttcctacagggtaaaaagagaatcagagaacacagtagtactttgattattctttttttaaaaaaatagccaaatcttttcatctgaaacaatataaatacaagtattcttccttttaaaaatctaatttttgaaattttgaatggataaattaaatggtaattattcttactatgcaaaatcttttcattatgattttaaagaaatgcttttattttgtatttttttttaagtttcaagatatttatacttctgaatttttcaatattgtcatcatatctgaaacaggaaattttaaaattcctgcatcctttattcaaatgagaatggcaataataatttaaaattatacactgatcttttattttgtacagaagagcaaattagagattgaagaaattaaattacttactcctataggactggcaagaagcactctattaaaagtaattattgccagttctcaaatacacattttcatctagcacaccaaacagaaaatgtcacaaggtactaaatctagagattagcacataaacacacagttgttgaattaattaaaggcaaaactctaaaacattaacaaaacaaatattgaaaatcctgtccatttctgcaaattttttaaaatttttattggcatatagttgatctaccatattgtatgtgtttctgctgtacagcagcgcgagtcagctgtatggggggaggggatatatgtatctactcttttttttaaggttctttttccatataggccattacagagaattggtcacagatatagcaaacaaacttaagttgctaaggttaagtgaggagagaaataaattaggagattggaatggacatgcacacactattatatgtaaaatagacaactaataaggacttactgtatagcacagggatctctactcaatacactgtaatggcttattttgtaattttgaattacaaaaattaaatctgcattgtctatatagagggaggtgggagggggattcagggttgggggggacacatgtatacctgtggttggttcatgtcaatgaatggcaagaagcatcacaatattgtaaagtaattatcctccaattaaataacatttttaaaagtttatatatagagttgtaaccatttcacagttttcagttaacagtctagtaaaaattaggtaaaaataaactcaaaatagggagaacttttgcagtaccaacatattgttgttggcattgtaaattaataattttcctggagaggaatgaagcatcaagtatgtatgaaaatatatctgaagaaaataaatcaggagggaaaatattagtccctgtttgtaaaggcactagctgtacagatagcttctctatcacggcccaaacaagcaaaccaaccactgcagggacaacccaaatatggtgaattgaaaaataagcaagtgaattatagcagagcatcctgagagagcgttataccatcactgaagtgaccactatgtaggctaggtatacagcaagttattgggctacatggaaaattctgtcacttacaatgtccaaagtaaaatgtagaacacacaattgcatatatcaatggacttgggtcataggactaagaagaggacccagagtgttgtagctgttggcattatatactgttagggtgctttgcattattttaagtttatttttaaactcttaatatagttaaacatttatttatttatgaaataaagaaaagcatgtactatgtagagtggattatgtcttcatgatgtgaaactgaagaaagttaattaatttagcaatagtatagtgaagggcttctaaagaaataattttcacttccacaaatgtttactgaaagtgtatttccattgtagttgtctccatcatttgcttttcagccattattgctgaattgtttatagtctttctgaggtactactgaagctcagtggagctgagctgttaggggtgatctgcattctcatactgagttcttctcaagttattccacaagtaaaaaaatatgaggttaaagactttaaaaaaggttatattacattcttaaggttcagctaggataaatcagttgtcttaaataggaaaagttgattgttaaaagtaaaagcccagtttctcaccctgcccccagctttattgagatattaatggcatctataagtttaagtcatacaatgtcatggttagatacatggacgtagtacagaatgattaccgcagcgttggttaacaacttcatcccaaagcatagttgtgattttgtgtgtgtgtactgataacacttgatttactcccttaacacatttcaagcacataattcagtactgttaattacagttactgtgctatgcattagataaccagatcttatttatcttatggctaagagtttgtactctttgaccgatagttctccatttcccccagccactggcaactaccattttttaaatataccctacattttatttatctgttcctttgttaatttattaatctgttcatttgtggttgttgccacatctgggtattttgataaattctgtagtgagcatgggggtgcagatagctctttgagatggtgatcttttttcttttggatatataaccagaaatgggatttctggatcaaatggtagttctgtttttaatttttaaggaactgctattttattttccataatggctacaccaatttatgttcccaccagcagtgcaaagagttctattttctctacatccttgccaatcctgccgtttcttgttttaataatagccattctaataggtatgaagtgacatctcattgttgtcttgatttgcatttcccaatgtggtggtgagcatcttttcatgcattttttggctatttgtatgtcttctttggggaaatgtctattcaagtcgtttgcccattttaaaattggattatttgtttgtggttgagttgtatgagttccttatgtgttttggctgtcagcccattaacagttagatggtttgcaagtattttctcccattcagaaagttgcctttttattttgctcgctctttctctgtgcttttattttgatgtttcatttgtttgtttctgcttttgttgcttacacttttggtgtcatgtccaaaaataatatttgtgaagaccaatgtcaaggagcttttccctgtgttttcttttattagtttatagtttcaggtcttacatttaagtctttaatccactttgagtgaatttttgtcagtggtgtaagacaggggtccagtttcattcttctgcaggtgggttgtccagttttcctaacacgtttattgaagagactatcctttctccatttgtcttttggaaaacgggttgtcagtcactcagttgtgtccaattctttgagaccccatggactgtagcccgccaggctacactgttcatggaattctccaggcaagaatactggaataggtggccattcctttctccaggggatctttccaacccagggatcaaacccgggtctcctgcattgtactgcaggtggattctttactgtctgagccaccagggaagcccatccttcctccactcatcgctttggctccctggtcaaatattagttgactgtatctgagtggttttatttcagggctctcaattctgttccattgctgtaggtgtcttttttttttttaatcttggtaacatgctgttttgttgctataactttgtaatgaagtttgaaatcaggaagtttgatgcctccagctttgttcttctttcttaagggtgctttgactattaggagtcttctgtggttccatacaaattttagaattgtttttttctattcctgtggaaaatggaattttgatacagattgtattgaatctgtagatggctttgggtagtatggttacttacacagtgttaattcttctgtttcatgaacactgggtttctcttgtggctcagatagtaaagaatccatctggaatgcagaagatctcagttcgatccctgggttgggaagatcccctggagaagggaaaggctacccactctggtattctggcctggagaattccatggactatatagtccatggagtcacaaagagttggacacaactgagcaactcccactcactctgtgaacactggatatctttccatttatttgtgtcttattcatttattttattcatgtcttttaattttcagtatacagatcttttacctctttggttaagtttattcctaaggtttttttatgctcttgtatatgggattgagaaaccaacttcttaatacagtttttatctctctgagatcagatgctaataaaattaatggctctatcaaacaaatgtggtacatttaaatttaacagagtaaataaaaatcaatttcagattatattaataaactaaagaagaaataataatgtgtgagaatctctgaagttgtaaccattttaaagtatgacaataatattttcaaatttgtataacttaagaaattctagatactgtctgaaattctgtgctaaaaatatatagcttaagatacttataaaagttgctgattttgtgcaaattttatttgcacagactgttataatttttttaatgacgtgcttctcaaacatgtttcactctagtggcttgtgttatttgcttattcttattttattactaaataagttatggtgccaccattagtaattaataaaattattttcattcataggtaaactagagtacagaccttgtataatactattagagtagatattatagcatttttaatagtccattcagatacatataaaagtatgactttgttatacaagactatgaagttagattaatttcagtgtgaagcacaacgtgcatatgcaaatcagtgaatgtaggttactaacattttattgtgtttttctagttatgcaaatgcctaagtcatgtaatgatttttaaatttccaattatattcatgatttactatgtttaaggtgcttatttgaacaacattgcttctgttgttggtgctaactaattcagttcataattaggtgctaactaatttagttcataggttttaattccttctgggagccaagattatgaaatatgttttgcttttctaattcttattaagctttcccttctcagttacagctatgatttgtcccactcacttcaatataatctcacagtcttgcgaatgcccctggagatgttaaagtcagaaaccacccagactcgccaggagagtttcgacatctttgaagatgaaggattgattacacagggtggaaacggtaggtggttttcagtacatccaatatatgttaatatgacatctatgaaacggcatctcattaaattcactcacatttctttcacatttctcctttcctatttgctgtttgtcctttcatgaagttgcttcagatatatgaattcatataaacgaattcatttttatagagatcatggtggtgctttagtcgctaagttgcatctgactcttgcaactccatggattgtagcctgccaggctccactgtccatgggattctccaggcaaaaatacctgagtggcttgtcatttccttctccaggggatcttcaattcctgacctaggaattgaacccgggtctcctgcattgcagacagattgtttactgcctgagctacgagggaagtccagagatcatgtatcaccaaattgatttcatttgtgggcaagccagaaaattgtatctgatgtcttctagcaaaatttcatgcaccttttatggaatacattcaactttagtctttggctggagaattttctttttaaatattgaagaatacacaccaccacctatttttcttcatagagaccaattgtgtatgagttgaattgtagaaaaaagttaccctgggttgcctgttgcagcctagacatttatgtatcatatctctaatactcataaaaaactactcagtaggtgtaatgctgctttcaaataaataaaggctaagtaggaggccgagacctagaggtcaagatcacaaggccagtgtccagaggaacccttgtggaagatcagaggctgttctgactttgactggtctcagcctgacccaccagtccctcctacagcctgcttctgtcaggactgttgtggggttactgcaggacctgtgtgtgactagcctagggtgaccctggggatctgggactaaccagccacacagcagaatgggtacctttatccctagatttagggattggtctagcactctaaggccagagacattgccagagtgaatgttgtgaaggcattgcttcagatgtaaagtcaagacagtttagctgaattggccttactgtggaaacaaaaagtcagtagtgtctttgggtcccttcctcagtgccacttctgtcacagtgatgaagatgtgggtgcagaggtcgaaggtaagttccagaaggtttgtccttgcaggacactcaggaagaggctgtgctctgttagccttttgccagaagttctggtccactctaagaagactgagacttacttcaactgaatgccatctcagttaattgcctttgactcttgttcatttattagattgactatcacttgaactaaagcaaaaccctgtgcactctccctgccccaaaacgtctagatcacagaaatttgctgtggtccatctgaattgtaatctgtgcccctcgaggcaggtggagggtaagataatgtgtacttgaatatttgtcacatcattccttctaaatactgtgcttagtaatagaaaagctaaaagcattagtaagtatgcattgtgtgtcatctcccatttgaatctgaatatccgtactgagatctgaattaagattccaaaagctacctaactttttactatcagtcgagcagttctacttgatagatatgaataaactgtgtattaggtttttatgactgccgtaagaaatttccacaaactcagtgacttaaaactatacacatttattatcttacagaagtcaaagtccaaaagagatcttggtggactagagttagagtgttggtaaggctccatttctttcttgagaccctaaggaaaaagccatttccttgccctttccatcttcaaagccagcaatggctggcggaggagtgcccacatgacatcactctgacacactcactgctgttcccctctttcacacacaatgcccatgtggttacagtgggccctcttggacaattcagaagagtctgcccatcttaattagcaaccttaattccatctgcagctttaatttctgattagcaaccttaattccatctgcagctttaatttctcattgccatgtgacataacttactcatgggttctggtgattagaacgtagatattttttctatggggaagggacgctactactacacaggggcaaactgataggaaagagaaagcgagggcaaaagtggtctgcgtaggtagaaaaggaaaataatacattttttaaaaagtctctaatgtgtcaggcagcatgttagtcactttgcatatattatattttttaaaaatctgaattatatctcggaggtgagtggtatcatcattttacagtttagaaaattgaggttctgagatgttatgtaacttgccaaaggtcacagagctggtaagtgacaaagacaggactcctatccattattcatgctcaatgtaatgtcattgaaggggcagagaaggcttactttttataaataaaaccaaagggcatttgtcacagtggatataaacactcttaacatacatgttttgaggagaaaaatagtattgattgtctctaagcataactgttacaatcttttaacccattatctttttacttatttcttattttgtactttatataagttttgtaaaacttattgatatttagtaaattaatctggatatcctgaaatgatgcttgatgaaattaattttgtcatatcaaaaaagcttgatataataataactaccacttatggaattatgagtaagacacgagacttgttctgagcatttcatgtgcgttatcaacttgcctttacaacagtcacacggaaggggcacacatgagcaaatggggcactgaaataagtgacccgcttggccacacctgtcaccctgctggcgaggcagagctcagatgtggacccagcactgcgacaccagagccgtgctcccagtcactgctcctgctgtctgtcagcctcattcgtgtatttgtacgtgtgtgtccttattttcccagttgtttgcttttctctaggttaaaaactctcacagatcagaaaaatgtgttttttctttacctttgtacagaatcagcacagtgttctgagcaatgagatgagttatatccactgaaaacagcagtggtatttatcagacgttttgaaatcaaaaaacaaaagtttgagagcttaaaaatgaattgaatgtccaccaatttccttatcttcctgataccaactcttattttttcaggtgtatttgggatctctagtgagccttacatgaagtacgtgtggaacggtgaacttctagatataattaaaaatactgtccatcgtgactggctgctatacattattcatggattctgtgggcagtcaagtatccttttttaaaacattaagatacatattatttatgctataacagttcgtagaaagctgtatatgaattataagatcattacaattatctgtgcaccctgcagatagattacaatgacgcattctgggtggttgaaatacaaagagaaatgcagatatattatgtctgctgctgctgctgctgctaagtcgcttcagtcgtgtctgactctgtgcgaccccatagacggcagcccatcaggctcccctgtccagacaggtaaataacaagaaaatgctctgggcacagaaagtgctgtaggtagtaaatgtcattcttacctaagagcaggagcagaatcgctaacaggaggggaggatggggccaggctcataggaagagttttttttttttcataggaagagttgaacttggcttgacttgatcaagaagcaggccttggcagtgagactgtggattggggaagcaccgtgagtgtagagatggaaaagtttatgggagtgtacttgtggtttgtgtataaaatgcctgggaggtgcaatggggtgggaaggagatgagttagtggggagtcagactgccaatcaccagattactttggtggtcagatgaaggactttgggtttggtgctagaatttttgaaagtttttttcaagagggtaacatacaaattagtactgaggaagcttgggtgggtaaccattttcaaagtgtgttggtcactccattgtgtcccactatttgtgaccctgtggactgtagccctccaggctcctattctccaggcaagactggagaggattgccatttcctcctgcagcatatcttcccaacccagggatcaaacctgggtctcctgcgttgctggtagattctttaccatctgatccaccctagaccaagagacatgcattaggacaaggttgcagtggttcaggagtaatgtaatgaagatctggattgggaagagtcataatagattaaatagacatagattgagcttggtgttaagctggtaaatcaatcttataaatatcatttgtcgttttatttgatttctaggtatattggatgtgttcttatgaggcttcagaaggcaatgtttactttttagaagtggtgttaagttttttcctgccccttttagagatcctgaagaacatttgtgcacctagcatgctttctggttgacagtcttcctcgtgtcttaggtttgttaaaaacttagagggaacactttaaaggagaggtggttttgagaccactgagtggatggatgtgattaaccaataatgtgctttcttgtaccagaacattgacaggagtggagtcagggagtcaaagggtagagttggagaggttggccttggagaagacctgatttgcctcctttgtggcaaatgaaggtgaggagaggctagatgaagatgcagaggacttttggaatgaatttggtgagatttatgtgttacatgtaaaatggcttgttaccttatactcattttcaaccagtgagtggtattatctgcttgatcattcactgaataatgagatttgaccccgaattactatatatttttccaaaagtagaatcaacctggaaaaaccacagggtttccaccaccaaggactctaaagtgaaggtgctacagtttctaagggcagcttctaaaaagtaattctaaactgtcttttatttcttaagagctagctcaggcctggcatgtattaagtacaataaatggttgtttctttaaagtagtaaatagcaccatagattataattttaaagctcattagttggactgatgaatccagtcttccagttaacaagcatttaatgaattctggaatctatatgatggtaacagtcattgctgtttattgaacgtttgctataagccaggcacacattgcacacagtacctaacccagtcttcccaaccacctaataaaattggttactttttttttttttttttttgcacttacaccattttacagaagatgaaactgaggttcagaaagctaactgaggtgacaatattaattgaaactttattttggttaaacagttcccagtgttcagttttgcagttaggtgacaaatttgggtgctctcacggtattactactaactccattccctcagaattagctgttgcttcataatttaagcaccctgttaatggagaggtgctcagtttgataggtgtatggtctctgaagaacgaagagggattagttgtacctcttacattcttacctggctgcaaggagggaccacaggtcttcccttgaccaataaccctacatctggttaccatttcctctgaaattcatggaaaccactctttagtgaggttcagttttgccttaatacctgcatactttgaaagagcagttagacccagtgctgttgtgtttcttgggtggagctttttggtgttccttaacctactggacaaaatatatttaacgtagaatgattattttggttgggtgtgatggtcatgagtgctaaacagctttaactagatttcttagagctgttgatctatggacgacctgtgtatgtcactttaatagctagaagatccagtaagttcgctgggacccgttttctcaaaagaggtgcaaactgtgaggtaagattgctgctggcaatttaactttttatttcagctctggtgacagataaagcaaagtggagttttagaaggtggactgtcttagttcgggacattatcaagagaataatgaatcctctagagtctctgaaacttgtgaggaatatgactaacgtacaaatgttctgaaaaatcagctatcttagcattatgcaatgccttagggacttatgaaatgtctaatgttttggaggatgagccatttctgtaatagattttaaaatgcagtacatatttagtggagagactaaaatagcaaagcaccttcacccaaggaataaatggaggggagcgctctttggaaaagcatccttgatgagaaaactgagtaaagcaaggcctggaaaccctttactcacttccccctgctttagtttggcccaagacagactccttccgctcatccctagaaaaaaaccaacatattcatctactgttctgcctttggtcatgtagcatgcattgagtgtttcgtctctttctgcaacagacaactggagtcttacacagatgtgtgatcgagtagatagactgagcgagacattgggttttgatcctgccttaatatagcaacctttgttcttaaaatcatgtcaacaatgaacatagttataactgtcgctttaagaaaaaaagatgtacccatctgaatgcagagttccagagaatagcaaggagaaataagaaagccttcctcagcgatcattgcaaagaaataggggaaaacaatagaatgggaaaaactagagatctcttcaagaaaattagagataccaagggagcatttcatgcagagataggcacaataaaggacagaaatggtatggacctaacagaagcagaagatattaggaagaggtggcaagaatacacagaagaactatacaaaagaggtcttaatgacccagaaaaccacagtggtgtgatcactcagctagagccagacatcttagagtgtgaaatcaagtaggccttaagaagcattactatgaacaaaattagtgaaggtgatggaattcgagctgagctatttcaaatcttaaaagatgatgctgttaaagtgctgcactcaatatgccagcaaattaagtaaactcagtggtggccccaggactgaaaaagatcagttttcatcccagttgcaaagaacattcaaactgctgtacaattgcactcatttcacatgatagcaaagtaatgctcaaaatgctccaagcaaggcttcagcagtacatgaactaagaacttccagatgttcaagctggatttagaaaaggcagtgaaacagagatcaaattgccaacatcctttggatcatagaaaaagcaagagaattccaggaaaacatctacttaggcttcattgactatgctgaagcctttgattgtgtgaatcacaacaaactggaaaattgttaaagagatgggaataccagacctctttacctgcctcctatgaaacctgtattcaggtcaagaagcaacagttagaaccggatatggaacaacagactggttccaaactgggaaaggagtacatcaaagctgtatattgtcaccctgcttatttaacttatatgcagagtacatcatgcaaaatgccgggctggatgaagcacaagctgaaatcaagattgtgggagaaatatcaataaccacagatatgcagatgacaccatccttatggcagaaagcaaagaggaattaaagagtctcttgatgaaagtgaaagaggagagtgaaaaagcttgcttaaaactcaatagtcaaaacactaagatcatggcatctggtcccatcacttcatggcaaatagatggggaaacaatgaaaacagtgatagactttattttcttgggttccaaaatcattgcatatggtgactgtagccatgaaattaagagatgcttgctccttagaagaaaagctatgacaaatctagatagtgtgctaaaaagcagagacgttattttgccaagaaaagtccgtataatcaaagctatggtttttccagtagtcatgtatggatgtgatatttgggctattaagaaaagctgagcgccgaagaattgatgcttttgaactgtggtgttggagaagactcttgagagtcccctggactgcaaggagattaagccagtcaatcccaaaggaaatcagtcctgcatattcattggaagactaatgctgaggctgaaactctagtagtttggccacctgatgtgaagaagtgactcgttggaaaagaccctgatgctgggaaagattgaaggcaggagcagaaggggacaacagaggatgagatggttggatgacatcgccaactcaatggacatgagtttgtgcaagctccgggagctggtgatggacagggaagcctggtgagctgcagtccttggagtcacaaagagtctgatacgactgagcaactggacaagaacagagttttgcagctctgttatgtagttttggatatatcaagggtaattaaacaggcacgttattaatgcctctaaaattatcctttgttatatcctcgtatactttataagtaaagctgtgtcaaggtttttttttcttctgtccatcaggcattttatttgaatcttactttttgtcctttcattcctccttggtcttcagaattgaatttttatatttcactggtcttactaatctcctgtaatatcttgtaattgttttccttttctttccttctctgcactctattacctgtattattagctatttaatttgatttttccctcatctgttctctgctatttttaattgccttcctttattgcatcttaatgattttccttttttaatatgtgcatcaaatattgatcagcacttacctcttttaaaatatcctaagaataggaattggggtggggtgccatcgcctaagaataggaattatattttcattctgtacttgacattttttccatgaaaaaaattctgagaatataaaacacctgtaaatgcacctttctttccagggtgatgttgcaaatgaagtggaaactgaacaaatactctgcgatgcttctgtcatgtcttttactgcaggaagttattcttcttatgtacaagttagaggatcagttcccttatactggtcacaggacatttcaactatgatgcctaagccacctattacatgtgagtggaacagtcttttcaatagtaactctcctttacccacattagagagtaaattgctgcccacagaaatttcatacaagcatggagttttagtactgaaaagtagataatttagaatcaggactactgatattttttatgcaacaactttatatacatttatttttagttttggccactagaaaattatttatattttaaaatatgtaaatataattaattatattcagaaatgaaagaatcatttgaattcaataaatatatgaagaatgatacacttaagaggaatttgagacatgaaagtaccagaggatcaattgagttacatttctataaacattataaagtgaaacaagaccctgtgctgcttttattcttgctgtataattttcattctggtactgatttgttttttcttcccagtggatcaggcagatccatttgcccacgtggctgcccttcactttgaccagatgcttcagaggtttggctcgcccatcatcgtcttgaatttagtgaaggtatgacatgctctctgtttggttatgaaattcgatcacactggacaacatgaaggggcttaactagcctgctttaaaggaggagagggttgtgggttgatcgtgctgtgatgactcactgtgtctgaactgtttgaaccactgtcctttggcctcagagtccacgtgacctcttccctgggtaagttcagagactgtggtgggttttctaggaaagagagaaatgagcatgtctgtcttctaatttcctggggtgagctaggtatgggtgaaattctgcctcagtttccaggacatctgggagaaggaagcatggagatcaaacacccacaggctagccttgatagagtaacttaccttgacaatccagaagatccgctgggcaagataatatgtggtgataggatctaaggactagattcagaaattggggtgcagttgtggctcaggaatcggtggacagagtggtgacctggtctcataattctgtgcttccatgtcagagtacaccgtctggtcagcatgtcttgtgtatatgagcaggcagccaggtcagagcctggcgtggagggtaggagaccaggtaggaaattgtatctgtgtctgttgcagccagatgaaatggaggaatctcattctgtggctaggaaaaccctgagtgtgaaaagcgagtgttttgcttattatgtctatggcaggtggccaacaccttctagtatctgagattattccgacaagttggttataaatatttgttgttgttgttcagtcatgtctgactctttgtgactccatggactgcagcacaccaggcttcccagtctttcactatctcccatagtttgctcaaactcaggtctgttgagtcagtgatagcattcaatcatctctcctctgtcacccccttctctgtcttcagtctttcccagcatcagggtcttgtccaaaagtcagctcttcatatcaggtggccaaagtattggagcttcaggttcagtccttccaatgaatattcaggactgatttccttcaggattgactggcttgatctcctttctgtcctagggactctcaagagtcttcttcaacaccacagttcaaaagcatcaacttttcagcgctcagcattctttatggtccaattctcacatctatacatgattactggaaaaaccatagctttgagtattcagacctttgtcagcaaagtgatgtctctgctttttaatacactttctaggtttgtcataacttttcttccaaggaacaagcatcttttaattttatggctgatgtcactgtctgcagtgattttgaagcccccaaagattaagtctgtcactgtttccattttttccccatttatttgccaagaagcagtaaagcatctgtctacaatgtatgagacccgggttcgagccctgagttgggaaaatcccctggagaaggaaatggcaatccactccagtactattgcctggaaaatcccatggacagaggagcctggtaggctacagtctatggggtcgcaaagagtcggacatgactgagcgacttcactctctcactctctcaatggaaccagatgccatgatcttagtgtttagactgttgagttttaagtcagctttttcactttcgtctttcaccttcatcaagaggctctttagttcttctttactttctgccattagggtggtgtcttttgcatatctgaggttttgatatttctcctggccatcttgattacagcttgagcttcattcagcctggcattttgcatgatgtattttgcatagactttaaataagcaggatgacaatatacagcctttacgtactcctttcctagtttgaaattggttctaactgttgcttcttaacctacatacatgtttcttaggaggcaggcagggtgatgtggcattcccatctctttaatattttccacagtttgttgtgacccacacagtcaaaggctttggcatagtcaataaagcagagtagatatttttctggaattccttatttttcctgtgatcttcagatgttggcaatttgatctctggttcctgtgccttttctaaatccagcttttacatttgaaaggtctaggttcaggtactgttgaaacctagcttgaaggattttgagcattaccttactaacatgtaaaatgagtacaattgtgtggtagtttgaacattctttggcatttttcttctttgggtttggaatgaaaactgaccttttccagtcctgtgggtactgctggattttccaaatttgttggcatattgagtgcagcactttaacagcatcatcttttaggatttgaaataactcagctggaattccatcacctccactagctttgttcatagtaatgcctcctaaggcctgcttgactttgcactccgggatgtctggctctaggtgagtgatcacaccatcatggttttccgggtcattaataatttttttgtacagctcttctgtgtgttttatcatctcttcttaatatcttctgcttctgttttattcatggtttctgtcctttattgtgcccatctttgcataaaatgttcccttggtatctctaattttcttgagatactggtctttcctattctgttgttttcctttatttcattgttcacttaagactttcatatctctccttgctattcttggaaacgctgcattcagatgggtatatctttctttttctcctttgcctttcacttctcttctcttctcagctctttgtaaggcctcctcagacaaccattttgccttttttgcatttctttctcttggtgatggttttggtcaccacctcctatacaatcttatgtccatagttttgtccatagttctttaggcactctatcagatctaatcccttgaatctatttgtcacttctactgtaagtgatttgatttaagtcatccttgaatggcccagtggttttccctactttcttcaagtctgaatgttgcaataaggagctcatgatctgagtcctagtcagctcccagtcttgtttttgctgactaaatgacctggataactgagatcattaattataataagcataattcaatttaattagaaaccaaggaatcctatgccattgaagccactgtttaacagttttgaagatttctcttgtgccaaggcaatcataaaaacagtccctgccttctctgggctcacagtcttaacaggagacggtaaagtgaggcagaggtaccaagacagggttacgatgctgggagagcttatagcgggagagaagtcttcctgaagaagtgatgagtcagtgcaatgcctctgaacgaagaactctttacaagaccaagaggaaagagagcagcaggcacaaaggccctgggacaggagggcataaggtgcatttgaggaagaagaggcctctctgactgggtctcagagaattgcaaggaggagagcctgttgtgagaagagactggagaggtagttacgccagacttatagagccttgtagggtgtgttaatgagtcaggtcttatcctgactttccaaaaccatcaaaggttttgtagagttgagaagatggtgatcagatttctgttttgagaagattatcctgatctcagtggattggtacagactaaagtcgatgttggaagaccccataggctgttataattatccagaaaaggggtaactggccgcagctggggtggcatggcagaggtggggaggagtgcacacaggcagtagagccagtgatgagctgggtctgagatgagggagagggaggggtgagacttgactcccaggtccctggcccactcaggtgaatgggtggcgatgtcaggcactgagccagggaacacagactgtctgtgagggaaggcagtgagtgcggtttgaatgtgttgaggtttgagatggatggagtcctgtcaaaggagatggtaagtaggtggtcgctgtatgagatggaagctcaggagagaggtctgggctgagatgtgatatgatggcccatctgagtcctgtcgatatttgaagacatgggtgtggagaggatgcccaaccgagggtaccaagagagaagagtggcgagcctctggtcttgacttgagaacctccagctcctgatggccaggtagaacaggctgaatctgtaaaggcgtcagaggagggacaaatgggaaagtaggaggtaaaccaggtgaatgctgtgctctgacagctaagaggaggcatgtttcatggggaagaaagcaagcagttgaccgtggcaaaggctgctggcgggccaggtaagatgaaaacggaaaatattctcattcatgttcccagcaccagggcactgagtgacctggactgagctgcaggaggactttttcccgcagttcagttcagtcgctcagtcgtgtccaactctttgcgaccccatggactgcaacacgcaaggcttccctgtccatcaccaactcctggaccttactcaagctcatgtccatcgagtcggtgatgccatccaaccatctcatcctctgttgttaccttcgtctgccttcagtcttgcccattgtcagggtcctttccagtgagtcaggtctttgcatcagggggccaaagtattggagcttcagcctcagcatcagtccttccaatgaatattcgggactgatttcccttaggatggactggctggatcctcacctagtgagaaatgtggaagagttggtgttttcatctggttgttgtttcttgaagagatcatgatgggttttaaagtgtttgggaaggatctatttgagatccttaaggaggggagagaatataggaaaaagaagggatggtcaggggcatcatgtatttgagaggaaaggaatctgaaacctggagggaggacttattttaatgggaggacagaatcataagggtatgtgtgtgtgtgtgtgtcagaggaggaaggtgatgaggaggggagccgtggacagtgaggcaggaagctttagtgcatgaattcaaaggtgtgtgtgtgtgtgtgtgtgagtcagaggaggaaggtggtgaggaagggagccgtggacagtgaggcaggaagctttagtgcatgaattcaaaggagcagggggtgtgtgtgtgttagaggaggaaggtggtgaggaagggagccgtggacagtgaggcaggaagctttagtgcatgaattcaaaggtgtgtgtgtgtgtgtgtgagtcagaggaggaaggtggtgaggaagggagccgtggacagtgaggcaggaagctttagtgcatgaattcaaaggagcagggtgtgtgtgtgttagaggaggaaggtggtgaggaggggagccgtggacagtgaggcaggaagctttagttcttcctttgtcactctttggcttaggaaattattggtctccctcaattagatgatgactgccaacacccaaaactcctgtaatattatatataatataataataatcagggattgactttgtaaaataaatcaagtattaaatacatcactttttagacttttgttcacatcagttcagaaatttcatctctcttgctgtcaactcagagtaatataagacaatagctggatgacccataacgtcagcctgatatcacacggtagctataagaaacaagaaaattcaagaagcaaaactctactaacaagaaccttcatgaacaattttctaataaatgtataggcaataagatattgtttgtatagaaataaattattgctgaagtactaaattaaaaagttatcactagaatataaatgtccatctaagttagtgaattttcttcatatattacagagtccttgtagtatagttaaaagctatggttaaatggagattcatgatgtatgaaataaactatttctctattaagtatgcaggttcaaaatataatatcagatacatgtggttataaagtgttcctgcccagatttctcaagtgaacatttacttcttaatatttaaatgccagtcaacagattttaaaattattgttgttcattatttcattgtcataaaaatcctgacaataatgagaaaatactttggagattaagttgctgttttgtagaatagaaaaaatgtttgattgtttttgtcatcagttactttattcataggatagaagaagatatgtattcagttcacttggaagaagtccatattaactagtcaaagtgtgtctgtgtgtgtgtgtagatatcaagggatagtcactccttgttctgcctctgtatgaagggtcgaaaatgcaatacctttccttgattttcctctttggccctgtgtgtggactgtctcctccctaccccttcccctccgtgtgtaagtctgagacactgcttgacaaaaatttcgcagcaatccttacactgtcagggctgctgctcagggttaataggaagccagccaagggcctgatgtcattatccatcagaggactttaatctgggggccttggatggctactgggaggatctctgaaccctttgaaatgatgtacaaagtcacttgcatatgtaaagctttcatctggttgttaaatgagtctgtgacccaaaggcagtcgactaaacaattcagtaacgaatccactatgggcagactgcataaagcatgctctttgcatagagatgatcccaagttgatgaaataaccttacttgtgcatctccttaaatgtcagatttgacataagaaattcacaaaccttttgtttctctagttggtttaaaatacttttgagaaaaattccaagtatgtaatttaattttgtcagatgtaaaaataagctaatgtttgttcattgaaaactgatttatcactggtcttaatcaacttgaattcctccatttgacatatacagttatgcaaaatagatatgttttctttcatttccttggtgattatctaattaaattcatgacagttgaaaagtaaccagcatggttgaaaacagcatagacctatcctgatgccagtaatagtccgtattgctgagttactttttatttgcatgtttgtttctgagttaagtcctgatcagaataataatacaaatggtctgttttgtattaatatttaccatgcgtcagatgctctgataagaaattacgatgtttcatctcctttaaacctcacattaatcctttaagggaggtgctgctgttacccatcttatagatgaggaattcaggaggcagagaatgagctccaagctcacagctgagtaataacacaccagccctgctgtgaatgggagaacgtgtctccccttgaatgggagacagtgtggtctctccggagctacagccggcgggagaggaggtggaccgctaagatgtagtcccattcgcgcctctcagcctcagtgcattcagccacagtgtaaaaggggaaggcaaggctgccttggctacctccaggggatcttatgagagtcatgtttaaaagcatatgaaggctatgaaaacgttctccgctctgccagtttggggattatccatccaagcccggttgatttctgtctggtccttagctggctggggcttgggggccctctcttctggtctttggggattctcctttgccacagtggggtgtggagggtgtaggacaggcctgtgtagggtgagctggacttgctgggactgcaggaggttacgaggaagaaatctggtctccttgagtatttagtgctcattatctgttgatcgtaattcagtggcatatttatttcttagcatttattttaattttaataaggtaggtttctttttttcatatttagcacttcatctttttgttttgccttagtggcaaagttacatttaaagtctgttcctccaatttaaggcagtttgaacactgacgatgtttaatttttggaaaaggaaagagaaaaaaggaagcatgaaagaattctgagcgaagagcttgtagctgctgtgacctacctcaaccagtttttgcctcccgagcacacgattatttatattccgtgggacatggccaagtacaccaaaaggtaagcagatgtcttgtctggttaggtttccctcttcttgtgatgtagaatagcaggaagcgacctcccccgtaaagtgactcttattttcctttgtggagctgcttgaggggctgtttaactgctggtgtataattagagggcttaaattaattgatcaaactctctctgcccaccatttttgccatttgcaaattctctttgaagcatcccagtgacttcagaacacctctcctcagctgcttttcctcaaaggtgttagtttcaccttttctttctatttcattctatctccctgtttaattcctttctcagatgccactttcagacgttctcactcgtgggtgaaccagcactaactcctgaccgtttatagtaaatccagaccccttggtgtaatgtgaaagccccaacatctggttggttccagaatataataactccttctttattcccagtgctattctgctcctgcaaaagctaactggcaggttatgtctccagtgtagcagccgaagtccaattctggaccctttgctcctatgtttcctctccctccagtcctcctccctacctcccagggtgctttcccacctctctcactgtcaagttcccattccaagattccaaactcgtctcttccaaggagctctcattaaccttgcattgtcctttgactcatttgctgggcgtcctacaaacactaggttcacatcaaggtctctctttctcgttttcttaatgtcactgtattgttttgcacttgactcattatacttttctctgaatcattttacatagttagatacatgcacgtgcacacacacacacgcacacacacactctctctctctctctctcccccccccgcccccagagtataagccttgttactggttggtgccgttcatagtaatttatttcccagtgttttcttcccaaacagccgcactgagcattgtgctctctgcacattttatcactgcgtgttgacttcactgactccactcttggggagtgaaagtctttggaaaaagctcttgctggaagatgccatgtgccaagtttaaggcttgccaacagttgctattgagttacaggcccttcttgtgccaaatcttgctagttattgagtacaccttgcattctagaaattaattcttacaatgtccctattgagtacagaccagaggtttaaaaaattacattcccaagtatcattactgtagccttggctttgcgtataaacgtaggtgcatgttaagagtcgggcccttctcacttctcttactcttcctccttgctctcagcaagctgtgtaatgttctagatcgcctgaacgtgatcgcagaaagtgtggtgaagaaaacaggcttctttgtaaaccgccccgattcttactgtagcattctgcggccagatgaaaagtacgtatggtgttttaaaacctaaaagatatctagacgttagctcttatagacaaaaaatattctagacatgagcagtttgtactccttggaagatagatgactttattcctttgaggagacgacaccctgcccatgtgtctgtggaatgaatgttcatgagggtgggagattctcctggcagctacataccttgagatggaagccacagaatctcttgcttgttagaataaatgttatataaggtatttctgtaaaataaaactttctgtaatgaattctgtgtttcagtaataaataggagcaggaaaacttttcttatgcacccgtctatggattagtatttatactaacattttaatgaaatttgtcactgtattagttatttgctcacagatctttcttcattggggcttccttggtggctgaaacagtaaagaatctgcttgcaggagacccgggtttgatccctgggtcaggaagatcccctggagaaggaaatggcaatccactccagtattcttgcctggaaaatctcgtggatagaggagcctggtgggctacagtccatggggtcccaaagagtcagaccaatctatactaagattttaacgaaatttatcactgtattatagtcatttgctgacaagtctttcttcattactactttgtgagcttcttcagatcaagcatctgtgcttaatttatctttaaagaaccaatattatgtatttccaggtttttattttcagttaacaaagttaactataatgataaagaaaaagcatgcaaaaagcaaaaaagaaaacacctaaccaattattaatgtacatctttgcaagtaatccttctgttatagtttgaatttcagggcacctgtgaccagggtccccaggactcctcccaggctcggtgatttcctaagagaactcaggggtcgcagtgtattgttgtcctcttggctgtgatttattatgaacaagcaaaacaaggcaaaattagccaagagagaaagcacatgggacaaagtccagaggaaatgaggtactcgcttgcagagtcctctcctgctagagtcacacggagcatgttcaatttccccagcaacttgtgacagccagtgtgaagtgttgccaaccaggggagacgaatgaagacttggtgccagggtttttactggaagtggtcccgcaggcagctccgcctggcagctaccaaaatttcaggctcccagaaggaaaggctgttcagcaaaccacattgcttctacaaacagcttaggcaccatgagccatgcttgtctgttctggaaatagtggaaattaaagttcccagcgccagccaaggggcagccttgtaagctggccttcctgaggatagcagtcaggcctgctgtgttaactctttttctgcactgcgccttcttttaaataattaaaagattaatgtcattacatagtacttagaatatttccccatgccttcattggtgaaggcatggagaaaacatgtgggaaggaaaataataaagaagtttgtagaaacaacgaaaggactgtagcaaagctccatgaaggaaagctgaaggaagtagaacttcccaaagtcgaagggagaaggagcaggcctggtagattgtattataaagttgacctgcaattattattcatgtctatagaaaccaaacaggaaatgggcttaaattaaagcaagagactttggatgaatgtgggtgacaaaatgctagtgtgcggggctggagcaggttaagatgctcctttcctggcctccctttgagggaagcatgggtagcattccatctctgttatttgcaaattcacttacccgagaaagtaaactgaatcaacggattattcgggggtgttcagcccaattactttgattcttaataaagagctggtaccaaatatgaatatagattatgttattaaatattttaaaattaaagcatgtatttttaaacacaggtggaatgaactaggaggatacgtgattcccactggtcgcctgcaggtatagatgacattgtgttaatagtgaacaaaatctgtatccactgtgtgtgatgttttctgaaagcaaccatggagagagatacttcttattgaatgcaacgttattaatcatttgagaacaagttttaatgccttgcagctagtgtttaacacttggaaaggatgtgtggctgaaacagtaatggcccatagatttttggggggacttcccagatagctcagttggtaaagagtctgctgcagtgcaggagaccctggttcaattcctgagttgagaagacccactggagaagagataggctacccactccagtattcttggacttcccttgtggctcagctagtaaagaatccacctgcaatgtgggagacctgggttcgatccctgggttgggaagatcccgtggagaaggaaaaggctacccactccagtattctggcctggagaattccatggactgtatagtccatggggtcacaaagaggcagacacaactgagcaactttcactttcatagattttttttcatataatatcaaattattggaaatagaaacataagcagaaatgtgtaaagaataaattagaaggactttggaaaatgagcgagataatcactatatatattaattatgctttaagaatgaaatggcctcagccactaaatattttggtttgtacagtaaaggagatagaccagcaggaaaagcacatatttaactaattggtacatgtggaaaatgttagctatttgttttatcttgttaaactaaagaaaaattcaaatatagactagaaggtataatgatgctattggagcaatattgtgaatagcaaatataaccttctataatgaaaaaaatgcttcattatttgttcaggaataacaccctacttgtagcttgtcttcttaaagaaatcttgagtaggatggaagtagttctggtgactgaataatgattgaccggtgtttctcttagactggtgttcttcgaaccaactgtgtggactgtttggatcgcaccaacacagcacagtttatggtggggaagtgtgctctggcttatcagctgtactccttgggcttaattgacaaaccgaatctacaatttgatacagatgcagttaggtaagccttatttgtttgcctttcaagtgctggtaatgacagaaagcaaacttgcttaatcataaaggacttttatgaacttatttccccttttggcttctcaaaaattatgttgttcaaagatgttatttaaatttggtaacatctatttctattaaagccttatgtgttgttgccgtggttttgttttcctattcatgttaattatcaaaaaaacactgtgtactttagataaatccaaactagtgagtttctttaaaaaaaaaaaactcaggctgtgttaggaaaaaaagtaatatgccttcatatattttgaattaaacaggtaagatagataaaagattggttcttcagtaagaaatactgttatttcactgtccattgggtccgtgacagtgcatgaagtttcttgaaatgcagtggtcactgttatcagtcctctgagatagtcataaaggctctgtccaaaagagtgctcagcttacaaatggccagatctcagccatcactgcattaaaaaaccttaagaggcacttgaagaaacgtaagtttcaaacatgtatttctaggaaagaatatgatttgatgtgataagagcttgtcctttattccaaaggcaattcagagagaacagaaaattctgtcatgggaggtaaattgagctggcaggctgcagaaagttaggagtctttttaagagagtagaaccaccttggcttgggtagattatgctttttggtctccctgctttttttttcccccttagagttttctgtgattttgttgcttattggaccattactataaaatgtaatacattttgcatatgtatttatcttccaagatgttgaagagtctacttgaaaagaaaggctcagaggaattcatgtaggaaaagacttgttttgaatctgtagctaagtgaataaggtatataaatacttcggatgaaattctttagtgtttgtgtgttttacttgggcttcttaggttgtttgaggaactctatgaagaccatggggataccctgtcccttcagtatggtggttcccaacttgttcatcgtgtaaaaacctacagaaagatagcaccgtggacccaacactcaaaagacatcatgcagactctatctcgatattacagcaatgctttttcaggtaattctggagttatatgcatttttgagacttatcctgatgcacatttttctcttttacatatccctgtttttaaagctaattggaaaagtaatgtcaaagttaaatattttaaaagtttaaataaaacagaatctgtcacttaggaggtaaatatgcagtaaataaatgaataaactttgtattttaagtagggcactttggccacctgtaactggagcttttgtatacttcacagtactgtgattccttggcttctgcctcattcctagtttctgcttgtaatgaaagtgaaagtgaaagtcacttagtcatgtctgattctttgtgaccccatggactatacagcccatggaagtctctccagaatactggagtgggtagcctttgccttctccaggggatcttcccaacccagggatcgaacccaggtctcctgcattgcaggcggattctttaccagctgagccagcagggaagccctggtaatacatagatcaatttaagagtgttgaataactatttttaaatagagttcaccattttaacagttgtctaacaatgtgaatatcactgattcttttaaatgtcagctagaaatgagaagtaacattagcactaagttttagtcttttgtcattttatgacttgggagtactaacagcaacaggtagttaaaagggcactttttctgcctccattctgatgtcactcaccaaagtgattgtgagacaggtcccgtcacagaattttttttttaaatgtatttatttattttttattttactttacaattctgtattggttttgccatacattgacatgaatccaccacgggggtacatgcgttcccaaacatgaacccccctcccacccccctccccacaacatctctctgggtcatccccgccgtcacagattttttaaaggaagagctcaggttgattttgtgagtcttggacccttaaactagattaaagacaaaaacatttacaaaatgtagagaagagaggtcagcaaggagattctttgaatttttgctgcgcagtgactgtcccccagccctgctcctttacctccagcctggagagaactggactcagggcaggcttaacgtagtgttctctcgttggagggaccccgtggagctgttggcttcgggctgctgtgtagggaagctgaagcagagggacgggctgaggagtgggctgccatgttgggaatggccccctctcctagagttggttaggccaaaggatcattaggcctaccaggtgaccagagggaggccccgtgggggagggtgctgggatggcattggcctaggtcctggccagaaggaccatatcagtgggaaccaggaggtgattgatcactggcttcccaaggagggagtagcaggaaaatgcctgatgtgagaagcctgtgctcacgccaagggaactgcaggtgtctccagcgctgggaacctcaggagagtacatgaaaccatccacaaaagagtcagccttcagtcttttccatgcccagagaggatgcagaggtggtttgctatacttctgtccaggcatattcatttcctgtgctatctaacaaattactgaaaaattgagagcttaaagcaacatatattcattatctcacgatttctgtgggtcagaattccagacccagtttagccaggtcctctgcagagggtctcaccaagctgtagtggagatgtcagtcagactgtggtctcatctggaggcctgattcggggaggacctgcttccctgctcatgtgctgtgttgggggaattcagttctttgtggacttgttccttgtcgggatcatggcagcttgcgtcttcatcactggcatgggaaagggtctctagaataagtcttctggcaagacagtcttacataacataatgtaatcgtggggtgacatgccatcactttgccatataccattgctcagaagcaaattgtggtcccacccatacacgagcagaatctgtgacagtttcctaaggctgctgcaacaaaatactacgaactaggtgatgtaaaacaacagaaacttatctcacagttcagaggtagaagtccagtgtcaagttgtcagcagagccaagttcactgggaagtccacagaggagaatgcgtctccccagctgtgaggttttgccagcagtcctcggcgatccttggcttgcagctgtcttgcttccatggtcgcatggtcttcttcctctgtgggtctaggtctgtgtcaagttcccctcttcctgtaaggacaccagtcctactggattagcgtgcatgcagactcagtcacttcagttgtgtccgactctttgcgacatggggtgtagcccgccagcctcctctgtccatgggattttccaggtaaggatactggggtgggttgccatttccttctccaggggatgcctgacccgggggtcaaacctgggtctctcacgtctcctgcgttggcaggcccattctttaccactagtgccacctgcaaagccctgattggattggggtctaccctaattcagtatggcattatctaacttgattcaggcttcccaggtggcctaatggtgaagaatccgcctacgaatgccggaaacgcaggagacctgggtttgaatcctgggtcagaaagatcctttggaggaggaaatagcaacccattccagtatttttgcttggaaaatcccatggacagaggagcctggtgggctacagtccatggggtcacaaagaatcgaatgcaactgagcacatataacttgattatgtctgaaaagaccctaatttcaaataagattacattagtggatattggggtttagggcttcagtatatctttttagagagaaacagttcactacacaacacaggatatctatcacactaaagcatgaacagcaggaagtgaggagcatggcggtcactttggagtcgagatcaagtaagaccatccctgtttccacgctgcagaggggttggaagctcgttggcagcctggtgggtgtggggggatgtgcgggacagacctagaggttctgtgtggtctggccccgcctaccttgccattctgccattctgccattcatgccatccccttcccccatcacagctctccagacacacagaccttctcactctttcctgactgggttaggcttcctctgccagaggctcttgctgtgccccttggaacactggaacataagactgcagtcttctgagcctttcggctcactctgctttcaccttctcaaggaaggtactccagtttttgttcttgtagcattctgcacctttgcagcacctggcacagttgcacttaaatccttaactgtgctattagttgggttgtgtgtccctgtatcccccactgtgagacccaagagctcatgagcatcttatttactgctggttcactatggtgtccctgctgccttgctcatggcatatgaactgtttatggactgaattaataaatgcatgagttaattcattacctatgccctccccagcttccccttttccctgaattcagaaatcaacagggctaagtatatcagcctaataacgtgtagcttatcagtaatgctcttagactgctcaaatcatgtctttcgaattcactgagaattatggctgttatacagctggtaagctcaatgcgtaacaaaaaccacaaagccactatagacctttagagtgtttggatattactctgtatgcatgactccttgagctggatttaggaactttacaatcaaagttattaatctgaacaaaaatcaagaattaggaaagtcaaatttagaaattcaggtcagtggtgtaagtttaaattctagatttctaaagcaaaaatattgaagtactcccatcatcctttattacacttactgctgtcgttcccaataaagatattaatatgtattgatgtattccaagtggctacaacattattgcaagtgattattataaatagctaaaaacactaaaaataacgtggtttcacttggttttgtaaattagaatggttttaaggtagtctctctaaaggcagtctcattggctatgcttcattattgtactggtttcctaggacttctgtaacaaagcactacaagcttggtggcttaaaacaacagaaatgtgctgtttcacagctttggaggctttaagttggaaatcaagtgtcagcagggctgtgctccctctgaaggctccgggggaggttccttacttgcttcttatcttctgatggattgctgccgatccttggcttgcaattgaaactgtgtgctttcatttctggctctggtgtcacacgccattctcctctcgtgctgtgtctccgtggcgttctccctgtgtgcttgtgtctcttcttatgaagacaccggggcctgccccattccagtgtggctgtatcttaacaggattacatctgcaaagacttaatttgcaaatagggtcatattcacaggtcctggggcttaagacttttaatatcccttttgtggggaacacaattcagcttgaagagctatgtaatcatgtgccaacaagtacattacctctgggtatgtgttgaacaaggtttaaaattgccctgaggaaagggtcgtccagtcttctgtcctctcctgttcagggttgttcctgaattgggagtcattatgatccaaccagtgcattctaaaggagatcagtcctgggtgttcattggaaggactgatgctaaagctgaaactccaatactttggccacgaagagttgactctttggaaaagactgatgctgggagggattgggggcagaaggagaaggggacgacagaggatgagatggctggatggcatcactgactcaatggatgtgagtttgaataaactccgggagttggtgatggacagagaggcctggcgtgctgtgattcatggggtcgcaaagagtcggacacgactgagtgactgaactgaactgattgacacttaaggaccaagtcatgtgtttttcagtaagattagagcacaaagagtgaatgtgtggctgtgtgcgattaaaaatgaaaggagaacaattaaaagacagaaggtggtcataaataagtaacgtgcacacgatggaaaggtaaagcaaaattgtgcacaactgaaaggaactatcatgaagagaattaatttatgaataatatggctaaaaccgccttatttattttgagaagcatggtgccattggggtgtacaacttatttttaaattacaatggatattatataatggtaatatattaatagaaccattttctttaggcactcaagattgtgaatcagtctctccatcttatgtctctgaggtagacaggaaggttcttgaaattaggttgttaagaattttatccttggttcatatagacagatgaatactatgtgggtaacccacctgactccctttcaggttcattttaaaaacttttttgttttcatgtattatttcatgtattattattttctttctaagaaacatcctttggttctcttataactggctacataagcagttgtaggacatcaataagaaaagaacaagtacctaggtattctctttggatgttagaaagaagtttataattgttaattccttgtcaagctctaattttcttttatatttgtatgtaggtaaacctgaatatttttttctgaagcttattgaattgaaatcctattttaaggaaaaaaatataagatacctgcacagttaataatagaacagctgtatatacataatatacacacgtatatatacatatatatgtgtgtgtgtttagttgctcagtcatgtccatctctgtgaccccatagactgtagcccaccaggctcctctgtccatgagatttcccaggcaagaatactggaatgggttgccatttccttctcccgggggtcttcccgacccaggcactgaacccctgttcatatgctcactgccgtgtgcggtcagtttctcccctctgcagcctcatttccacgagcatagaggcacaccttgtgttttccatctaatctttccttctattcttaaccacacccactgctaacaaaagctctgctctcctgaagcaaaacctcttggaagcgttatctgcacaccggttccctctctcatatcctgttctctccacctgcttcactgagcctttgccctgtcatgcccctaaacccgtgcttatcacaatcactcacaatcacccacaatctcccactgctaagccaggggctcctcttctgtgctcatcttgctcagctgtttggcagcttgtatcacagtggagcactccctctttcttgaaactcacttctgtgctgtctctctcagtctcactggtgacttctcctgccctatttctaaactgtcctctttctacacttttacctaaggggtatctcacccagattttaaatactatacgtttgacactcaaatatatatctcttccccgactcctccactgaactccagacttgtctaaatgcctaccttgcaggcgtttcctcctgaatattgtgttagttttctacaggtgccataaccaattatcacaaactcagtggcttaaaacaacacctgtttattatgtcccagtgtttgtggttcagaagtctgggaatagcattacccagctgtgttctctgcttaggctctcacctggctgaagttcaaatgagagcaatgaagtcagagtgtgggctctgatctggaggcctccaggctcattcaggttgctggcagaaccccaggtggttctcggactgctgtcctcacgtgctgttggctggggccaattctcgggtttgagaggctgcttaccttccttggcttgtggtccactccatcttcaaagccagcaatggtgcatcaacccttgtgcctcaaaactgtctgctttcctcttctgcccttaaaggattcttatgattccagtggccgatccaggtaagacacgataattcttaatcattgattagtcatttcagttacatctacaaagttgcttttgccatttaagatgaaatattcatgagaaactatggagggaaggtcatgaggccaagtttcttcctaccacggatatctgagaagaatctcaaactaatcgtttccagattttgttctctactttttttcttttttcacctctgctcccattgtttagttcagaatcctaggaatcatccttaatttctttattctccttatcctccctggtctcatctctcagcaaacctggttggctccacctccagagtatatcccaaatccttctgctgtgtttcctcctcactgttgccgggctggttgagacagctggtggctctgaacagctgccgtggctcctgattcctccctcggcctcccctcttctgttctcgctcttcacgacagccacagggatcctttcgagagttatatcactcccgactctgaaatcccttccagggcttctcatcgcatttaaggtcagactctttgccatgaccttcgaggctgtgtgtggtctgcctcactgtccccagtcctgctctgtctttgccccctgccctccagcccgccgctcccccctccaccttcgtgctgttcctgacattgtgcagcctccacctgcttccctgaccacccgacctgtgtccctcttctctctcatcactctcatgtcactcttattttttcaaagaactaacatcctctgaaagtaccctgtaccttatttacttgagtattatttttgcttcccactgtggaatgtaagtcccataaaagccagaatcagttatgtatagaccatatccctagtgtgggacatagtaggctcttggatgaatgaatggtggtttcttttttttttttgtagttatgaaggtaatatatgctaattataaaaagtataaaataactcacaaataaatcatataatcctcacctttcagaaagcaagttgttcatatttagcagaacatgatccttctagttactgtacaggtaatgtatatctgcttttgccttttagataatgtgagtaatcattatgaccctaaatattcttttacaacttaatttttggtagccttgtggcagtctgttctttagaagcaccatagtgaggttacctgtttttattgtgcatttatgtttcttttaaacgaacatattttttgcatgttttttatcttatgaaaatttcagaagcatatttattaggtcagagtatagatattttcaggatctttaaaaacatatatgtatatatatagccagatagccttaacgaaaggatgtagcaatcggttctcagaggagtataggtgtgcccattctggaaagtatttgccagctttccaaactccttattgctaaattcagactcaaattgaagaaactagggaaaaccactagaccattcaggtatgacctaaatcaaatccgttatgattatacagtggaagtgagaaatacatttaagggcctagatctgatagatagattgcctgatgaactatggaatgaggttcctgacattgtacaggagacagggatcaagaccatccccatggaaaagaaatgcaaaaaagcaaaatggctgtctggggaggccttacaaatagctgtgaaaagaagagaggtgaaaagcaaaggagaaaaggaaagatataagcatctgaatgcagagttccagagaatagcaagaagagataagaaagccttcttcagcgatcaatgcaaagaaatagagaaaaacagcagaatgggaaagactagagatctcttcaagaaaattagacaccaagggaacatttcatgcaaagatgggcttgataaaggacagaaatggtatggacctaacagaagcagaagatattaagaagaggtggcaagaatacacagaagaactgtacaaaaaagatcttcacgacccagataatcatgatggtgtcatcactagagccagacatcctggaatgtgaagtcaagtgggccttagaaagcatcactacgaacaaagctagtggaggtgatggaattccagttgagctgtttcaaatcctgaaagatgatgctgtgaaagtgctgcactcaatatgccaacaaatttggaaaacacagcagtggccacaggactggaaaaggtgttttcattccaatcccaaagaaaggcaatgccaaagaatgctcaaactgctgcacaattgcactcatctcacatgctagtaaagtaatgctcaaaattctccaagccagccttcaagcaatacatgaatcgtgaacttccagatgttcgagctggttttagaaaaggcagaggaaccagagatcaaattgccaacatccgctggatcatggaaaaagcaagagagttccaaaaaaacatctgtttctgctttattgactatgccaaagcctttgactgtgtggatcacaataaactgtggaaaattctgagagagatgggaataccagaccacctgacctgcctcttgagaaatccgtatgcaggtcaggaagcaacagttagaactggacatggaacaacagactggttccaaacaggaaaaggagtgcatcaaggctgtatattgtcaccctgcttatttaacttctatgcagagtacatcatgagaaacactggacgggaagaaacacaagctgatacaagattgccgggagaaatatcaatcacctcagatatgcagatgacaccacccttatggcagaaagtgaagaggaactaaaaagcctcttgatgaaagtggaagtggagagtgaaaaagttggcttaaagctcaacattcagaaaacaaagatgatggcatctggtcccatcacttcatgggaaatagatggggaaacagtggaaacagtgtcagactttattttcgggggctccaaaatcactgcagatggtgattgcagccatgaaatgaaaagacacttactccttggaagaaaagttatgaccaacctagatagcatattcaaaagcagagacatttccttgctgactaaggtctgtctagtcaaggctgtggtttttcctgtggtcatgtatggatgtgagagttagactgtgaagaaggctgagcgccgaagaattgatgcttttgaactgtggtgttggagaagacacttgagagtcccttggactgcaaggagatccaaccagtccattctgaaggagatcagccctgggatttctttggaaggaatgatgctaaagctgaaactccagtactttggccatctcatgtgaagagttgactcattggaaaagaccctgatgctgggaggggtgggggcaggaggagaaggggacgacccaggatgagatggctggatggcatcactgacttgatggacgtgagcctgagtgaactccgggagttggtgatggacagggaggcctggcgtgctgcgattcatggggtcgcaaagagtcagacacgactgagcgactgaaccaaactgaactgaactgaactcccagcttaataagcagaaaacggtttgcattgttttcagtttgcgtcgtttatcgaataatagtaaagttgagtttttataatgtttaccgtctatttgtttcctttaaaataaataaatttatatttttaaaaattgcatgtttttctgttagggtgttgatctttgtccttctgacatttagttgggatttatttcaacatacagtaggaggtagtagtccaagtcactgtctgctcctcaccctggttaaatagtactgtttatcaaatagcatcccattccattactgatttcagaggccactttatcgtggacttaatttaatattaggtcaacaaatgttctagtttgcaaataaacatttttggctaattaaaagaactgttatcttcaagcctgacctattgtaataccctgcattagcgattaaccatttggatggagtttgaaaggtgcctattcctttttcctttaaagcacacttgaatataaaagtaggtagttattttgccctcttgttatctgcaactgcagagaacctacctattttaagcttttgtcttggtccaaagtactgctgtcttccagagggcgaaaacctcatctgcagtcaaaagtaaccaggaaaagattccgaggctcattagggctggccttagattccaagcttagtaggtgacagtaaataccatagatacattgtaagctaaagtaacagcagtacattcaagaagtctccattatgatcctttgaaggcatatctgttatttggttaggtttctcaatcttacattttatcatgcttggctaaaaattaaaggacttactattaggtttaattagggataaaagaaactccttgaaaacgtggctgaaaaatggaaagcttcattagatagaattaagatattttgaggtactgcatagtgtgaattattaagtgccattaaggctactgaagaatcataaagaatataattactataaaagcagtatgtttactttcatattgtgttaagagggtgcaaattggagtggtaatgtatgcatcatttaatacttgatgttttctctcaacaaatagaaaaaaggctccaagtatactcatcatataaacacatccctttcaaatattacttgtagcataaaaggtgagcactgttttaatggaatgcttcctgtcaaaatatataactagaacccatgtttaatgtaccagatttcatttattgcttctgccaaaatgaccaaatagcccaaggagaacagtgttgctaatttcagatttttctgtgttcactatagctgttggaagaaaattgattttatgatgatgttatcctgtttcaaaagcagtcatttctattggctttttggttctgtgctcaatttcagaaagagattattatttatattgtggatgtctgcccctaacttgaatatgcaagggctcagagaccagaatggaaagaatgaaggttgcttgggagggggctgtgcaggacgggaagtatggctcatgagaccacttcagtgcttatcgtttttaccaaaatacatttgagaaaaagaggagagacagcatgcgtgtgtatctctgtgtgtgtgtgtgtgtgtgtgtggtcagtttggttagtttctagtctgttttgaaaaggtaattttggagaggttgaatggttagtgatgctgttttccgtgtgcacactctgccttcattatcaaacacagctgtaggggaaacaaaatgttgtaaacattgtctctcctaaagaaatagagtatcttttcatggattaaaagcagaagcttggaaactgacttgttcaaggatgtgcaacagaatatgggtaggaatcggggccactttatttgtctgacttctgtctttgccataaagtgaagatgttctttgtttcaggtaaactaacaaatggtgagaatgtttttattctaaaaatacaatcactaaggtaactagggcagttcttaaagactttttaagaatgtctcaaaattcaagaagcagtttacgttcactgtcctctatgttatgagatgtatagagtaaaaaggaaacattttgaaataagattttaattttcaaaatcttggtgggtgttttagatgttgtgtatgacttttacagcataaatgctattattttcagaggtgtgttctgtgacattccagatgtacccttaatcctcctaagaaagcattcccctgggttgtttatgtgagtaatagagttcctgaattatgtgtttttgctttttagatgctgacagacaagattccattaatctcttcttgggagttttccatcccactgaagggaaacctcatctctgggaactccctacagatttttatttgcatcataaaaataccatgagacttttaccaacaagaagaaggtatttttcttcctggtctactatgttaaactcagctttgatgttattttgaatatgagagaactttctttttgagaaatgattatataggctaaagtagtcagccttgctacatgtttgccaggaggaatttagtattgttgatgtcctgatagttcagttcagtcgttcagttgtgtcagactctttgcgaccccatgagctgcagcatgccaggcctccctgtccatcaccaattcctggagtttacccaaactcatgtccactgagtcggtgatgccatccaaccatctcatcctccatcgtccccttttccttctgccctcaatctttcctagcatcagggtcttttcaaatgctctctgcatcaggtggccaaagtattggagtttcagcttcaacactgggaaattgtcattaacaaatgcagttgttttgccttttcataagatacaaagtttcagagctttatcattgaactgttaagttgaagctccactggagcaaaccagtaacataacttttgagtgcttcctgcaaatgtggggtgataaagaactcttaacatgtaaggaatcatctttggtttttaagtgtggtgtctaggcagcctcgctttggaattgcaatgtcctttcctccaggaagcacagggaactcttggtgacactggggaggacaggaatctagagccaaggtgctcgtggcaggtgccactcccaccagccctgttgctcagtctgggccttcttgagtcattcactgtatgggctattatgatgacagttaaattgggagcagtagtccccaaatatggagaaggcgacggcaccccactccagtgttcttgcccggagaatcccatggatggaggagcctggaaggctgcagtccatggggtcacgaagagtcagacacgactgagtgacttcactttcacttttcactctcatgcattggagaaggaaatggcaacccactgcagtgttcttgcctggagaatcccagggataggggagcctggtgagctgctgtctatggggtcgcaccgagttggacatgactgaagcgacttagcagcagcagcagtccccaaataaatgaactatttcctgaggattggataagactccctgtgtagcacaggccgcagggtcaggggacttgagttggtgtctctgcagccgtgtgaccttgggctagttatttaacccctctaagtctcatttccctcccctgcacaatgtaagtgacaggacacacattacagagtcattgtaagggcttaatgagaggactctttagcattgttaattgaagagtcatgttgtaataatgggcaacatttttcacatatgagacttgagcctggtcccttctgctcagagccctgtgatgtcaagtctgctcctaaggctctcctctcacagcatccatatgatctagccctcattttgttcaacagtgcttcacaaacactacagggttcattgccggtctgtgcaaattgtgtggacagaccacaaacaactggtgaattagcaagtgctaatgttacagatgttaccaaattctctattacttcaggaacaattcaaatattaagaaaatgtcagagtttatatgtttctcagttttattcctttaagtacattttcttggaataaccagcttaatgcttgaccttactttccctataaatgaagtagtgctgacttttccactatattaataaatgattgccatgaatttttgctgacaagaagtctggagctaattatgtttatttgatgagagataagtgtaaatacctatatttagctttgttgatgcaattgactatgggtaaatatggttttctgaaactttatattatcttaaagtattgaagctattaagatacaactcagggaacaagcaaaactggattttctgttgctgaaattagctagtaaattacaagcataagttaaacctagagttacataactgaagcaggcggtgttggtgcttatttgtggaaataaaaggaagctgatgttacattctcatttttaaaattaaaaaaaaaggaaactaagttgcagagaaaatgtgtcttgactgaggttatgcagctgattagacagcacagtaagtgaatgaactaaacacctcccactgagaataaacttttatcagagtaggtactgtggctctcacagttgacttggtctccttgttttttctctagaatgtgaaaattccaaatattgatttttggcatcaacaactgatactaataagactaggataaatttcagtactttattttggcctttctagtcacccgatactagttactttgatgacggttaaatccttacgctgattctcagaagaattagccagaggcaataaccagactggagcatggacactagggtagagctgagttggattttctgcaggtgtgtgaccttagatgtgtttctaaacctctggaaatcttgttttcccaactatagaaaggaaatgactacacacacctcacaggtcactttaaggattaaataaaatatgaatgggaagtacttcctattgggtctgacacatgatccacacagtctggaagcagccaagctctggagggactgcctgcagttaatacctgtctgaccggaagcaagacatataatcactgcaattctcagtttccacatcagtaaaatagagatagtgatagtgtctgacctgtaggtttttctgagaatcagatgagatcatataaatccttagcacatagtagtccaacagatattagtattgttattttctttaaaacgactacatttcttagttgtaatatttgttaaaaatcatatagaatgaccattaattctggaaacttagataatattattttatcacttattttttgttgttcattccctaaattgtgtgcagctatttgtgatcccatggactgcagccctccaggcttcttgcccttcactatctcccagagtttactcaaattcatgtctgttgagtcagtgatgccatccaaccatctcattctctgttgtcccttcttgtcctgccctcaatctttcccagaatcagggtcttttccaatgagtcggctctttgcatcaggtagccaaggtattggagcttcagtgtcagtccttccaatgaatattcagggttgaatgcctttaggattggctgctttaacctctttgctgtccaagggactctcaagaaccttctccagcaccacagttcaaaagcatcaattcttcggtgctcagccttctttatggtccaattctcacatctgtacatgactactggaaaaaaagaaaaacataactttgacaatacagactttagtcggcaaagtgatgtctctgctttttaatacgctgactaggtttgtcatagctttctttcaaggagtgagcatcttttaatttcacggctgcagtcactgtttgcagtgattttggagctcaggaaaatgaactctgccactatttccattttctccccatctatttgccatgaagtgatgggatgggaccagatgccatgatcttagttttttgaatgttgagttttaagctagccttttcactctcctctttcaccttcatcaagaggctcttgagttcctcttcactttcggccattagggtggtatcatctgcatatctgaggttgttgatatttctcccagaaatcttgattgcagcttgtgattcatctactccagcatttcacatggtgtaccctgtatacaagttaaatgagcagtgtgacaatatacagccttgatgaactcctttcccaattttgaaccagttcattgttccacatcccattctaactgttgcctcttgacctgcacacaggtttctcaggaggtaggtaaggtggtttggttttcccactgctttaagaattttccacaatttgttgtcatccacacaatcaaagcagaagtagtgtttttctggaattctcttgctttttctatgatcccacagatgttggcaattagatctctggttcctcagccttttctaaatccagcttgtacgtctggaagttcttggttcacgtactactgaagcctcgcttgaaggatttgaacattaccttgctaccatgtgaaatgagtgcaattatacagtaatttgaacattctctggcattgcccttctttgagattagaatgaaaactgaccttttccagtcttgtgaccattgcttagttttccatatttgctggcatgttgagtgcagcactttcacagcatcatcttttaggatttgatataactcagctggaattccatcacctctactatctttgtccatagtaatgcttcctaaggcccacttgacttcatatgctgtgatgtctggctctaggtgagtgaccataccatcgtagttattcagatgattaagatctattttataacgtactattagtgaacactttattatgtatgtctgtgtttccaaactttgtgaccatctgtattttacactgtttaccaatgatttattctgaaacagtatttttataaaatgataagggaagaggggataaactaactttgcctggaattcatccaaaccagttctctcgagataactaattttgtggctcaaaatcccatgtttatgaatctgttcaaaactgctgattgaagctttgttctgaatagtactggagtgggttgccatttccttctccagaggatcttcccaacccagggatcgaacctggggctcctgcattgtagtcagatgctttaccatctgagccgccagggaagtctgaaataggttagtatgtcatatatcatctcagatgccatttttgaatcagtgttaataaagtcaccagggtatttttaggcattatacattaattgtctctttgactcagagttgggagatttcctagcactatcttctgtctgatatatgagttccctctgtgtcttcccaggtggggctcagctgtactgtgcttgactggcgttggtttgtcaaccagcacctgtcaggttgagaggtagtcgttttcggacagttcactcacatcattctttctcatatcatgctgagatccgtttgtctgtaattttacctactaatcttagtttaaccccctgagaccttaagaacacagttttctcattcacttgatggtcttttaaatatttgaagacaggttcacacattctcaaagtctcttcttctccaggttttctggaggctttcttctgtattccagtttatgtcagtgctctttttaaactgtggaattcaaacctgggtccaatagtagtctgattttggtctaatttgtgccaagtgttgtgggaccattggtaccatcattccccttgtcctgggtaatctgttttttttttatcatgaggtacaaagttacattgactgttagcagcaatgctgttgtaatgttaattctctgggcttcctattcactggaactcccaagtctttttaacatgccctatcaccttatggcagaaagtgaagaggaactaaagagcctcttgatgaaagtgaaagaggagagtgaaaaagttggcttaaagctcaacattcagaaaactaagatcatagcatctggtcccatcacttcatgggaaatagatggggaaaccgtggaaacagtgtcagactttattttcgggggctccaaaatcactgcagatggtgattgcagccatgaaattaaaagacgcttactccttggaagaaaagttatgaccaacctagatagcatattaaaaagcagagacattacttttccaacaaaggtccgtctagtcaaggctatggtttttcctgtggtcatgtatggatgtgagagttggactgtgaagaaagctgagtgccgaagaattgatgcttttgaactgtggtgttggagaagactcttgagagtcccttggacagcaaggagatccaaccagtccattctgaaggagatcagccctgggatttctttggaaggaatgatgctaaagctgaaactccaatactttggccacttcatgcaaagagttgactcattggaaaagactctgatgctgggagggattgggggcaggaggagaaggggatgacagaggatgagatggctggatggcatcaccaactcgatggatgtgagtttgagggaactccgggagatggtgatggacagggaggcctggcgtgctgcaattcatggggttgcaaagagtctgacatgactgagcgattgaactgaactaaactgattgccatgccttatctctgccatcttgtcttgcctgtgtatgctttgcctgcttccagaaaaaaaaagtaaacacgtatcctatttattagctatttcctctggctttgtatcttcttcagaattaatcagttggctgtcttgatcctaatgtaagtcattgttgaaatagggtgagtaagagtccttaaacagaataaggtagatagcagagccctgtgggtgccacccaacagctccctctaccttgacactgttatgtgatttttggttggaatcatttcaacagctgtaactaaccatgctgtcaacacttgactgtcctgtcatcctgcccacatgtctctgtcttgttcacatatatcagttgctttgctcagatccatatatgttatttcagagagctcccaagtttactagtggagttaaagagccttttaaaatcttcctgacctttctatgtgagccagtggaattgagcacgcttaatactggagagtgaaaaagagaaaagaagctgacttactaggtgttcatgcagaggcggaagtggcacccacctgccatcgcctgtcctctgatacctggtccggaagcagatttctgtcccggcgcaggggctcttcccctgggtgattgtgctggttggggaggtgatgcctccccgtcctgtgctcagtcctctcagatgctctcctcctccatccatctcagcccagcttcctcagagcaggtatttctttgggcttctttccttctgagacccacttagaagagttggactttaaaaaaaagttatttacttttaattgaaggataacttctttacaatattgtgttgatttgtgccatacatcaacatgaatcagccataggtatacatatgtctcctccctcttgaaccctcctcaaacctcccaccccttcccacccctctaggttgccacagagtcccagtttgagctccctggatcatatagcaaattcctattggtcatctgttttacaaatggtaatagtgaatatgtttccatgctactctttccattcatcccaccctctccttcctccccacagcccgtgtccataaagcttttcttctatgtctgcatctccatggctgctctgcaagtaggttcatcagtaccatcttcctagtaccatcctccatacataggtgttaatatacaatatttgtttttctaacgtacttgactctgtataatacactctagcttcatccacttcattagaactgactgaatgcattcctttttatggctaacattccactatatctgtgtaccacaaattccttatccattcatctgttgatggacatctaggttgcttccatgtcctagctattgtaaatattgctgcagtgaacattggggtacgtgtgtctttttcagttttgggttcctcagggtatatgcctagtagtggggactgtatagtatgctgggtcatatagtagttttttttttctcatttttaaaggaagctctgtactgtcttccatagtggttgtataagtctccattcccaccaacagtacaagagggttcccttttcttcacaccctctccaggatttattgtttgtggattttttatgatggccattctgactggtgtgaggtgatatctcattgcagtttgatttgcattaagaaggggacaacagaggatgagatggctggatggcatcactgactcgatggacgtgagtctgagtgaacttcgggagttggtgatggacagggaggcctggcgtgctgcgattcatggggtcgcaaagagtcggacacgactgagcgactgaactgaactgaataatgagcaatgttgagcatcttttcatgtgtttattagtcatctaagagacacgggttcaatccctgggtcaggaagattccctggagaagggcgtgacaacacgcttcagtattcttgcctagagaatcacatggacaggtgagcctggcagcctacagtccatagggtcacaaagagttggacacaactgaagtgacttagcacgttagtcatctgtgtatcttctttggagaaatgtctgtttaagtcttttgcccacttttaaaaaaaatttattttttaattgaaggaaattgctttacagaattttgctgttttctgccaaatatcaacatgaatcagccataggtatacctatgtcccctccttcttgaacctccctcccattctctccccattccacccctctaggctgatactgagtcctatttgagttacctgagtcatacagcaaaactgactatctattttacgtgtggtaatgtaaatttccatgttactgtctctatacatctcacgctcttcttcctccccgccaagccatgtccttaagtttgtttcctatgtctgtttctccattgctgacctgcaaataaactcatcagtaccatctttctagattccatgtatatgcattgctgctgctgctgctaagtcgcttcagtcatgtctgactctgtgagaccccatagatggcagcccaccaggctcccccatccctgggattctccagcaaaaacactggagtgggttgccatttccttctccaatgcatgaaagtgaaaagtgaaagtgaagtcgctcagtcatgtctgactctttgcgaccccatggactgcagcccaccaggctcctcagtccatgggattttccaggcaagagtactggagtgggttacaatatttatcttctctttctgacttacttcactctgtatcatagactctaggttcacccacctgattagaactgactcaaatgcattcctttttatagctgaataacccattgtatatatgtaccacagctcctttatccattcatctgtcaatggacatgtaggttgcttccatgttctagctatcatgagtgtgctgcagtgaacactggggtatttgtatctttttcgattttgatttcctcaagatatatgcccagtagtgggattgctgggtcacgtggtggttttattcctagttttttaaggaatctccataccatcttccatagttgcccacattttgattgggctgtttttctggtattgaattttatgagctgtttgtatattttggaaattaatcatttgtcaattgtttcagttgctgttattttcttacattctgaaggttgtcttttcaccttgtttatagtttcctttgcagtgcaaaagcttttaaattaaattaggtcccacctgtttatttttatttccattactctgggaagtgggtcatagaggatcttgctgttatttatgttatacagtattctgcctatgttctcctctaagagttttataatttctggtcttacatttaggtctttaatccattttgagtttatctttgtgtatggtattaggaagtgttctaatttcattcttttaacatagctatccagttctcctagcaccatttattgaagagactgtctctttcccattgtttgcctctattgtccaagataaggtgcccataggtgtgtgggtttatttctgggctttttatcttgttccattggtctatatttccatttttgtgccaggacaatactgtcttgatgactctagcttttttgaaaagtattgttaagctttattttgcataagtatacagtttagtaatatttttaaaaaatttatggcctgatctcttaatttgctcttaattctttttctttacatggtgtattctgagtgaaaacatgttctttataatgttttcttctttttcctaagtaacctttttttagtaatttatttatatgtgcactgataccttctctgctttcctcctctgccaattctatctgtcttcattagaatttatgcctgtgcttgctcgtgggtgagttctttctctctctaacacacatgctgctgctgctgctgctaagtcgcttcagtcgtgtccgactctgtgcgaccccatagacggcagcccaccaggctcctccatccctgggattctccaggcaagaacactggagtgggttgccatttctttctccagtgcatgaaagtgaaaagagaaagtgaagttgctcagtcgtgtccaactcttcgcagccctatggactgcagcctaccaggctcctccgtccatggaattttccaggcaagagtactggagtggggtgccgtcgccttctccgctctaacacacatcagttcagttcagtttagtcgctcagtcatgtcagactctttgcgaccccatgaatcatagcacaccaggcctccctgtccatcaccaactcccagagttcactcagactcacgtccatcgagtcagtgatgccatccagccatctcatcctctgtcgtccccttttcctcctgcccccagtccctcccagtatcagagtcttacaccctcttagcctggtgtggcttatttttatgaatagatgtggattcatagaagtcactggtcatcttaggttactcccatctctagtaaatacttgatttgctatcttccctgcattgacattacactcattgctgcgtagtttttggagtctttcaccctctcgcttttgaacatcaagactgcatttgcccatttcctgtgtcagttctgctctttaaaaagagtattgagcacagctctaccaggacacctgagtgctcccagagatgctgtgctgtctccttctgcctcttgggctgtgcacagttccctcttatcttgtgtatttctctttccagcatgaaactgtgctggtgaagataggaacaatactgtagctctactttctctttattttcaacatggcatttctaaagcgtagaagagtgtttgacacacagtaagtgcttaataaatggtgaaagtctgaatgaattctttgtaagcagcagacttatcccttttctgtttttttgttttttgtttttttccccttgctttaacgccttgctattcaaaaagtagtctaaggaccagcccctttgatatcaccaggagcttgtcttaaatgcagaatctcaggccccacctactgaatcagaatctaccttttaacaggattttcaagtgtatgctgcttttgagaagcactgctctaaagcataacttcagtctcaagcaaaactttaggagcctttcctgttatcccagtactaaccaccccccaccatagttcgtttgtctagctaacacattttatctagtgaattgtagaaaaccaacatttacatctggcccattttaatccttttttttttaaatagttacacttactggtggacaccagaggtaataaaacatttaccactgccttatgatgaaggtaggtacgctgtttctcctttagtttttatgccaacctatttggaaattattattaaatgatcttgaagcattcatttcatataacattttattagaaagaaatgaatgacaattcagtgttatgttactgttataatagataggagattatgacatcttagctttttttaaagggtagagattgtattatacttattttgtctaaataggccaataccttgtattgtgtcttaccagttatcaggtatgtcactcagatgtttagtggatatattatttcatcatttaaaattagtagttgatatattcctacatatttagggggaatgaggaggaagtgaggacccattcacaaggagaaataaaaactctccctatatctaagcagtgaaaaaaggtacagagaaatgtataaaactatattttagtcactgaagattaaattatatattaatctgttagaaaggcaggaaagtttttacattcaaagaataccttcagatgtattttaacatattagaacaatgtttccaagtttaaataattgatcagtttgaaatagagtttattcttgattctattattgattcttccaaccatggacaagccagttttctcaattgtgaaaggatgcgatgatctattgccagtctggaacactccagttgaagattccatctaatcacatttgactaccctgtttttggatggtatggtggaggccataaagtaagaagattgcaaatgagttcttcacagattattaattagcttttaaaaagcatttgttaaccttgaaattctgagcaaaatcataaatcatactgcatggtaatccaagtctatgccccaaccagtaacgctgaagaagctgaaattgaacggttctatgaagacctacaagaccttttagaactaacacccaaaaaagatgtccttttcattataggggactgcagtgcaaaagaggaagtcaggaaacacctggattaacaggcaaatttggccttggaatacagaatgaagcagggcaaagactaatagagttttgccaggaaaatgcactggtcatagcaaacactgtcttccaacaacacaagagaagactctacatatggatatcaccagatggtcaacaccgaaatcagattgattatattctttgcagccaaagatggagaagctctatacagtcagcaaaacaagactgggagctgactgtggctcagatcgtgaactccttattgccaaattcagacttaaattcaagaaagtagggaaaaccactagaccattcaggtatgacataaatcaaatcccttatgattacacagtagaagtgagaaatagatataaaggactagatctgatagagtgcctgatgaactatggacggaggttcgtgacattgtacaggagacagggatcaagaccatccccatgggaaagaaacgcaaaaaagaaaaatggctgtctgaagaggccttacaaatagctgtgaaaagaagagaagcgaaaagcaaaggagaaaaggaaagatacaagcatctgaatgcagagttccaaagaatagcaagaagagataagaaaggcttcctcattgatcaatgcaaagaaatagagaaaaacagcagaatgggaaagactagagatctctccaagaaaattagagataccaagggaacatttcatgcaaagatgggctcaataaaggaaagaaatggtatggacctcacagaagcagaagatattaagaagtggcaagaatacacagaagaactgtacagaaaagatcttcatgacccagataatcacgatgatgtgctcactcacctagagccagacatcctggaatgtgaagtcaagtgggccttagaaagcatcactacgaacaaagctagtggaggtgatggaattccagttgagctatttcaaatcctgaaagatgatgctgtgaaagtgctgcactcaatttgccagcaaatttggaaaactcagcagtggccacaggactggaaaaggtctgttttcattccaatcccaaagaaaggcaatgccaaagaatgctcaaactactgcacaattgcactcatctcacacactagtaaagtaatgctcaaaattctccaagccaggcttcatcaatacgtgaactgtgaacttccagatgttcgagctggttttagaaaaggcagaggaaccagagatcaaattgccaacatccactggatcatcaaaaaagaaagagagttccagaaaaacatctatgtctgctttattgactatgccaaagcctttgactgtgtggatcacaataaactgtggaaaattctgagagagatgggaataccagaccacctgatctgcctcttgagaaacctgtatgcaggtcaggaagcaacagttagaactggacatggaacaacagactggttccaaataggagaaggagtatgtcaaggctgtatattgtcaccctgcttatttaacttctatgcagagtacatcatgagaaacgctgggctggaagaatcacaagctggaatcaagattgccaggagaaatatcaataacctcagatatgcagatgacaccacccttatggcagaaagtgaagaggaactaaaaagcctcttgatgaaagtggaagtggagagtgaaaaagttggcttaaagctcaacattcagaaaatgaagatcatggcatctggtcccatcacttcatgggaaatagatggagaaacagtggaaacagtgtcagactttattttggggggctccaaaatcactgcagatggtgactgcagccatgaaatgaaaagacgcttactccttggaagaaaagttatgaccaacctagatagcatatttaaaagcagagacattactttgccaacaaaggtccgtctagtcaaggctatggtttttccagtggtcatgtatggatgtgagagttggactgtgaagagagccgagcgctgaagaatcgatgcttttgaactgtggtgttggagaagactcttgagagtcccttggactgcaaggagatccaaccagtccattctgaaggagatcagccctgggatttctttggaaggactgatgctgaagctgaaactccagtactttggccacctcatgggaagagttgactgattggaaaagactctgatgctgggagggattgggggcaggaggagaaggggatgacagaggatgagatggctggatggcatcaccgacttgatggatgtgagtctgagggaactccgggagttggtgatggacagggaggcctcgcgtgctgtgactcattggatcacaaagagtctgacacgactgagcaactgaagtgaactgaagaagattcagttgttttgggaaaaaagataggaattcaacaacctaatgttgcccataataaagaggatttgaaatataatagaaaatttaataaaacagctgtatcatttttatctctagggcagagggtgtttatttaagagaaaaaacgaatttaaagaattgaatgatttgatttcttcaataattcctcactcccaccccagcttccagtagcctccgcctccttagcgattgtcttgctcagctttgccatgcatattctgtgcacatgtctggtttcagttccaagtgtgtaagtgccagaggcacgatctgagcctcgttcaatgcactctctgtgaacacagttgacatgacaaaaatgtttataagatgtaatctgaagacttttaagagtaacaggcagtatctctcttagttatctgtgctgcgaacttaaagaagttagtagtgaagaaatttcacaaatatgaagaggagattgacatccacaatgagttctttcgaccatacgagctgagtagctttgatgacaccttttgcttggctatgacgagttcagcacggtatgttgtgaattctctgaaactggaagcactggggaactgtggttttcctagtttgtttagctatgtcttcgtttactcttctgcatggctgctgcaggtggttgtccaacctctgaaattccttctgcaattgggagcccattactcaggaggcagtccttctattgttggacagctctccatcctggcctgtcacctttgaacatacttcatttttctgtctcttttggactttaatggggccttttaggaaaatgatgggtctagattaagaaaattaggctccgaaaatcagtttttgaccgttatgatttatactgaagtttgcatttttgtatttactttttgtgtttcacattttcttcaaatgtgatatatgtgtgcctaaacttaatatagtacatggtgaaacatatttcatggtttgtttcctagaagtcactctacattttgctttggtttcagatagaaagtttggaatttttacttgcttgattttcagttatacttgctaaagtttagcagttttaactgtgaggttattgtcattttcctttgggttatacataaattttagtgagtagcaaattctcaaatatgtcatccataaatcatgaggatcaactgagtagttcaaaaagaaaaactaaaccacttacatttgaatggaacattttcaaactgttaagtaggcatttttagtcagattcaatattactttcttttccttcaaaaaatgtaatattgagtcacatgcttggagcagtatccttgccagaagttatgagtcttatctgcataaatcatgtaaccattgcttctttggcatctattacggagtttcgtctggcttcagcagtaatagtaaggtagcccctgtatcatgaggaagtagcttcagcttatcacagtaagtggtaaattaacagtttctatttaaagtgttccagtgttataatgaattaactccagactaatgagacagatgttgatacttcaattcataccaccgtgtttttgataattgtgtctgcctccttaggtgctatagtgtaataaaaacattgtccataaaaccgagcagcttagtgtcttgccctcagttttatgagtttaattttacttgaaaatgaatcatgatatacaaccagagatgaatcttaatagtaattcagataccaattctgctccagaaaacaaaatcttgaattcaaaatcgttgggcctcttaatcagagaaaattcacagtgaagactgctaacactgaagttactgagtgccattaattcatgggatcttatggcccagatcacctaaactcccttgagtatttcacttagaatatatatacctctgaaggctaagaaggaacaggataagaatgtgaatagagagggaagctgataccatctggatggacagtgatttacatggaattttttcccctttcttcagtgacttcatgcctaagaccgttggtattgatccaagtccgtttactgtacgtaagccagatgaaaccggaaaatcagtattggggtaagatttacatgtagaataaaattttaaagatacacataaaataatatagcacttgcaatataactttcacccagaactaataacttcaagtcatatagtttacagcacagtacatacagtgcatccatgggcgtgctaagtcacttcagtcgtgtctgactctttgtggtcccatggacgccaggctcctccacccgtgggattctccaggcacgagtactggagtgggttgccatttcctcctcgagggaatctttctgacccagggatagaacctgcgcctcttatgtctcctgcattggcaggtgggttctttaccactagcaccacctgggaagcccactgcatctgtacagatagcttatttatagcactggggttattaaaacatgtttgacactgaaagtagaatttatgggaatttcagcaacacagtacattttacttaaattagatatttcgtagatggcataaagttaggtagcagatgttatgtatgtcatttaataactccacatcctctgtttcccacaacataaaagacttaggtaaaaatgtatactcgttgtgtttatttttgctggtacccagaggaaacattaaagcaaatgctcagacagaggacttaatagattttctgtgtgttactttaacattgtgtgggcgacgactgttattttattgtatacagtagtacgaggaagagaacaaaccatgtgtaaatctttatgctttgagactggaatgaaacgtgtcctagtgtgtgtatctctgttattgctgttgacctgagtgatccagtgatgagaattctcctaggccctggccagactgtggattctgagtcctaattgtatttgggagtgtgtacagggtcttaattggattctaactacatgtgtgatttatacaatgagatatatactgatattactatttcccagatacactacttaatgtggcttaaatatgtgtcttggaccaggtgttatgaggaatttaaaagaaggaacatcctcaggacatttaggatttaaagagttcctgggacaaatacataaatgaccatttatattagtgtatagttttgaaatgtatcaactttaatttttagtttcataaagtcagaaatgaatttattttctctaatatctaatccatggttagatagtattacatatctcttttctagaaaatgtagaatattatatttcaagtcccttgcagagaattttttcaagtaagaatattaaatatattaaatatttttcataaaatccaaaaatattaccatacatttttttaattaagaaaaaaacagtattctgactactctcaaatttggcactgaaataaaagcaaataatgtatacttttttctgtttcccctcatccactctctattattagaagacatcgtcagcaaacatagttatttactacttaaattgttttaaaacagtttaaaatcatagtttatgttcatcagttgctcattactttggtacaagtaatcagctgccactgtgattgataaaaattcataggaaggccagaaatacacatggatttggctatcgaccctttcttgatgcttctacaacttataggtaatttcactaatatctcaaacatgacagtcttctattgtactataaattttgaaaatcctgatttcagttaccaaaagggaagacacagtagccaagcggtagaaaggcttttctgcacactgcaagtacatacttgcttattttctgaattcatagcaaagcttaaattcatagaaggtcaggacatgtacatgataaaatattaaacttttcccttcagcacaacttgaatccagacgctagcttctcacagtcatttgcttaacacgtctccaggactaaggctttgggacagggtgatacacggtgagcactgagggttcagtttacagatgcttcacatccgtattcatctttttaaagaaataagagcaacagagaagaagctgtgttacagcggaaaacagccgccagtgccccgccgccgcccagcgaggaggctgtgtccagcagctcggaagacgactccgggaccgaccgagaggaggagggctccgtgtcgcagcgctccactccagtgaagatgaccgacctgggcgacagtgccaaagtgacagaggtgagggacccaggagaggctgctgtccagtgaggctctggacaagcagctccagaatcccgctttcagctgaaaggctgagagcgaggaagagtcacgtcacttccctccaccattctcatgtgcggtgttggaggtgctgcagggatgaatacatttggcaaagatattactgaaaatggtttctgaaatcggtatttttgcttccacgtgtaatagtaaatttcttgtcacttcagaattcttaaagtgaatcctgtccctctttgagcaacccatccacttgaggtccatttgttcccttgcttagcacattacgggaatgcagggtttgcacctgggcctcacaatctctgcctaatcccagtgggaatttcatcctgttgaatttgatatggatagtacattgagggaaaacaaaaggcaagtgaacaatagaaaaatcaaatttagctttaggggaactggatttctagaaagagccagaagtcatttgaggtagacatggcaaataaaatgtaatgatatgggaactaaatctgttattccgggcattggcaaagtgcagcctattggccaaagcagcttgctgccatttttttctaagtaaagtttaatttacaaccagccataccaatttgtttatatgttatctatggttgttttcaccctgtaacagcagaattacgctgctgtgccagagataatgtgacccaaagaacctaaagtatttactgcctgacccttcacagaaaatgtttgccaactcttgcattatacaaaagcaattagtaattaccaactagttttttatctaaaataaactattttagtgaaaatgaaatacagtttttaaaaaatcattaacttagaaatttaatgaatacgttgaaacattgtgatggtttttatgggaaaattcacagggtcattttcttcatttttagaaattattaatgtgctagatgtctaagaagtcttcctgattcccttattttttgaccccagaatgtagtccagcccatgaaagaggtgtatggaataaacctctcagatagcctctcagaagaagatctttccatatatttaaggtaaggtattttcaagagaaattaaggacaaatgcaaatgtattataataacttacatctaatattacttttaaaattgaaagtagtcaaccatacagaaggaattgaattccatttggaatagtagcatttaggtcagattctgaaacaacttatatttggagttaaaaaccctacttactgcctgagactcttgggcccctgaatgataaaagtttatgatacttacacatattttcactgcccaaatataaactgcaaactgaagttcaaatgcatttctgcactcctgcattaacaaattctcaagatcaagtaccttcttacaaaatgaacttgggatattgacagttgaggactttgtattcaatttagcttggggtgggtggagggggtggatgtggcactgtgggagtggtgactgaggaggaaaaaggaagcaatgatgtaaaggtaccaattcagagtgttatagacttttattaggaagacctagctaaaaggtggagatctaccaaaaggtatccataaaatcacgtacataaaaatgtgtctgtgtgtgtttgcagagaatattaatagttatcagattctctaaagaattcctcacccccaaatcctcaaaaacctaaggattaaacacccatttaaacaccccctcaacctagtattaatatatgtattaataattcacaattatttcaaatgaacatgtaagtttggcttatgtaaaatgtaatataaatgattactagtctttaggtctttttttaaggagggtatttgttttgcagaatccactgaactgattatttttcactctcgacttcaaattagtaagatctgctgtagaatatgtaaaatatagaaatatatagcatttcttaactgcaaaagcactggtatgactgcgtatcactgtcctactggaagtcaactgagtcattcagaactcagccacaccctcctcactcctggacacacagtacattcatcacagctgtcacactctgtcactcaactcgaagagtagttgaagtagacctctgtaagcaacatggtctagaagaatgaattatctggagttagtgactaatatgactctacttactgcagagagcataagtatacatgtcagtgatgttcacttgctgaagatgaaagctggacgagactaagctaatttaaaagtttttcattgcactgtaatgatttaataattggtagtttctgaagcacttttcctgacctttaaaaaacctaataaaaactacaggctgcatccctgagggtcagatggatgcatggagcacaggccacaccttggatgggtgtacttgagaaatatcaggggccctttgctataggcatcctctcaccttgttgagcgggcctggggcctgctatggcccttagctacaagtccagtttagtgtggtggaggcttctctgaggaggcatggtgggccagtgaagctcagcaggtggtctcctcaggcccctgtccctgttgaaagtacccttagtagtggctggtgttcacctggggattcttgtggtcctgaggaaccaagtccttgtcctgggatcttagcagcatccttgcttcaggagctgggtctctagcctgatctgccatttctttgtctcttgtctcacccaagcaccatccctctccccttgtttccctctgcttcctgctgcggtcaccctcagatccgcctcaggaacatttcggctcaggttctataccaagttagagtaaacagaatgcaacaaagtaaacgttttctttcatttttatagccatggttatgacctaaactgtaagcattttcccctcctctattcccataaacccactttaacatcaggcatcttgtgtcacatggggtcctcttgtgtgcttttctgatgaagtatgtcattcgaacaccggtacagtttgtgtcatctgctgaatttgtggcaggtagttcctttagcttacttttttttacacattataatttgtagatttgtgcagctggggcagagtcaacataaagaagacaagagcagccagcagttctgttccaggtgcccagatggagttataaaattgtaagtactagattagaccttgtaaaaataatctttgtattcatgcctttaagattttgtaagagaaatattgtgaccaaattagtataagcactaaagcatctcctcctggtatcctgttggaggagaactgggaatctatgggcatgcggaagaggctggcagcctgacctgtgcttgaaatgcgccctttagaaatgggattgaagttgctgggggattcccaccagtgggtagggccaggatgaaaaaaacagatctgaccctggggacaagctcctcaagttcactgccagacccctgagggcaggagtggtttttcttttctagcatggtatcttcaccagttcttttaacttgctgtttagtaaattaaataaacactctgacactttaggggttttttaccttgagcgagtaattttaagtcctgtgtggctcagtttctttatctgcaaatgtgataataattcctgcttcatgggagggtagtgacactttcactgagataatgcatacaaagtgcttagatccatgtctgaaatatgttctcattacgttgtgatcatcaccatcgtcacactcttctttgtatttatcattgttctctgcttctggggaccaaacaaagcggaggttgtgaccaggagtagctccctgatgccgtgtgctcagctgagtttcttttatgaaaatgggtcactgtggtgattaagtgaggtggaatatgtaatgtgtctagatcagtgtctggcatagagttgacatttagtaaatgttctcttcccttttcttagtccaactttatcagttagtttaataaccattgatactgattccctgacttctgtctgtactatatctgtgtgttcctgattgttaagagactactgtagtgatccaggcaaagactggtggcttagagagtagtggctgggagaattttggaaatgagatgaatctaggaaatgtttgggaagtaaaatagagagtagttggatatggaaaaaaggccttaccaaggatggtcgttaggttttttggtttgtgccgtaggtttgattgattgatccattcatccatttacttagcaaataggtacttaatacctattaggacctgccacttatcaaggtaaaggcactgtaggagaaccccacttatcaaggtaaaggcactgtaggagaaccccacttgcctttcaagggggaccagagtggccatgtttaggaagcagttgaatcaactgatctgaactcagaaaagaggctctgggattgtgaatgcatactgatgataactgaagccactggtcaaagatgacaccacttaagagaataacagactgagaagatctacgcgtgagtcttaagggggtctgggtttaacactggcttctctgtccatgggattttccaggcaagagtactggagtggggtgccattgccttctccagagaagagacacagagatggctagtcagagaaggggaaggaaaaccaagattattttatcacagcctccaaaaggtctatttatcccttctttctctactctgtcacgatttttttttctctttttaaaaacataagagctcattaacttatagacaggttttccttcttaggtctagttagcatacggaagtatgagctctcaaatgagctgatatcagaggtggccaaagagggaaaagtgtttaaatgtgttggtaaagtaagagactctgttatcaaattgtattatttgaattgattcttccatttaaatagtatagcacaatttaggaggagcagatactgaagggaatatagcatacaaaataaaagaaaaacatctccccatttctttcaacattgtgtctaccttgatctgtaactggtcttgctgataagttatttttaaattctttttcttacagtatttagtatttgcttttctgagtcttagcacagatttaaaaaaaaaacatgtgaatctcgaattttgttaaccttttccacttaattagtaaagaatctaacatgagtatctttgcacagcatcttcagcaggataacaaagagcttggtaggctttgtattatgttgtcatggcaactgctcaagagtgttgttttttggtgtgtgtgtgtgtgcatgtggcgtgtgcacttgctttaaattgaaaccctataactaggttcttaaaatgtcagctactcaattttagatttttaaagctgtgccaaaaccaagagaaattagatttatgtgagatggtccaaatcctcatcttgttatggttcaggttctagtatattttaaaatatagcaagtttttttaagtttatgtacatttgtgtctactgatttctggataattcataatctttatcagtttgtcttgaaattatgaggcaaacaagtactctttttctaaataaggtatgtaacaaccaatataaaatatattgacagtgatcaactggcaaggagctagtagaccaggagctcctgaagcagaggtatggaaaactggatggaggagctagacatggtcacccgtgctcttgcgggacatttcttaggagtggatcttaaaccccaaactggtcagtgtctgcactgtcagcccaaacactcacagttatatcctctttgagcgtgaccctccctttgactcatgccattccctcagtgtgtgggtgctgattagggaaaaacgacatcaggccacacttcctgagcagtgtgtgatgggcactgttctatgtaccttaacctgtatcaactcaattctcacaataactctaggaagtaggtcttaactatcgtcttcattttacagatggggaaaccccacagagaagttatataacttgcccaaggtcaaacagcaactgacattcaaacccagacgaactggctgtccatcactgagctgtagatgcctagtgttaccaactgcttttataaccacagaggtaaaaatactgggttattagtgtgaacagcctttattttgatcctctgacatgatctggcttataggtggctccagaggcaaacatagtgtctctgccctgttgagcttgaactttttttttttatataatatccaaagagaatatgcctttattcttttcctgatcccgagcatattgtcttaaatgtagacttgcttcctgggcaggcacactttgcttgattcataacatggtatggaggttaagacgttctgggaacagtgttactgctctttagggttattgccatcctaagttgtaagttcccctgctgcctcttgaattgtagctaaattgagtgctctgtaaacgtctgttgaaatgtgctgactctcactcccgcctccattactatccgagcatgcgcgggggcgccgtgagcatctctcatggcccacctcatccatccttgatcacttgttagttcttcccctattctgcttcctgctcataaaccctctgccctctcctgtttgtttccctactaccttctaatagaggaaaagagtgaacacatcaagggtttagcatttttttcctctctgtcctgcttccacttgcacctgtgaccagatgcagagtgagacaggcctgcagggaagaacttgctgagcccgggcaggtggggcactgtattcaggaccaccctgccctcattgtacactcccagttctcagcactttttaactaagcaatatatgccaatcagtggaggttaagaagaacatgaacatgtgtattattagtgcctactattccatggctcacttattccaggtgtatgtctcacttgtttaagcatttgtctctaagaaatggttcacaatgtaatacgtagagtttggtaaaaactgtctaatttaggatccttccaatggcggatgagctaaataactgtttactgtattaggaccataggttgaatttatttgctaagaacatctcacaataaacagcatctgctgaccttagagggaatgcccctgggttccagctttgcctaggggatcctctcactcatcagaggatgctcttatgcagagtcagggcatgttttcacacccatgaagtgagcatgacactaggctgtgcttagctcaactttgttgactttccatggtgtcactttcaatgctgtgtctctatacacatgtcactccagggttcccacgccaccattgattgcatctagtcctctgcagataatactctcatctccgctgcaggctaaaaaagtgtttaatgggccactcttgttatcttttccaaacacccaggggtgcagtctttaaaggtttaaggatgagagcagctgggaagcagtgatcaatgattagcagctagtttgctccatgggagggagatgatggcgacagcagctcctcagcccaaggaaactaggctgtgacctttcctctaaccccagaaactaccccagaagtctttctttctctttgactctggcctttatttttctctctttaaccctctctggcttttttatatatacttttctaattatctctttctgcttccccctaaccccctgtttattttacctctctctctttctccctcttttttcctttgccatcccctctccaacccctctggtatttttaactctgtttagtttttaaaatacagtagtctctccaaaacacaaatctctttcctgtattttaggatagtgcttttcagattgtaattctagactcattagtgggctatgaaattaatttagtaggcttccatacaacaaaatgaaaagaaactgaactgagtccagtgaaaggctctagtgcatggcacaggggttaagtcttgtttcatgaaattttatttctatacataaatatagcattgtgtaccaatctgccatgcaaaatgcatttctcactgtggataacagtcacagattgagtttatatgaatgcaccttttctgagaccaaatgaattataaatcttaactctgttcccattatccaggcacttaatgaatgtttgttgtttgaatgaaaatgcgtgaataatttctgtttggaatagacaagagagagatcaggaagaaaagggatcagaaagaggtgtaagaggtttctgtggtgtatccaaagtgggtaaagtaaatgcaggctttggaaaatacactctcattacttacaatgagttgagcactgagatgaccatgcaaaggaaggaggtagtaggaagctccagctgaaagtcaaaatgaaaagctattagatgtataaaggaaagacagaaaagtgaatgtctctttgtttgaatattatctataatagtacctgcattctgaatattatctattatagcacctacatactatgttaaacaagaaaatttaatggaacagggtaaattttttgaacctttcagagaaggctaccctgaaaggtttctagcatataagaagcaataaatggaaatttaattgtaggtaattgtgtaattaatttaatgtagctaaaataactttgatattttaaaaatttagtatattgactattttattttggtgactacaaagcataccatttatggaaattctgcaggttcacatgaggccttgagtctccaccctgccaatataggtttttcttattttccaagaacctagctagtgattctataaggtaagatatacttgtgtgtgtgctctgttgtgtctgactctctgcgaccccgtggactgtagcccgccaggctcctctatccatggaattttccaggaaagaatactgaagtgagttgccttttcctcctccaggggatcctcctgatccagggaccaaacctgcatctcctgcattgttaggtatattctttaccactgtgccacctgggaagcccaaggcatacttctgtaatacagtaaggcattataggcactatatgccaggttaggtatatgtacattaatacacagttgagtgagagagagagagagagtctctgcttctgagggtttccctggtgtcaggaaattccaggtggtgggaggtgctgtgaagaggaagctgtgggagtgcaaagaagaatacaaatcagattcctgggcaggcttcacccaggctaaattttaagggaaaatggagttatctggttgaagaaggcagagagggcaaaagttcaagaccacacaccacttttggacacccatacagaattcagtgtctaatgcaagaggattttcagtgaggaggccagagacacagaccaacaggaacagtcagaaagagatgctaggtgagagagagtgactcttgtcctagaagcctgttttaatcagggatgtggtaaaagttactgtggaaatagcatggagaatggattggaggccaagagagaaacagcacatctattagaaaccccagggcaagaaagtgattggagcctgcgtttggctgctgaaataaagggatttattttgtaagggtagattctgcaggacatggtacaatttggtaactaattaggtgtgaggaatgtgttagaggcaggagggttctacctatgttgaccagatctggtcaccagaattggaaatacaaatccaagtctgggacaatgataggatccggtgattgtctggagctccgggggatggtgagggacagggaagacgggcatgctgcagcccttggggtggaaaagagtccacacgactgaacaactgaacaacagcaagaggttttacagagattcaatgattttgtgggtgtttttttctgctcttgattttaaaagaaagtaagttaaattttgtatctttctttgatggggtccaagttaaatagattattatatgtgctttttaaatgttttggagattcatggtcctattaaagggggggatccttcaattactgataaaaatgaagaatttagggggtttaaatgtatttttagcccttagaatacttatttttttcacatgaacaagcaggttaatcctgagggaacagatctgcatatctatggccacgtgaagagtattactcattggttttcttagctctgcataaggaatcacattttgtaactgtttaaccttttgttattttggtagtttaccaaattaccatcaattctgtgggtggaaggtgagtgggatggttttgggcagatggagtggttactgagccttgtgccatgtcactgtgccttcctaacagcctttccttttggcacaatgacgatgtgagcccaggtatgatgtattcattgcccttgtcttctctgagcttctgcaagaagtctttccagctaagataaaattttggttccaatacaagaaaaaagcatttcaattttatatttaaatatagatctgtcatcatatgtgtgactcagaaccctttggggcttttacacatgattttaaaaataaagtacaaatcctattaagtcctaatttgtgtttagaatccaccaataggcatcaatagtcttaatgttggatcagtaattttctgtgtttaacattttgatattatttttcttattgtttatgaagaaatttaagaaatactaccattatgttttcaaaattaaaggtccattcattttataaccatccttctgtcatccctcccaatttaatgggaacagaaagtccttgaattaaaaaaaaaaaaagctgtggtatttttaagctgaaattaatttaaaactcttaagttacttgagtgcaaggcttacctgcctttgtgtctgcagttcatagcataatacctagtgtgcagtaagcattaaataaattaggaatgagtaatattcggtagtttaacttctttaaggaatgtcatgcaatatttaggtgtgatggaaaaaaaaaaagaaatgtcagggttaacaaattgaagcagatggcaagacaaatgataaatatttgttagctttcatttcactatagtatatttccagttttagatataacaacacagggttcttggcagttgtctcatgattgtctcaactgacaaaccattgatgttcttattaattcatatgttagtaggatcatgattttcctttaaaatttttttcagctttattaagatagaattgacatataatatgtgtaagttaaaggtgtacaatgtaataatttgatgtatgcatatactgcaaaatgattaccataataaggttagttaatgcaaccatcacttcacatagtaacagttgtacatgtgtgtgtgtatatgtggtgagaacgtttaaaaatttactcttagcaacttttaaatgtacaaaacagtattattaactatagtcaccatgctgtatattacatctccagaagttactttataactaggagtttgtacctttgactaccttcatccatttcccctgtccctcagcccctgcctctggcagccaccaatctgtttggggttttttggagggtagagttgtttaagattccacatactagtgagatcatatggtatttgtctgatgacttcacttagcaaattgccctcaaattccatccatttaacataaggcaagacttccttttttatatatagctgaataatattcctttgtgtttatatgtaacacatctttatctattcatgcattgatggacactgaggttgctttcccatcttgacagctgtcgctaatgctgcaatgaacagggggtgcatatatctttttgagttagtgttttttgttttcttcagataaatagccagaattgtgattgctggatcatatggtagttctatttttaattattaggggaacctttgtattgttttccatagtggctgtaccagttcatgttcccactgtaatgaacaagtgttcccttttctccatgttcttgctagcacttgtcatctctcctttttgataatattctaataactgcgaggtgagctcatcatggttttggttttcatttcaccgatgaaccttttcactttgctgttggccatttatgccttctttgggaaaacatctattcacattctttgcccatattttagttggattgtttttgttctgtggagtggtttgagttcctatatattttggctgttaaccccttatcagatacattgtttacaaatattttcttccagtccataggttgcctcttcgtgatcactttttactctacagaaactttttagttggatttagccccacttatttttgcttttgttgcttgtatttttgttgtcctatccataacatcattgacaagaccgatatcaagatattgataccaatatcaagtgttgtattaagaaaatgatggtttcaggtctaaatccagttcttattttgtgtgtggcgtaaggaagaggtccattttcactttttttggatgtgaatatccagttttcccagcattatttattgagattattttttctccattgagtattcttggctccctggtcaaatactattcagacatgtatgcataggccaatagaacagaattgagagctcagtaataaacctatgtgtcagtttttatgccagtattgtttatttctttctggattgctttggctgtttggggtcttttgtacattcttaaagctcaagtgagcttcttgcaggcagcatttcattggatcttcttctttattcacccactgtatctctgactagagaattcaatccatttacatttaaagaaattattcataggcaaggtcttactattgccattttgttcataattttctgttttgtagatcttttgctccttgcttcctcttttgatattttcctctgtgattggatgactttttataccaatatactcagactcctttactcagtcttttttgtgaccactacagattttttttcctatggttccatgaaacttacataaaatgtatttgtaatattctatttttaaggtgataataacttcagcagcatacagaaactttgtacttttatatctaccccaccatccattgtgttttaggttactgatgataccattcacatctttttattatatacagcaagtcccctacattcaaatgagttctgttccaagagcacattcataagtccaatttgttcataagtccaacagagttagcctagaatatccaagtaacacagtagggtatgtagtactgtactgtactaggtttataatacttttcacacaaatacataaacacaaaaaagaaaacatttttaatcttatagtacaatacagtaccttgaagagtatagtagtatcagctatatcaccaccgcttttacacttgcttctggacatcctgggcttgaaataaagatagtgtactacttactgtattctgtacagtactgtacaataaagtagacaaaaacacaactacttgtagaggatacatgcacatgacagtgtacaccagacacgtgaactaacttacatgattggacatgcaaatgtacattcacatctttgaaagtctgggacttactgtgcccaataacaaattattctaattatggttgtttttaatacgtcttaacatttaaagtagagttgcatgcaaattatgcaccaccaatacaatgttagagaatctaactctgaccatgtgtttactattaccagtgagatttacacattcataggtttttgcaatgttaaattagcatcctttttttttccactgcccaccaagttccctggccagacagggctaccagcacagctctgcagaaggaaagagcctctggctgcaatctctgatgagctatagctgcaaagaggaatgtgttctgccaatatctgagtgatggttactgtaaacctggccccccttctccatgtctgagtctccatggtcgagccccacagatttccccagtgatccctgtgaggggagacccaagtggactttctgggaagcaccctacagtgctaggggagctgaatttttactttgggttccttcttctcccccttcccctgcgccccccaaaagctataggcccaggggccatttcatgtggccctgtaactatccagagaatgggcaatgcagttggagtgtagaccttcttcttacctttgtaatgctttcctttttggtctctgtgggtccaagggggtgcccccacctcaccccctgggttctggaattttcacaatggtaacttgtttaagtacctatcttgtgagggggaggactttggggacaacctaccttgacatcttgatccatgattttctaattttcagttcagattgctgaagctaaagaatcccttgatcaacatgcctagagtcaaatcatgatttcttgatttccatttgcctgttgtttccaaatacgagaaactctgaaagttttgccttgtttttatatttaacttactcttagaatcttacaattaaaaaaaaattatggcagtttgatctcagttgcaaagaaggaaactttttacattgaaaaaaaatcttccctcgcaaacccacttccatttacttgcaaaaactgtataagatggtttacatccgttggtaaagggtcacagtttctattctgtatgtgtgatgtcatcaaaacactaattaagtcccaaaatatctgaataaaatatatcctgttcctcatgcagaaaaaaagaggccttgagactatcttgactttcttaaccattttgttttactatttaaaattgtgttagaagttcattacttaatgtcaaaataaagtcaattagtgctttttaagcattgtacatcaaagtaatgcctctttaaatataaaactcttagacttatttcaaaggatgaatagctaaattagtagttcctttatcatgtggttggaaaatagggaagtaaattgactaaatagagttagtatgttcagatacatttactttcagtaatagagctagggaaaaaaattctgatcatctcagaaacatcagtacatatttagtagatagaaaaagagcaaaatataactaggtatgtttctgggaactctaaataaaattatatttgaagcttctgaaaccaataactttatcctttacaatctattctactcattattactcttacttgcccaaagattttgcttttacttggtttgaatggttttaacacatatcattgaacataccagtaggtattaactcttaattgcattttctcaggctgtaacgaaatcagttactggttttatatgtcatgtaaatgatacagttaaattgaatttattgtttactagtttattatttcattttagcatttaatttctgtttttacatatggaatcttggatatttcccaacagtctcatcaggagaaaatcagctgatgtcatctgaactctttgcatatttctttcctcccaaaacctgtctgtaatgacttcaagagactcaaaaatacagtcggagttgtgaggaagggtgcaagacagcgtactcagaatgttccatttgtgcacacatgcctttagcatattaggaccataacgtttggggactgggagatgtttagagatcactggactcagtcctctgattttctaagaaaacaaggcctgcagaggatctgcagttcattcagttatagaattcttaaatgatgaatttggaactcgaacttcatttctttgggacttaaagccaaagtccaaaaacgtgaaatcctgagccaggcagctggaatttctccaacccatgcttctattgggtgcatctaaaagtggaggagcctcccacaggcagcatggacagtaacaaatagggacaactagcacctcgaaaccaaagcaagttataaaaagcttaaagcagtgaggctcacatgtggtctgcaaactcctagggagtcctccagcccccgctgagtcaagtccttctctggcctggctcctaaaatgaatgtacttttatccccagccaggccttcaggattggaggggccatgagggaagggtcaaggggtgtgtgtgtgtctgtgtgtatgtgtgtgtaagagtgagaggcaggtaggctagttccacttaatttttagtgcttcatcaaggaattacgtaagtatcaactcttgaatgcatgtctttttaatatgctttgtggcaaaatgggagatgcacataaaagaattctgttgtacatcaaaatatggagattgcctcaaggaaaagcacatatgagagctgaacccattgctcttttcatggaacactaattaaaataatgactgagagacaaactgtgagtattcagacttgagtatttggcagataggttttcaaaaatgaatacagtaagcctgtcacttcaagaaaaacaattgaaagtacttattaccagtgataaagttagatatttcaagccaaaaatcagaattttggaaaacttgtatccatcatcatgagcaatacttaaaagatttttctggtgagatgagattggtaacgatcttaaccaatgtgattttacttttttaatgttgtataatgaaatgtcttaccacttggaggatcttcataataatgttgtataatgaaatgtcttaccacttggaggatcttcataactcagtcaatattattgaaatgaccaatgcatgcttttaaaaaaatatcatccatggataagaaaacttattccaaatgtaagatggaccagtggagtctaacacattattgactggagacatattaatacatcttttgttacccaaatgttactgaccagaggcgttatcaatccatttttagagactgatatattattaactgtatcaccatgcaaagttgttaaagcttaaaattaatcaagagttcattatacatcttatgattgtcattgttcacattttgctccattaggtttttaaatttatttttaattgaaggatagttgctttacagtattgtgttggtttctaccaagcatcaacatgcatcagccataggtttacccatgtcctccattaggtttttattccaacattgtttatattataaatgcaagttttttaatataaatttatttattttcattggaggctaattactttacaatattgtattggttttgtcatacatcaacatgaatccaccacaggtatacatgtgttccccttcctgaatccccctcccacctccctccccgtaccatccctctgggtcgtctcagtgcaccagccccaagcatccagtatcatgcatcgaacctggactggcgattcgtttcttatatgatattatacatgtttcaatgccattctcccaaatcatcccaccctctccctctcccacagagtccaaaagactgttctatacatctgtgtctctcttgctttctcgcatacagggttatcgttaccatctttctaaattccacatatatgcgttagtatactgtattggtgtttttctttctggcttacttcactctgtataataggctccagtttcatccacctcattagaactgattcaaatgtaatctttttaatggctgagtaatactccattgtgtatatgtaccacagctttcttatccattcatctgctgatggacatccaggttgtttccaagtcctggctattataaacagtgctgcaatgaacattggggtacacgtatctctttcaattctggttttctcagtgtgtatgcccagcagtgggattgctgggtcataaggcagctctatttccagttttttaaggaatctctacactgttctccatagtttagctgtactagtttgcattcccaccaacagtgtaagagggttcccttttctccacaccctctccagcatttattgcttgtagacttttggcttgcagccattctgacgagtgtgaaatggtacctcattgtggtcttgatttgcatttctctgataatgagtgatgttgagcatcttttcatgtgtttgttagccatctgtatgtcttctttggagaaatgtctatttagttctttggcccatttctttttattgagtcgtttatttttctggaattgagctgcaggagttgcttgtatatttttaagattagttgtttgtcagttgcgttatttgttattattttttcccattttgaaggctgtcttttcaccttgcttatagtttcctttgttgtgctgaagcttttaagtttaattaggtcccatttgtttatttttgcttttatttccagtattctgggaggtggatcatagaggatcctgctgtgatgtatgtcggagagtgttttgcctatgttctcctctaggagttttatagtttctggtcttatgtttagatctttaatccattttgagtttatttttgtgtatggcgttagaatgtgttctagtttcattcttttacaagtggttgaccagttttcccagcaccacttgttaaagagatttgtctttaatccattgtatattcttgcctcctttgtcaaaaataaggtgtctataggtgcgtggatttacctctgagctttctattttgttccattgagttttttaaccataaaattttcaaaaatgatgcattgtgaaattttgagtgaagactttttcagtgaattttatgcagattctttctttggctgtccaagcgacatatatactagtgtcttagaagatgacagttcttcggaatatagttctgatacagacagtatgaatattaaaccaataaaaagacaaaaaaccttagtgattgattctgatatggaaagtgaaaatgaaactcacagtgatggagaatgctattttggttctagaaaactttatagctgtgtcagtgtaaagtaactattggatgtaataaccaacaaagtgttaggaaaatactaaggttaatttttggtaataactttttcaagtcggttgcttctcaaacaaacttgtatcaccaacagaatgaaaaaccatataaaaagtataaggctttaaaatggactgatataaccagtggtgacatgaaaaagtttcttagattaataattttgatgggacaaataaagccaccctggaaagaatattggtcgactgattccttatttgatatttgaaagatttatgatgagaaggtttgaacaaataatgacattactttaatggtaactcagaaactctacttcctggagacagaatttcaacagtctaacctcttttggattattttctaccaaaatttcaatcaatatatatatacccaaataagagctatcacttgatgaggcagtgataaagtggagaggatcaaaaaacctataatcctggaaaagttacaaaacatggaattttggtcaggaagtttagtgaaagtgaaaactggatatatatacaaccttgagattcacacaggtataagaaagaaactaggaaacagtattattggtcctacaaccttatcttggttcttggcactatatttaccaagacaattattatattacaacagtgtatccatctgaaatattgttgaaaactaaaaccagagtctgtgggactaaaagagagaatcatgtttctacaaaccaattgaaggagaaatctaaaaatctacagagaagagaaatgacatttttacagaaggcagaagtgattgttcttatatggaaagacgaggctagtctgcatggtgacagctatccatgatacttccatagcatctataagaacggaagacaggaggactggccatcacataactaagcccacttgtatattacagtttaataaatatatgaaagaagttgactgatctgatcaatacccggcaaactacaatatcttctggaaaactcaaaaatggtataaaaaagtgggtttctatttgagtaattgtggtttattcaatgcatttaaaatttactgtagccttaatgcacagaataaaatgacagtttttgttagcagtaactagagaatgggtaactgaccattctggtgactgtagtcccacacctagtctctcttgtggcatttctaaaaaaaactcctgacaaagacctaccttgtcaactaccagatgaaatcaatgaacatatcctagaggaaatagtacttataggactaaaagaacaaaatgctgccagaaagtttagagtctgttctgccagggaaaagtgcagtgcaacacagtatatttgtaatagatgttctattctcctgcacagaagtgcctgctatactgcctgtcacactctaaagaaatattagaatgctttagtaagacatgtagagtttcaaataactacattaagtgcaaaagaagttgctgatatttactcaaacacaggtgtttcattattatttatataacaaatcattggccacaggcattagtttctgcaaaaatcccctgatcaataatgtgttaagatcaaagtatgtgaaaagttcattgatatgattttagattctagattgcaactaacctttaagaaacttgtcaagttttggtgtagtatcaaagaaaaatattctcagttatctggaaagactgttaaaacccttcttttccaattacattgagttcagatgttcctcatatgtacatttcaaccaaaacaatgtattatgaccaattcagctagaagcacatgtgagaattcaattgtcttgttataccaaacattaaattaaaagatgcttgctccttggaagaaaagtattgacaaacctagacaacatattaaaaagcagagacattactatgcctacaaaggtctgtatagtcaaagctatggtttttccagtagtcatgtacagatgtgagaactggacaataaaaaaggctgagcactgaagaactgatgtctttgaactgtagtgctggaggagactcttgagagatcaaaccagtaaatcctaaaggaaatcaaccctgaatattcattggaaggactgaagctgaagccccaatactttgaccacctgatgcgaagaactgactcattggaaaagaccctgatgctgggaaagattgaaggcaggaagagaaggggacaacagaggatgagatggttggatggcatcaccgactcaatggatgtgagtttgagaaagctccaggaaatggtgagggacagggaagcttggtgtgttgcagtccatggggtcacaaagaatcagacaggactgagcgactgaacaataccaaacgctgaagagatttcctaacatgtaaagcactgcttccttttaaattttgttttattttggaaaatagtatttattaggtttcttattattcttaaatgaagtaatagaaatttaaaatttctcatacagtaataatcaataaatatagcccaatacatcaaagcttaggggaggtcctcaatgtttttaagaatataaagggatcctgagactaaaaaggtataagatagattaaaaagacatagaatttatgtcaatattagcaccaaggcaacactacattatagccttgccagctgaatgatattcctgactgtttgaagaaatattcatttttctatagttttttattgtttaagaaattaaggaagcatatagaaacctttaaaaggaaactgtcaaattgtttgaacctcttaggatactttcagctctgagtaacagaatatctgacttacctggtttaaataagataatttatctttctgtttcactgaaagactacagatggggcagcctccagagctgctgatgtagaagcacccagattctttccatttttctgctctcccatcttcagactggcagcaagatggctgcagcaggtccaagtacgagtcagacaaagtagtgtacgagggaggagagggatgttttccctgtgactcctcctcaggaacaaggagtcagaatctgcccagtggacttcttctcgggcctcaatggccagcattgggtcacatgccagtccctaaacttgtcactgccagggtccatgggcttactgtgactggtgtaaaataaccagttgggggacatgaatataaggaagttatccacaatgacttagttattaaaaacaataacaagaaaatgcttttgtacttactcagttaactggaaatgttcacaggtgcccagtaagacaggcagtgtgaacccgtggagaggatgctaagcctgagaatcaggagccctggggcctggtcccacagctggcactgttgaggtatgggtccatctctgtcaggaccctgctccctctgtaacatgagggcttaaactagagcactggttctgatgacttctgattcattggtttctttattcactcactccttcattcaatggcttttttcacagaactagaacaaaaagttttttaaatttgtgtggaagcacaaaagaccccaaatagttgaaagcaatcctgataaagaaaaatggagctggaagaatcaggcttcctgattgcagactatattacaaagctggttatggtactagcataaaaacagaaatatagatcaatgaaacaggatagaaagcctggaaataaacccacacacacctctggccaattaatctgtggcacaggaggcaagaatatacaatggaggaaagatagtctcttcaataagtggttctgggaaaactggagagctacatgtaagagaatgaaactagaatatttcctaacaccatatacaaaaataaactcaaaatggatcaaagacctagatgtaaggttggacactataaatctagagaaaaacataggctgaaatgtgggacctaattaaacttaaaatcttctctacagcaaaggaaaccataaacaaaaggacagccctcagaatgggagaaaatatttgcaaagaaagcaatgacaaggtattatcctcccaaatatacatcagcttatgcagctctatatcaaaagcaacaacaaccaacccaataaaaaaatgagcagatctaaatagacagttctcctaagaagacatatagtggtccaaacagcacatgaaaaggtgttcaacatcacgagttatcagagacatgcaaatcaaaactacagtgaggtattacctcagaccagtcagaatggccatcattataaggtctaaagcaataggtattggagaaggtgtggagaaaagggaacccttctacactgttagtgggaatgtaaattggtacaatcactatggagaaccagtatggaggttccttaaaaaaataaaaatagtactgccatatgatccagcagtccactcctgggcatatatccggacaaaaccgtgatttgaaaagatacatgcactgaatgttcatagcagcactattcacaataggcaagacatggaagcaaactaaatgtccattgagagaggaaaaaggtgtggggtgtgtgtgcgtgtgtgcgtgtgtgtgtgtatatatatgtgtatatataagaataatactcagccataaaaaaagaatgaaataatgccgtttgcagaacatggatgaacctagagacagaggggcctggtgggctgcagtccatggggtcgctacgagtcggacatgactgagcgacttccctttcacttttcactttcatgcattggggaaggaaatggcaacccactccagtgttcttgcctggagaatcccagggacaggggagcctggtgggctgccgtctatggggtcacacagagtcagacacgactgaagtgacttagcagcagcaaagactgtcatactatagtaagtctgatagagaaagacaaatatatggtatcactcatatgtggaatccaactttttaaaacaagatgcaagtgaacttatttacaacacagaaacagatacacaaaaacaaacctaccgttaccaaaggggagagataattcaggagcttgggattaacatacactcgctactatgtgtaagatagataaccagcaagaacctatgtagaacacagggaatctccaatattctgtgataacctatgtaagaaaaaaatctgtgaaagaatgaatatatgtgtttgtataactgaatcactttgttatacccctgaaagtaacacagcattgtaaatcaactatactccaataaaaattttatttatttgctgtgtcaagtcttagtttcagctcatgggtgcttcatgcagggggcgggaggcgcacggactctgtacttgtggcactggctcagtagttgcagcccatgggctcagttgctgctcagcatatgggatctcagttccccaacgagggctggaacccatgtcccctgcattggaaggcggattctttaccaatgaacaaggagggtagtccctccagtaaagttttaaaaatatatagagtgcttactctattgtggaagtcactgggaaggatacaaatatgcactagaatgttgcccatttaatcacaacagatgttcttcctcctatactacacacactgatagccccaggggtgtaagatccaaattgttttcactcatagaataaattgtttactgccttcggcaaatagcacttgccacagagctcattagccagcagttacatcatgaaagttctctctcatcttattgaagtacaaacgatattcagaagtgaggacatatcctcacaagtatcttctgcagaagataagtctttgtctcagggaagatgctcatgggcctatctgtgattgttgcagttccctcagtatcagaaagagtgtgatgcagagaaacaggctgtgaagagaacacaaagacagccacgagaaatgagaccttttctctgaatacccacaggcaggcttaggttttatttttcagataagatgcttagaaaggctttatttatttaaagcctttatttaaagctgctaaacatttgcagacttttctcatgtgcaaggttggttaatttttcatgttacatgaagtgttaagatagctgggagaatttatcttagagcttaaaatcatgtgatcattacctcaagtaatatttgaattactgtcaggtgaagcagggcttttgcaagttgttttgggatcaataagtagaatatatagggaggaagatttacggtcactgaacagaaaaatctttccagcgattagagctatcaacaatgacatgtaaacatcccattattaaaagtcacaaattctatcactgaaagtcctcaaatagaggctggataaccttctaccagaagtgtagtggagaactttttcacataatctgagtttagctaagattatttggaaggaaggtcatctctaggattctgtaatatcacagccatcagacatcttctgatggctgtactctggtcacagagagtacatgatttatttattcaccgcatttattgagcacttatatgtcactcttctagacactgaagatacagtaaagaacaagaatgacaaggtctctcaaggcactaatgttctagggtaggcagacaagtactgaactaattacaaaacaatttcatattaggatacatgccttgcagaatacaaaccaggatgatgggagagagtggttgggcaaggaagggtcaagggccattttaggttaggctttgagggaaagtctttttgaggaattgaggtttgaactgagacctaaatgcaggggaggcatctgtcctgagaagactggggaagactgttcaaagcggagagaacgtgtgtggaagaccagagcaggaacaagcttggcatacagatggccagtgggcacatggaaagatacacagcatcagcttttattagagacatgcaaatcaaaactacattgagttatcacctcacaccagtcagaatggccatcatcaaaaagtcgacaaatcataaatgctggagagggtgtggagagaagggaaccctcctgtactgttggtggcaatgtaatttggtgcagccagtgtggaggttccttaaaacactgagagttgccatatgatccagcagccccactcctgggcatattatctggagaaaaccacactttgaaaagatacatgcaccccagtgttcactgcagcactatttacagtaaccaagatgtggaaacagccaaatgtccatcaacagatgaataaataaaggtgtgacacatataccatggaccgccgctgctgctgctaagtcgcttcagttgtatccgactctgtgcgaccccagacataaaaaagaatgaaataatgttatctgcagcaacatggatagacctagagattatcatgttaaataagtcagagaaagacatagatcacttgtatgtggaatctaaagaaatgatacaaatgaaattatttacaaaatagaaatatagaaaacaaacttacagttaccacaggggaaagtgggaggtgggataaattaggagtttgggattaacaggtacacacaattatatatagggcttctcaaccggctcagtggtaaggaatctgcctgccagtgcaggagacttgggttcaacccctgggtaaggaagatcccctggagaaggaaatagcaacctgctccagtattcttacctgggaaatcccatggacaagaggaacctggtgggtcgcaaaagagtagaacacaacttagccagtaaacaacaactattatatataaaataaataaggtcttactgtatggcacaggaaactatatattcaatgtctggtaataaaccataatggaaaagaatctgaaaaagaatacgtgtgtgtgtgtgtaaactgaatcactttgctgtacaccataaactaacattgaaaaccaactatacttcagttttttaaaagcatatggattaaaatacagcaaaaatattgcattaaaaaaagaagcaaacaaagtcaagggagacgcacagagggctgtgttttcggatggagtaaggcatagataggggccagatctcaccaaagcttagctgttacttatccagtgagaagcatggggtgtagggggtctgggggatattttcagtgagtggcatgctctgatgctgtatctaaaaggtgactacgggtgctttctggagggtaaattgtaggggccagagatgtaagcaaagaggggaacaggaggaaactcaagagaagtgtggtctcacagaagccaaaagaagaaactatttcagaaaggaaagagtgggcagcagtcttgaatagggaaaaattattgaatagggaaaaattatcagggaggtactgatggccttgatgagcaattgtttatgggtggtagctttgcaagccctcttcagtgaatttaggaaacattgggaagcgagtaagagaacacagggagaagaaaccattctttcaaaaatgcgcggaggggtgttgagacgtaggactgcctttggaggatatggagtcaaggcctcatttctaaaataagagctactacagcagctgctccatgtgctgacagatgggggtcagcagagaggcagactctggggatgctggtagttaagtgcagaaggatcctcaaaagggggactgtgaactgttttgccttgttattgaagttgaaaatggcattacctttattgattagtttgtagtttttggaatgttcttatattaagttgaaccatatgaagttaccagtatgcatacattttgacctacagaaacatctgtggcaatataattctacctgaaagaatttggattttccaccttaacttagacaatttctctcataggactttataagtttatatatattttaaaattttatttaattgaaggataattgctttaagaattttgttgttttctgtcaaacctcaacatgaatcagtcataggtatacatatatcccctccctttgaacctccctcccatctccctccccatcccacgcctctaggttgagtttcctgaaccatacagcaaattccctttggctgtctattttacatatggtaatgtaagtttccatgttactctccatacatctcaccctctcctccctcctccccatgtccataagtgtgttctctatgtctgtttctctattgctgccctgcaaataaattcttcagtaccatttttctagattccatatcatgcattagaatacaatatttatctttctctttctgactcagttcactctgtatactaggttctaggttcatccacctcattagaactgactcaaatgcattccttcttatggctgagtgcatgtgtatatgtatcacaacttccttatccattcgtctgtcgatggacagctaggttgcttccatgttctagctactgtaaatagtgctgcagtgaacactgggatacatgtgtctttttcaattttattttcctcagggtatatgtctaggagtgggattactgggtcatatggtggttttattcctagtgttttaaggagtcacataccgtcttgcatagtggctgtatcaatttacattcccaccaacagtgcaggactgttcccttttctccacaccctctccagcattggttgtttgcagactttttgaagttggccattctcactggtgtgaggtgatatctcattgtagtttgatttgcatttctctgataatgagcaatgttgagcatcttttcatgtgtttattagccatctgtacgtcttctttggagaaatgtctgtttatgtcttctgcccactttgtgattctgtgttttgtttttctgttattgagttgtatgagttgcttatatattttggaaattagtcctttgtcagttgtttcatttgctattattttctcccattctgagggttgtattttcaccttgcttatagttcctttgctgggcaaaagctttgaagtttaatcagatcccacttgtttacttttctttttatttctattcctctaggaggtggatcatagaggatcttgctttgatttatgtccccaagtgttctccctatgtttcctttaaaagttttacagtttgtggtcttaaatttaggtctttaatccactttgagtttatgtttgtgtatggttttaggaagtgttcaaatttcattcttttacatgtagtcacaggactggaaaaggtcagttttcattccaatcccaaagaaaggcaatgccaaagaatgctcaaactactgcacaattgcactcatctcacacgctagtaaagtaatgctcaaaattctccaaggcaggcttcagcagtacgtgaaccgtgaacttccagatgttcaagctggatttagaaaaggcagaggaaccagagattaaattaccaacatctgctggatcatcaaaaaagcaagagaatcccagaaaaacatctgtttctgctttattaactatgccaaagcctttgactgtgtggatcacaagaaactgtggaaaattctgaaagagatgggaataccagaccccctgacctgcctcttgagaaacctatatgcaggtcaggaagcaacggttagaactggacatggaacaacagactggttccaaataggaaaaggagtatgtcaaggctgtatattgtcaccctgcttatttaacttctatgcagagtacatcatgagaaacactgggctggaagaagcacaagctggaatcaagattgctgggagaaatgtcagtaacctcagatatgcagatgacaccatccttatggcagaaagtaaagaggaactaaaaagcctcttgatgaaagtgaaagagaagagtgaaaaagttggcttaaagctcaacattcagaaaacgaagatcatggcatctggtcctatcacttcatgggaaatagatggggaaacagtagaaacagtgtcagactttatttttctgggctccaaaatcactgcagatggtgcttgcagccatgaaattaaaagacgcttactccttggaaggaaagtaatgatcaacctagatagcatattaaaaagcagagacattactttgccaacaaaggtccgtctagtcaaagctggtttttccaatggtcatgtatggatgtaagagtgggactgtgaagagagctgagtgctgaagaattgatgcttttgaactgtggtgttggagaagactcttgagagtcccttggactgcaaggagatccaaccagtccattgtaaaggagatcagtcctgggtgttctttggaaggactgatgctaaagctgaagctccaatactttggccacctcatgcgaagagttgactcactggaaaagaccctgatgctgggagagattaggggcaggaggagaaggagatgccagaagattagatggctggatggcatcactgactcgatggacatgagtttgagtgaactctgggagttggtgatggacagggaggcctggcatgctgcgattcatggggttgcaaagagtcagactcgactgagtgactgaactgaactgactgtagttttgtagtataatctgaaatcaggaaggttgattcctccagctccatttttctcaagacagctttggctatttggggtcttttgtgtttccatatgaactgtgaaagttttgttctagttctgtgaaaaaatgtcattggcaatttgataggaatcacattggatccgtagattgcctttggtagtatagtcattttcacaatagattcttctacccaggagcatggaatgtgtctccatctgtttatgtcatcttttatttcttttattagtgtcttagaattttctgggtacagtttttttccctccttaggtaagtttattcctagatatttaattctttttgttgctgtgatgaatgggatttattccttaatttctctttctgatttttcattgttagtatatagaaatgcaagttatttctgtgtattgactttgttttttgtttttttttttataaatttatttatttatttatttttaatttttactttacaaatctgtattggttttggcatagattgacatgaatccaccacaggtgtacatgcgttcccaaacatgaacccccctcccacccccctccccacaacatctctctgggtcatccccgcgcgtcagccccaagcgtgtcatatcctgcatcagacattgactggcatttcgattcttacatgatattatacatgtttcaatgctattctcccaaatcatcacaccctctccctctccctctgagtccaaaagtccgctgtacacatctgtgtctcttttgctgtcctgcatatagggtcatcattgccatcttcctaaattccatatatatgtgttagtatactgtactggtgtttttctttctggctcacttcactctgtataatcggctccagtttcatccatctcatcagaactgattcaaatgtattctttttaatggctgagtaatactccattgtgtatatgtaccacagctttcttatccattcatctactgatggacatctaggttgtttccatgtcctggctattataaacagtgctgcaatgaacattggggtacatgtgtctctttcaattctggtttcctctgagtgtatgcccaacagtgggattgctgggtcataaggcatttctatttgcaattttttaaggaatctccacactgttctccatagtggctgtactagtttgcattcccaccaacagtgtaggagggttcccttctctccacaccctctccagcatttattgcttgcagatttttggatcgcagccattctgactggtgtgaagtggtacctcattgtggttttgatttgcatttctctaataatgagtgatgttgagcatcttttcatgtgtttgttagccatccgtatgtcttctttggagaaatgtctatttagttctttggcccattttttgattgggtcgtttatttttctggaattgagctgcaggagttgcttatatatttttgagattagatgtttgtcagttgcttcatttgctattattttctcccattcggaaggctgtcttttcactttgcttatgttttcctttgttgtgcagaagcttttaattttaattagatcccatttgtttatttttgctttctaacaccgcacacaaagataaactcaaaatggattaaagatctaaatgtaagaccagaaactataaaactcttagaggagaacataggcaaaacactctccgacataaaccacagcaggatcctctatgatccacctcccagaattctgtgtattgactttgtatcctacaactttgctaaattcactgattagctctagtaattttctgacactatatttagggttttctatgtacaatatcatgtcatctgcagtaagagctttacttcttttctgaagaagattcctttttttatttttcttctctgtttgctgcagctaggacttctagaactaagttgaataacagtggtgaaagtggacaccttgtgtcattcctgatcttagggggaatattttcagattttcaccattgaggataatgtttgctgtaggcttattatatatggcctttactattttgaggtaggttccttctatgcccatttttgaaaaattttaatcataaatgggtgctgaattttgtcaaggttttttctgtatctattgagatgatcatatggtttttatctttcaatgtgttaaaatggtatatcacattgattgatttctatatattgaagaatacttgtatccctgttgaattatgtttgctaaaattttattgaggatttttccatcaatgttcatcagtgataatggcctgtagttttctttttttgggttgtctttgtctggttttggtatcagagtgatggtgcctcatagattgagtttggaagtgttccttcctctgcattttttgaaagagttttagaaggataggcattagctcttctctaaatgtatgataaaattctcctgtgaagccatctggtcctggggtttttgtttttggggagatttttgatcacagcttaaatttcagtgcttgtaactgggttgttcataatttctatttcttcctggttcagtcttggaagattgaacttttctaagaatctgtccatttcttccaggttatccattgttttgccatatagttgttcataatagtctcttaatcctttgtatttgtgcattgtctgttgtaacctctcctttttcatttctaattttgttgatttgattcttctctcttttttttgatgagtctggctaagggtttatccattttctttatcttctcaaagaaccagcttttagttttattaatcttttctattgtttctttcctttcttttgcatttatttctgctcagatctttatgatttctttccttctactaatgttggggtttttttgttcttctttttccagttgttttaggtgtagagctaggttgtcaattcaatgtcttttttgcttcatgaggtaggattttattgttataaacttccctcttagaactgcttttgctgcataccataggttttgagttgtgttttcattgtcatttgtttctagaaatctttttatttccctttccatttcttcagttatctattggttatttaaaaacgtgttatttaatatccatgcgtttgtgtttctaactgtttttttcttgtaattgatatctagtctcatagcattgtggtcagagaagatgctcgatacgatttcagtgtcttaaatttactgaggtttcatttgtgacccaagatgtgttctatcctggagaatgattcatgtgcacttgagaaggtatattcttttgcatttggatgtaatgtcctaaagatatcaatgagatacatctcatctaatgtatcatttaaaacttgtgtttccttattaattttctgttttgatgacctgtccattggtgtgagtggcgtgttaaagtatcctactcttattttgttactgttaatttttccttttatgtctgttagcatttttcttgtgtattgaggtgcttctatgttgggtgcatagatatagaactgtacaaaaaagatcttcatgaccaagataatcacgatggtgtgatcactcacctagagccagacatcctggaatgtgaagtcaagtgggccttagaaagcatcactacaaacaaagctagtggaggtgatagaattccagtggagctatttcaaattctgaaagatgatgctgtgaaagtgctacattcagtatgccagcaaatttggaaaactcagcagtggccacaggactggaaaaggtcagttttcattccaatcccaaagaaaggcaatgccaaagaatgctcaaactaccgcacagttgcactcatctcacacactagtaaagtaatgctcaaaattctccaagacaagcttcagcaatacgtgaactgtgaacttccagatgttcaagctggttttagaaaaggcagaggaaccagagattaaattaccaacatctgctggatcatggaaaaagcaagagagttccagaaaaacatctatttctgctttattgactatgtcaaagcctttgactgtgtggatcacaagaaactgtggaaaattctgaaagagatgggaataccagaccacctgacctacctcttgagaaacctgtatgcaggtcaggaggcaacagttagaactggacatggaacaacagactggttccaaatgggaaaaggagtatgtcaaggctgtatattgtcaccctgcttacttaacttctgtgcagagtatctcatgagaaatgctgggctggaagaagcacaagctggaatcaagattgctgggagaaaatatcaataacctcagatatgcagataacatcacccttatggcagaaagtgaagaggaactaaaaagtctcttgatgaaagtgaaagaggagagtgaaaagttggcttaaagctcaacatgcagaaaactaagatcatggcatccagtcccatcacttcatggggaaacagtagaaacagtgtcagactttattttgggggcctccaaaatcactgcagatggtgattgcagccatgaaattaaaagatgcttactccttagaaggaaagttatgaccaacctagatagcatattaaaaagcagagacattactttgccaacaaaggtccgtctagtcaagactgtggtttttccagtggtcacgtatggatgtgagagttggactgtgaagaaagctgagcgctgaagaattgatgcttttgaattgtggtgttggactgcaaggatttccaaccagtccattctaaaggagatcactcctggtgttctttggaaggactgatgctgaagctgaaactccaatactttggccacctcatgtgaagagttgactcattggaaaagactctgatgctgggagggattgggggcaggaagagaagtggatgatagaggatgagatggctggatggcatcactgactcgatggacgtgagtttgagtgaaccccgggagttggtgatcgacagggaggcctgccatgctacaattcatggggtcacaaagagttggacacgactgagcgactgaactgaactaaactgatgtcttcctcttggattgatcccttgatcattatgtagtgtccttccttatctcttgtaatcttctttaaggtctattttgtctgatatgaggattgatactttagctttcttttgcttcccgtttgcatggaatatatttttccatcctctcactttcagtctatatgtgtcttgaagtctgaagtgtgtttgttgtagacagcatatatgtgggtcttgtttctgtatccattcaggtagtccgtgtcttttggttggagcatttaattcgtttacatttaaagtaattgttgatatatatgttcctattgccattttcttaattgcttggggttgattttgtagatctttcttctcttgtgtttcttgactatataagtctctttaacatttgttgtaaagctggtttggtggtactgaattctcttaacttttgatttccccatcaattttgaatgagattcttgctgggtaaagtaatcttggttgtagatttttccctttcagtactttacatatatcctgcaattcccttctggcttgcagggtttctactgaaagatcaactgttaaacatctggggtttcccttgtatgttacttgttgcttttcccttgctgcttttaatattctttctttgtgttggcatgtttctccttgagtttatcctgtatgagactctttgcacttcttgaacttgattgactatttccttttccatgttggggaaattttcagctataatctcttcaaaacttttctcataccctttctttttctcttcttcttgtgggacccctacagtttgaatgttggtgcatttgatattgtcccagaggtctctgagactatcctcagtccttttcattctttttactttattctgctcttcagaagttatttccaccattttatcttccaactcactgatttgttcttctgcttcagatattctgctattgattacttatagagtatttttaatttcaataattgtgttgtttgtctgtgtatgtttattgtttaattcttccaggtctttgttaattgattcttacattctcccttctgttttcaaggtttttttttaaatcatctttactatcattattctgaattctttttcaggtagtttgcctatttcctcctcatttatttggacttctgtgtttctagtttgttccttcttttgtgtggtatttctctgcctgtttgttaatttttttaacttactgtgtttgatgtcttcttttcccaagcatcaaggttgaattcattcttccttttggtttcttccctcctaaggttagtccagtagttttggtaagcttcatatagggtgagatttgtgccgagtttttcttgtgatgagcaaggctgattgaggtggtaatcctgtctgctaatgagtgggtttgtatttttgttttgtttgttgtttagatgaggcgttctgcactggtgctactggtggttcggtgttgctgtggcttttattcaggtggtttcctttgtgtgagttctcgctattttttatttcctagagttagttctctggtagtctagggtcttggaattagtgctctcactccaaagccgcagggtttgatctcaacttcaggccacaacaagtagtagaaactgagaagaaaaggctgtcttctctaacacttagtcatgaaaatcctgattcattcttgcaaaaattttactggatcatcactcacataggatggcaaccagaatggtggggcttctgaacttcacataaggaacaaccgaagtacctggggaatattcagccttccaagatcttagcagctgataagtaaaaggcagagaagggagcccagggcaggaatagcacctgggcatgtgcccaagggggtggctgcatgaggttcctcaaagctgagagcaaaaagtgtatttacattttaaatttggaagcaatctcaaacttgtctcagttcacttcagtctgtcgctcagtcatgtctgactctttgcaaccccatgaatctcagcacgccaggcctctctgtccatcaccaatttccagagttcacccaaactcatgtgcatcgagtcggtgatgccatccatctcatcttctgtcatccccttctcctcctgcccccaattcctcccagcatcaggatcttttccaatgagtcagccctttgcatgaggtggccaaagtattggagtttcagcttcagcatcagtccttccaatgaacacccaggactgatctttaggatggactggttggatctccttgcagtccaaggaactctcaagagtcttctccaacaccacaattcaaaagcatcaattcttcagcgctcagctctcttcacactccaactctcacatccatatgtgaccactggaaaaaccacagcctcgactagacggacctttgttggcaaagtaatgtctctgcttttgaatatgctatctaggttggtcataactttccttccaaagagtaagcgtcttctaatttcatggctgcgatcaccatctgcagtgattttggagcccaaaaaaataaagtctgacacagtttccactgtttccccatctatttcccatgaagtgatgggaccagatcttagttttctgcatgttgagctttaagcctactttttcacccttctctttcactttcatcaagacgattttcagtttctcttcactttctgccataagggtggtgttatctgcatatctgaggttattgatatttctcccagcaatcttgattccagcttgtgcttcttccagcccagcatttctcatgatgtactctgcatagaagttaaataagcagggtgacaatatacagccttgacatactccttttcccatttggaaccagtctgttgttccatgtccagttctaactgttgcctcctgacctgcatacaggtttctcaagaggcaggtcaggtggtctggtattcccatctctttcagaattttccacagtttcctgtgatccacacagtcaaaggctttgacatagtccataaagcagaaatagatgtttttctggaactctcttgcttttttgatgatccagcggatgttggtgatttaatctctggttcctctgccttttctaaaaccagctggaacatctggaagttcacggttcatgtattgttgaagcctggcttggagaattttgagcattacttcactagcatgtgagatgagtgcaattgtgcggtagtttgagcgttctttggcattgcctttctttgggattggaatgaaaactgaccttttccagtcctgtggccattgctgagttttccaaatttgctggcaaattgagtgcagcactttcacagcatcatctttcaggatttgaaatagctccactggaattccatcacctccactagctttgttcgtagtgatgctttctaaggcccacttgacttcacattccaggatgtctggctctaggtgagtgatcacaacatcatgattatctgggtcatgaagatcttttttgtatagttcttctgtgtattcttgccacctcttaatatcttcttcttctgttaggcccataccatttctgtcctttatcgagcccatctttgcatgaaatgttcccttggtatctctaatttttttgaagagatctagattcccattctgttatttttctctatttccttgcattgatcactgaagaaggctttcttatctctgcttgctcttctttggaactctgcattcagatgcttgtatctttccttttcttgtttgttttttttttctcttcttttcacagctatttgtaaggcctcctcagacagccattttgcttttttgcatttcttttccatggggatggtcttgatccctgtgtcctgtagagtgtcacgaacctccatccatagttcatcaggcactctatcagatctagtcccttaaatctatttctcacttccagtgtataatcataagggatttgatttaggtcatatctgaatggtctaatggttttccctactctcttcaatttaagtctgaatttggtaataaggagttcatgatctgaaccacagtcagctcctggtcttctttttgctgactgtatagagcttctccatctttggctgcaaagaatataatcaatctgatttcggtgttgaccatctggtgatgtccatgtatagagtcttctcttgtgttgttggaagagggtgtttgctatgaccagtgcgttctctttgcaaaactctattagtctttgccctgcttcattccatactccaaggccaaatttgcctgttactccaggtgtttcttgacttcctacttttgcattccagtcccctatgatgaaaaggacatcttttttgggtgttacttctaaaatgtcttgtaggtcttcgtagaaccgttgaacttcagcttttttagcattactggttggggcataggccataggcttggattaccgtgatattgaatggtttgtcttggcaatgaacagagatcattctgtcgtttttgagattgcatccaagtactgcatttcgaactcttttgttgaccatgatggctactccatttcttctgagggattcctgtccacagtagtagatataatggtcatctgagttaaattcacccattccagtccattttagttcgctgattcctagaatgtcaacgttcactcttgccatctcctgtttgaccacttccaatttgccttgattcatggacctaacattccagggtgctatgcaatattgctctttacagcattggaccttgcttctatcaccagtcatatccacaactgggtattgtttttgctttggctccatccctttattctttctggagttatttctccactgatctccagtagcatactgggcaattaccgacctggggagttcctctttcagtatcctatcattttgccctttcatactgttcatggggttctcaaggcaagaatactgaagtggtttgccattcccttctccagtggaccacattctgtcagacctctccaccatgacctgtccgtcttgggtggccccacacggcatggtttggtttcactgagttagacaaggctgtgatccatgtaatcagattggctagttttctgtgattatggtttcagtgtgtctgccctctgatgtcctctcacaacacctactgtcttacttggctttcagggacttaatataccagagaaattcatgcatttgaatgtctaaggctgctaaactctttttaaggtagtgaaaaaaagtatatagtgtatacacagacacatatatgctaagtatatagatatattcaataaatatttatatataacatttatgcttatatatattaatatatacatatgttttctttaaacaatgctgaggaaagggctatgtgtatatatatatttcaacactccccacaaagtgatacatacttcaaatgagtccataggacctcatttttacaatgtcccttccactgtgcagacactagaacaaaagtatagttgatgagtatttagggtgctatgctcagtcactccatcatgtccaaccctttgcgatcccatggactgtagcacaccagtctcctctgtccatgggattatcccagcaacaatacctgagtgggttgccatttcctcctccagaggatcttcttgccccagggatccaacccatatctgctgtggctcctgtattgccaggcagattctttaccactctgccacctgggaagccccgtagataatgtatgacacttattctttcttagaattggaacatcttgcttttaaactgtgactttctattttacactgctgtacataagggccttagaggctgttacaagcttgtgagagtgaagtttttggttaaaatgccgttacatcactgccacacatgcatgttatacacaaaaaaaacaaggtttatccaatatttatcatggaaaaactgctgtgctttaaatctatcaatgcttttcacctttttattgtaaataagacctataatagaaagccacacaaaacagaaggtaaatataagctgggtcaagaagcagaaatttcggcagctgaccccaaaaccccttccatgtgttccatcctcatcacaacaccctctctccccttataaggagccatcaacctgacttctacagtattcacttctttgcactttaaaaagagatttctttcattcacatgtgcatccctagactatagtttaatcttgcaccagtagccttttaatcttcagattctccctcctttcttttcctcaacaatctatctgtcgaagaaaccagcttgtagagttcctctcagtctgggtttctgggttttgctgacggcattttcacgatgcagttcagaaatgttcctctgttctttatatttcctgcatgttggcagttggatccagaggcttggtgagatgtacagttgctatggcgagcacaccagaggtagagcactgtgtcatcagaagggcctcagtgtctagctgtttctttacgatttccacaatcactaatgcgctatgcctagatcaactcatcacacttaaaaaaaaatgcatttatttatttggctgtgcctagtcttatttgcagcatgtcggatctagtttcctgaccaaggattgaacccaggccccctgcactgggaagtgtggcgtgtcagtggatcaccaaggaagtcatatgcttgattctttcactttatttgcccactttccagataatgaaatagttccttattatccttgtaaggcaaccatatttttaaaaaactaatcatacactcacagatggaaacatatttgagtcccgttcttttgcaattactattctttttgaagttcaaagggtcccatctctgtccagggagccagtatcgctagagtatcatagtgcatatcactagcccagtaaaagatcaaaattcaaaatttgaagcacagttttctattgaatgcatatcactttcacaccatcgtaaagtcaaaaagtgaagttgaaccattgtaagttggaggctgtctgcactccatttttttttttctgacataaagcgttgcatttaaaagcctgagaataatccaattttctttcacttaaaatacactttgtcttttagatgtctaaaggaactttttcctttaaagtccagttaacttactacatggtattattttgggtcagtattctcaggtatatgctgtgctctttgagtaagcagttttcaatttaaagaaaaaagttttttggcattaccgtttttagtagttttttcagttcccttactttgtttttcttcatcaaggctcctcctgtccatgctgaatcttccttgtctattgcctacatgtgacattttctcttaaatatttttaatgtctttcctcattatttacttctggctgtgctgggcgttcactgctgcaggcttttctccagttgtggcgagcaggggctactatccagttctggtgcgtgggcttctcactgcagtggtttctcttgttgcagagcacgggcctcagtgcatgagggcttcgacagcagtggcgcgggggctcagtgattgcggctcctgggctctagggggcaggctcaacagctgtgccgcacaggcttagcggcatgtggaatcttcccagacaagggatcaaacgcgtgtctcctgcgttggtaggcagattgttatccgctgtgctaccaaggaagcccctctcatttctttttgaattttagagttttatattttaagctcattttgaaatactatgcttcagtgtttcctttttttaaaataaaattttatttttatttattttttaacaccgaaaacatttttaaattggggtatagccaattaacaatgttgtgatagtttcagatgaacagtgaagggactcagcatatacatgtatccattctcccccaaaccctccttctgtccaggctggcacgttgagtagagttccatgtgctatacagtaggtccctgttggttatccaatttaaatatagcagtgtgcacatgacctttccaaagtccctaactatccctccccccagcagccatgaatttgttttctgtgagtctctttcttttaaagtaagttcatttgtatcatttctttttagattccacatataagggatgtctttctccttctctgtctgacttactttactcagtatgacaccctcttgatccatccatgttgctgcagatggccttatttcattctttttaatggctgagtaatattccattgtgtgttcttatatacacatgcacacacatatacatgacttcacccatttctctgttgatggatatttaggttgtttccatgtcttggccattgtaaacagtgctgcagtgaacactggggtgcatgtatcttccgggccacgtttttctctggatatatgcccaggagtgggattgcaggctcatatggtagctctatttttagtttcttaaggaccctccatactgttctccatagtggctgcaccagtttacattcccaccaacagttatgcttcagttttgacctcttccatcaagttgtcttgccagcttgctttcatcagagggatgttattctgctccctgttctttcatttccctagtaacttcttatgagcttggaagttgatacttttctgtggctcattatgcaaaattagcttttctgaatagttagaaggaagtgcagttcaagaaaatctcactaacttgacagaactccctctttggttatcaccgtgaagtgtttaaaaccatggcctcttgctttctgatatttcctgttgtcatttaatcgctaagtcatgtcggctctttgcgactgcatggattgtagcccaccaggctcctctgtccatgggatttcccaggcgagaatacaggagtaggttgccattttctgtatctcttccttttccccacttttatctggacttcttctttccctcatgtctcccagcactgttgtgctcaattttgactccactgtcagcattttctcttgagatggcgccctggcctggaagagggctttggttttagggttcaggagttaatgtggcccagactgcctgagttcctttcagaacccaccaagaaccctggcactcatctggcactgaattgggtaaaacccctcccagtttcagctgctatgctcaaatcagcctgcactcatttccagtgcattcctgttacctattctggggttctcctggtctcaggtctgtcagatgcgctgttgtctccccagccctaacttattccgttcatacaaacactgatatcctgcaggttttgtggctgctggaggtttatctctaccacctgcttatactttgagatctgtggataactcacttggttttgatgtaagtgctacgtgctacctagttgttctgttttacatgaggattcagagattcgaataacaatgttgctgctgtcttttgcccagaactgattaggcacgtctatcttcaaggtctatttttcacccatccccaaagctagtccctaaatgtgacatactgctgcctcatggccatactgtccttgctgctgaagtaggcattgccacaccactgctccttacccagggcttttctcagagaaactatcagagacagatgaaaactgcagggcccagatgtggctgctccctcagtgatgcagagactggggggccggggggaatggggagaacacggtagggcttataaccttgtggtttatctgcatttagctaatcaagcattactacctcagtggcatccgaaaaaagtacaagtagagataggaaaatttaaaaaaaaaaagagagagagactgcctatcagctttacctttgttgcagctaatgcaagatggctaggatttgggtcatgggcttaacagaacaagggagcccttccaatggctacccaaagacctcactccatcatgcaagcaggttatttcaccattctcacctagtggaatttgatgactactaatacaaatgacaattgtatgtttccattttctccctttctggaatccttgcattttcctttgcctccagtgtacattgagagcagacaggccatcttttaacttataggtcactaggtcgcaagcagccttgtctggacttgataaggagagctgcacaaaacccagatatcctggactctgagtgggatgcagtgatgaatggaggagggagctggttctacttatagcaagaggaatgatgagaggggacagactgtgacagataacataaattagattgctcagtatccatttgaattttcttgtcctacatgcagaggttgaaaaaaaaaaacaaaaaacaaaaaaaaaaaacatctcagatacccttgcaattgaggttcaaaatgtgatttagattctaatcaccacttaaactcacaggagtctgatctggaatagagtcatatgagaagaagcaatatgtagggtatttattttacagactgtggcaaaggcaacatgctcttgagctggccaccgcagtggcagcttcctgattttagctgaagtggctggtttgcggccagcagacgctgggattccttcctgatctaggcagatgcagcatccacactgaggatttgccatgtggcttggggagtcattcctggcagcctggtctacagcctgtctctttagccctccagggattctgaaagccactgaaaatcctatgaaaatcactttttgtttagtctacctagagtggattatgttttgcactactaaactctgacccacatagcctgccaatgcacaaagcagaggcagctccagctctcttggtttacccaggagcaagcacccaggtgcctaggtaaccccatttctggatgcttctagcaacaaagggggtaattcttgcagttgggcacgtgtttttgctgccctaagagacagaagggacagcctgccacaagcacatacatgtgtggcgatggtggcacttttgatgttcaggccatagctgttggtgtttttattggtatgggagaatgatactcttctacattctctctgagaactgtaaaattagaatattgtgttttttttaattaatttttattagactacagttgctttacaacattgcgttagtctcgtgtacagcaaagtgaatcagctgtgtgtatacatctagccccctttttctttcttcccatttaggtcatcacagagcattgaatagagtcctctgagctatacagtaggctctgattagttctctatcttatagatagtatcaacggtgtatatatgtcaatcccaatctcccaattcatcccatccgcaccctgccccctgatgtccatatgtttgttctctaaatctgtgtctctatttctgcttggcaaataagattgctttgtgtttttgaaaaggacttttggctttagacaaacaaagaaagatgattttggggtaaaatgcttccaattcaggacacaatttataaattgtagaatttcccgcccattttgtattatatgttatctgtcctagaataaaaagaaaggtagttttccctctgtttcaagtgtgtctatgattacaaacaccaggggcacacccagtgataagtggctgcacggttttgtagtctttgtagacttgaacattttcggctgttgtttaatgacagcactcttggctttgagctactggcaacagggactggttaccgtgcgcagcactgggtcttctctgccagtaaaggctgcacatcaaacccataacagctgttctcaaagggcaaagaatacacctgcccctcccagagtcatctttcctccctgcctgtaagcaggcccttggggcaactggtcatttctgagacctttccacggtgacctttgggaacagtctgtcccttctgtccttaaatgtcctagaacagcagcagcactgggctgtcactcctggaaacgcagaccagtgggctgcaataatggccccgtgtctcatctcccacatggaagtgatgacccctacttatatccttcatgcctatttgattactttcatcttttcctgaggatttagagtgctgtcattgagtttgccacatcacaccattacatcccctgtaaactgcacctttctttcctaacactttttactgtagaacctcttcagatttatagaattctgtagagttcctacatacccaagaattcctagtaccccagtattccctattagtgatgtcttccatcaggatggtatgtgctgctgtcctatgcttagttgctcagttgtgtccgactctttgtgaccccatggactgtagcccatcaggctcctctgtccaaggggattctccaggcaagaatactggagtgggttgccatgccctccccagggggtcttcctaacccagggatcgaacccaggtctcccgcattgcaggcagattctttaccttccgagccaccagtgaagcccaagaatactggagtgggtagcataccccttctccaggggatcttcccgacccaggaatcaacctggggtctgctgcattgcaggtggattctttacagctgagctaccaggggagcccctaggatggtatattacttgcaaatagtgaactgatgttgacagttattactacctgaaatccacacttcactgtaacccaaagtcctttttctgtttcaagacttcatccaggatacactgtattaggtgtcatttccccttagggtccttttggctgtgacaatagactgtccttgtttcggatgactttgacagttttgaagagcatttaacctgcatcttttcagagttatccctcactttagtaacagtaagaatcagagaaaacttatttttggaaggagttatcagtaggatcaagagccctcaaaccaaatcctagctgtcctgagttttcagaaagctcatgtcgttttatctctatcaatgtccctctgtgatggaaggctgggtgcaggcccggtggatattcagacagctgctgcaggagctggaagagttggtggagtgaggggttccacaacctggctgatcattacagtcagtggagaatttgtaaagcacagatgtccaggccttatcccaggtgtactgaatcagaatctccagccatagggtctggaatcctatatttttcttattgcttaaaaactaataatcctgctaattatgtttttaatatataaaattataaaaaacatgggccataatcctatgaatatacatagaagtataaatgtagaaaatgtaaagaggaaccaaaagtctaaaatgaaaaatgaaagcctccctataatctatataacttaaggacgctttggtttctctctgtttttagtgctgtcttttgtttgcttgagatttatatttctgcaagcttccaaggtattctggtgtaaccagaaatttggaacccactactgatgagattcacagttcacctggccgggggtggggtggggagagaatgttcctttcagagctggcatccattataaaatcacagaggcctaccctacccctttccctccctgaacaagtcagccctaaagccatcagttggggcagagcaaggggaggcagcctgtgacagcctgtcggagcccagctggattgacaagggcatcctacagaggacagatcccgtatggggcattcaggcctgagtgcatgaggctggcatccacgggtaggggcaggctgaacagggagcagtgggtgtgagtatccatgtggaggggtggcctggggcccaaggggataaagaaggcattcacaagggtggtgtctctgagaagggaatcagtgcctgaatagagggcgtctggcttccctagtggctcacatggtgaagagtctgcctgcaatgcgggagacccgggtttgattcctgggtcaggaagatcccctggagaaggaaatggcaacctactccaatattcttgcctgggaaatcccatggacagaagagcctggcggcctacagtccatagggttgcaaagagtctgacacgactgagcagctaatactttgtaggggaaggggtggatgcactggtgacgggaggctggttatttatgtgggaatgaattaaagaagtataataagggtaatgggagccatgtttctcactgttggacaagggggtcactaatatgcaaagagagaaggacagaataaacccagaaagaaagtgagctccccatggactatacagtccatggaattctccaggccagaatactggagtgggtagcctttcccttctccaggggatcttcccaacccagggattgaaccaagtctcccacattgcaggcagattctttaccagctgagccacaagggaagcccaagaatactggagtgggtagcctatcccttctccaggggatcttgctgacccaggaatcgaactggggtctcctgcattgcaggcagattctttaccaactgagctgtgaaggaagccccagagtatcctacagttagagataccagtatgaacttatggatttaaagatataaatctatatttatattatacttacaaatatatacatttatattatagagtatgtggcatatatttgtagatacatatgtgtatgtttgcatggttgtatatatttacatttatgaatatattaaagtgtatatatatcctttgagtgggcttgggagcaatgatattccattggtagtaggtacacccaatgcccactccttggctataataccattttccactaaaaagaaccagaggtccttggagaaatgactgatttcagggctggggcaggcagagaacatgatgaatttagaacatcttgtgccagaaatcaaagacacacttaaagaatgatgaggacatgtccggagaacacaggagccaggctgaaaggactcaggtggaatttgaaacagtttgaacattaaaacaaataatgacagtaacacactgtatcccatcccgtaagatagaaatccaagacctcatactgagaacaataaatgaaactttgaaggaatatttacatagtttcaaagcatctcccacaaaatattcattaattaaaagagaggaaaaaaaagagcagcctcacaatggaaaatcccagaagattctactttaatcacgggactaaaataaagatgactagtaatggtatgaattgaaattgtgtgtcacacaacagagtgcactcaaaagcacccaccatcacttctatgatattcctgcctgtatgcattatgtaccaggagccaacaaacatttattcttgtcacagttcctggggtcaggaatctgagagtggcttcattgggtgactctggttttaggtctgttatagggttaaagtccagctgtcgagcaatagacatcttggggtttaaccagggctgaagaatccacttccatgttcactcacatggttggcaggcctcagtttctcctggctgttgcctagacgcttcagttccttgccatctgggcctatatgtagggctgctcacaacatgacgtttgcttgccccagatcaagtgatccaagaaatcacttctgtaacctaaccactttggctctatgctcttgcttacaaagacctactctcataccatgtgaaaggagactcatgagggtttgaataacaggcatgcgtgtgctaggttctttcagtcatgtctgatttttagtgactctatggactgtagcctgccaggctcctctctccatgggattctccagacaagaatactggagtgggttgccatgccctcctccaggggaccttcctgaacgagggatcaaacccacgtctcttatgtctcctgcactggcaggcaggttttttactactagtgccacctggaaaatccttgaataataggaagtggggccaatttgaaggctggctatgaaactgccaaacataatcaagacaaactcagatatggagctgttctacaaaatcactgatctatattcttcagtgtcaaggtcatgaaaatcaaggaagagactggggaactgtccagaatgaaggagactagagagacatgactaccaactgcaatgtgaaatgtggactagttccctttgagattaaggacattggaggacactagcaaaagttgtcggagaaggcaatggcaccccactccaacactcttgcttggaaaatcccatggacagaggagcctggtgggctgcagtccatggggtcgcgaagagtcagacacaactgagcgacttcactttcacttttcactttcatgcattggagaaggaatggcaacccaccccagtattcttgcctggagaatcccagggatgggggagcctggtgggcagccgtctatggggtcgcacagagtcagacacgactgaagcgacttagcagcagcagcagcagcaaaagttttcatggggttgaaggattagctggcagcaatggattaacgctaatttcctgattttactagatagtactactattttatagaataatgttatttatagaaaacacccattcaaacgttagggaaagataggaaagcaggtttgtaacttactctcaaaaggtttggggcaggagggaaatattctttattcttttactgcaactctgagagaagatattaagaagaggtggcaagaatacacagaagaattgtacaaaaaagatcttcatgacccagataatcacgatggtgtgatcactcacctagagccagacatcctggaatgtgaagtcaagtgggccttagaaagcatcactacaaacaaagctagtggaggtgatagaattccagtggagctatttcaaatcctgaaagatgatgctgtgaaagtgctgcactcaatatgccaacaaatttggaaaatgcagcaatggccacaggactggaaaaggtcatttttcattccaatcccaaagaaaggcaatgccaaagaatgctcaaactaccacacaattgttctcatctcacacactagtaactgttgctattgctaagtcacttcagtcatgtccaactctgtgcgaccccatagacagcagcccaccaggctcccccgtccctgggattctccagacaagaacactggagtgggttgccatttccttctccaatgcaggaaagtgaaaagtgaaagtgaagtcgctcagtcgtgtccgaccctcagcgaccccatggactgcagccttccaggctactccgtccatgggattttcctggcaagagtactggagtgggttgccattgccttctccgcacactagtaaagtaatgctcaaaattctccaagccaggcttcagtaatacatgaaccatgaacttccagatgttcaagctggttttagaaaaggcagaggaaccagagatcaaattgccaacatccgctggatcattgaaaaagcaagagagttccagaaaaacatctatttctgctttatggactatgtcaaagcctttgactgtgtggatcacaagaaactggaaaattctgaaagagaagggaatacgagaccacctgacctgccttttgagaaacctatatgcagatcagggagcaacagttagaactggacatggaacaacagactggttccaaataggaaaaggagtatgtcaaggctatatattgtcaccctgattatttaacttatatgcagagtacatcaagaaatgctgagctagaggaagcacaagctggaatcaagattgccaggagaaaaatcaataacctcagatatgccgatgacaccacccttatggcagaaagtgaagaggaactcaaaagcctcttgatgaaagtgaaagaggagagtgaaaagttggcttaaagctcaacattcagaaaacaaagatcatggcatctggtcccatcacttcatgggaaatagatggggaaacagtggaaacagtgtcagactttatttttggggggctccaaaatcactgcagatggtgactgcagccatgaaattaaaagacgcttactccttggcacaaaagttatgatcaacctaaacagcatattcaaaagcagagacattagtttgccaacaaaggtccatctagtcaaggctatggtttttcctgtggttatgtatggatgtgagagttggactataaagaaagttgagtgccgaagaattgacgcttttgaactgtggtgttggagaagactcttgcgagtcccttggactgcaaggagatacaaccagtccattctaaaggatcagtcctgggtatactttggaaggactgattctgaagctgaaactccagtactttggccacctcatgcgaagagctgactcattggaaaagagtctgatgctgggagggattgggggcaggaggagaaggggacgacagaggatgagatggctgaatggcatcaccgactcgatggacgtgagtttgggtgaactctgggcattggtgatggacagggaggcctggcatgctgcgattcatggggttacagagtcggacacgactgagcaactgaactgaactgtacttggatctataaataacttttctctcttgttgatgtggcttttaggcttaggcataaaatcctaactttggtgagactgcagtgcttttctggctggcctgtcactgacatgcctcctgacacattgaaggcagagaagtgttagagaaacacagtaagttttgccgtcctcatactccatacccaatggcacctactcctctcctatcaaaatctacaaagacctagactatctaaggagctgatattcctactgctgagcctttgaagggccttatgtacagacagtgctgcctgctccctcggtctgcaaggttgtacattttatgttccatcagcacagattatattcttcagttccttctcatcacacctcttgcttcttctaatggtcggttgtttagggactggcattattgtcatctttgctttaatgcattttaacctgcttgtgaaatttctaacatcccttccagtgtccctgctggaggacagtccagtcatccattataacagcagctgctaaaagggtttggaatgtgtttggatgtgaaggaaccagatttgtacactattctgtatcatgttcatgccagctctcaatggcataacaaggctgaaattttaattggactttggggaagtcatgcattaggttcatagcattttgtgtgtgtaagatagagttgctgtcaagaaatatttttttctttttaatttttaccttgatgatgtttagaatgttagcagcagctaataacatggtttcatgtcctaatgcatagataagtgcttggccttcaagcctgtggccttaactttgtgatttcatgtatgtctacccaaagatacatgaaagtgcccttggggtcagtcactcagtcaactccttgtgaccccgtggattgtaacctgccagttcctgtgtccatggaattctccagggtagaatactggagtaggtagccattcccttctccaggggatcttcccaacccagggatcgaaccaaggtctcctgcattgcaggcagattctttaccatctgagcaccaaggaagcctgtggaggggaaggcagcaaatgtgcttacccatatctccaacactgaacctggcttgacagggtatttaaaagtgaattacataggcagagcctgcctcccaggatatagggacatcttttgccttttgttggagaaggcagtggcagcccactccagtactcttgcctggaaaatcccatggacagaggagcctggtgggctgcagtccatggggttgcaaagagtcagacacgactgagcgacttcactttcccttttcactttcatgcattggagaaggaaatggcaacccactccagtgttcttgcctggagaatcccagggatgggggagcatagtgggctgccatctatggggtctcacggagtcggacacaactgaagcgacttagcagcagtttgccttttgttttattacaagtggtttgaaaattgatgcattcctcttgattttagcccatttagtgaatttgttaatctaactcattgttatgggtttcccaggtggcattggtggtaaagaatccgcctgccaatgcaggagacttaagagatgcgggctcgatccctggctcaggaagatcccctggaggatggcatggcaacccactccagtattcttgcctggagaatcccacagacagaggagcctggcaggctacagtctaaaggctcacaaagagtcggacactactgaagtgacttagcatgcaataagtagcataaatgggtgatttatgggcgattagaacacacccctcctgcctcactcttgtttcttgagctttgataattttgtgccactagaaagcaccacaacttcccctgagggaagtggacagtgtccttgataggacagaaagcccctgttgtctttatgggttatctaaggaaaggaacttaaaatttgtcagacttctgttggggaatcctacctccctatcatccagagtaaaccaaatcatactgcattcagattcttaatttagaaattcaagataaaatcatcttccttaaccagacatcattcatgcattcaggaaataattattgaatgtttactatatgtcagatactcctctgggcattggggataaaggtaaacaagacaaaattcacattcttgtaagtatataaacaataaaagatcagatagtgataagtgttatgcagagacattagggcaatgtgtttagaaagagatactcagaattcccaagggaaaaaaattagcaggagtttctagaaaagtccagttgaactttctataataatggaaatgttctatactgtactgtccagtgcagtagccactagctgcatgtggttttaaggaacttgaaatgtggttattgctactgaggaattttaaattgtatttaatataagtataaatggccacatgtggctaatggctaccatactggacaagcatggtttgagagctatgttttggacttaggtgtctatacttgtacacagaatgggtgtaatatatagcagtatcttgatttttttttaactcaaagaaccaaacacattctcactgtatcatctttgtagaatagattcatgactagacttcagtgtttgagtacttagttggaaagatacaagatcaagcagtctaataagggggcttaagagaagcaatggatggtcacaaaaagatgttagaatggtacccacaaactgaaggctaaaggctctgagcagtattaaaagcttgaaagagagaaaatcactgcatggcaatgtatgccataggcccctctctgccagaaaggtgataagcgatgttatttcctaataaaaattacaaggctggcagaaagagagttagaataagaaaggattcgtgctttcttattcttttaagacatttgctgaggtttttgtgccactgagaccagagtatctcattaactttgatccttccctgaggaatgacctaatggccattgtctacaaataaagctgttggacaaggtcttacataagggtctcttcagctgaaatattcttttaattttgtcactcagtcatgaacaacagagaaccatttggtgatgtgaaaacagcaacttgggaaaacttggtgttcgtggtagcaacaggggggaagtatatcttgtgcttagaaccattactaaagtttctggaaaagccatatggatttggtgtgtgacaaaatgctcattgtagaaaaagtataagattttagcatattggaaaagtatcacaagtagaagattattgaaattattcaagtattgtctaattctttgaccaaccacaaatcatcatgacattactaaatccagaaaacatttcaatctgaccagttaaatattttcttgtcaaataaacaaatgcttcagttcagttcagtcactgagtcatgtccgactctttgcaaccccatgaaccgcagcacaccaggcctccctatccatcaccaactgcaggagtctacccaaacccatgtccattgagttggtgatgtcatccaaccatctcatcctctgtctccccttctcctcctgccctcaatctttcccagcatcagggtcttctcagatgagtcagttcttcgcatcaggtggccaaaggattggtaggaatggcaccccactccagtactcttgcctggaaaatcccatggacggaggagcctggtgggctgcagtccatcgggttgcgaagagtcggacacgactgagcgacttcactttcccttttcacattcctgcattggagaaggcaatggcaacccactccagtgttcttgcctggagaatcccagggatggtggagcctggtgggctgccgtctgtggggtcgcatagagtcggacacgactgaagtgacttagcagcaatatgtttaagttagaaaagtcatcaataggaactttgaaagggactcaaacattagttacgcatccaagtataagatacagatattttagtacatggtcacatcataagcaaacaagtaagagcatatttaagaaaaggcataaggacttccctggtggtccagtggctaagactccacattcccaatgtagggagcccatgttcgatccctagtcagggaactagatcccacatggcacaatgaaaattgaagatcctgtgtgttgcaactaaggcccagagcagccaaataaaaatatttattttagaaagaaagaagatagagcataaaagggcaccaataaggatcttctttaaaaacatgtagtatgtctaatgaatttctgcctgaagtgtttctcgtgtgtgtgtgcgtgcacgcgtgtgcacgtttgtgctcagttgtgtctgactctttactaccccatggaccatagcccaccaggctcctctgtccttggagttttccaggcaagaccactggaatgtgttgccatttcctacttcaggggatcttcccaacccaggtatcaaacccatgtctcctgcattgacaggtggatactttacctctgcgaagcagttaaggctaagtgtcataatcttcagtgcactgagtggattcagcagtgcataaatgaactagttaaggctgcagcatttcttgaggggagataaagagaccccctgaaaatgggccttggttttgtagataagagaaatgagcctgcaaatttgtaataatatttcatctccaaaaagactactaggatttgaagaggactgtggggagaagccaaaaacaataattctgttaatggacaggagagaaatgtggaacctttttttccactatgaaaacacaataataagccatctctctctactagaatgaataagaaaatagtctcataatttccacatcacttagtattgaaatactggtcttttcactcataaacaaaggccatttaagctaataaaaagactaatgcacatagtgttggaagtgttattgggattacctccatccctttccagtgccctcagagacaaggtgcccgccagcacccccttgtgagggtcttggatgtttttatgtttcctccttgccttgcataagccaacagggaaatcaagtgtctcctcattaggaaatggaatactgctacttatatctttacagttgtgttaaatgatgcctgctcaatgtagggctggtggtaggacaacattaaagaagaaattcctactttaaaatgttcagtgctgttgactgactgcaaataagatttcatttagcattttagattacagtttggtctcagaccaaagattctcaacctttcagttcagttgctcagtcatgtccgactctttgcgaccacatgaaccacagcatgccaggcctccctgtccatcaccaactcccagagttcacccaaactcatgcccattgagtcaatgataccatctaaccatctcatcctctgtcgtccccttcttgtcctgccttcaatctttcccaacatcagggtctttttaaatgagtcagctctttgcatcaggtggccaaaatactggagtttcagctttaatatcggtccttccagtgaacacccaggaccaatttcccttaggatggactggttggatctccttgcagtccaagggactctcaagagtcttcaacaccacaattcaaaagcatcaattcttccatgctcagttttcttcacagtccaactctcaaatccgtacatgaccgctggaaaaacgatagccttgactagatggacctttgttgacaaagtaatgtctctgcttttcaatatgctgtctaggttggtcataacttttcttccaaggagtaagcgtcttttaatttcatggctgcagtcaccagctgcagtgttcttggagcccaagatataatgcgtagcaaaatcacctagagggcctgttactgaacacctttgctgggcctcatccctggagtgtctgactcagcaggctggaattgggcctgagaatttgtatttctagcacattcccaggtggcacagatgccgctggtctggtgaccatacctgaagaaccactgccttaagaccaggaagagctcattgggatagatttcttgatgtgcgagtacaatgaggagacaaagggttttttgtaaatccctttcttccggttcctctttttgatcgtgccaaaagtattgggtatgtcttaagctcctttctggcccagatccgataataaacattgtaacattacaattccattgtttaatatagactttgaatcttgtctgaatgaaaaagacaaaagggctggttgatgcattttctgactccctacattgttttgaaaacacactgaggtagtgctggagccctaagcccacctgccactcagtctgataccattacaagctgaggttggacatttcatatttcccgtctttgtaatgcgtttttcattattccacacggcagtgatactgtttactgagaagtagagtgaggactcctaatacgaaaccctaggcactgggtggaagcggctgttccgtggccccgttcatggttggcccggctctgctgctctccctccagcctgcccacctgggtactcggctgagcttccgaaggacaaaacaatgacctggattctccctttctcacttgcattaaggtttggtacctctttggtgtgatgtcagccagaaagctcttggttaatgaacacagggttccaggcaaaggtctggcttcaaagcacagaaaccgttagttccatttttaaattgacttcaagtgtctcatctgtaaaatggaggatgtagacgctagacaggtgtggatggtgtggtacaggaggtgttgctgtggctggcactttgatggcaatctctaaaaccactaatggagcccctttttaagggttcaggttgaaatggcttgaccttaaatattatcaactgttaaaagattttagcgtcttgttttgaattgtgtaaatgaccgaggagttgctctgtttttgtgagggaaaattaagaagagttcacatattaatcatcccagttattcctcatgttgaccacagatatttgaataactaacagaaaagcattgctgccaagctggcattcaaactgagattcagacatctcaagattctttcaccttggccttttttttttttttaagtaaatcactatatcctttggtttttattttcttacatgaggatatagtctaagattatgtgaaattattatagtgcttttgaaaaataggagtatttcataaaccatttactaaatttgagtttcattatattacccctgaggtcaaacagttgaggctgacttccagaaagcgcattccgccttgagttatattttatttcaaagccattgttaaagcagagtctccagccatggcaggatgtattagttttctaaagggaaagtacagggagataccatgacttttttagaagagtaagaaacagaataaagtcagtcagttatgtctgactgttcgggaccccatgaactgtagcccgccaggttcctctgtccgtgggattttccaggcaagaatactggagtgggttgctatttccttctccaagggatcttcttgacccaggtattgaacctgggtctcacacactgcaggcagactctttaccatctgagccaccagggaagctctaagaaagaaagacctgagtttaactgtaatgcatcctgtgagaatggagggctttactgtacaactcttgtctccgactgtgtgtcactcactgcacctgcctagtgtcccacaaaatgctgacattgcaagtacagacctagctgcgtctgaggttcatttctgcttctgactgcagggaatcccgcctctctgccccagctccaagggtcccagctaactagacagccaggcatccaggatgcttttctgttcccctgataagatgtgcatgagcatggttgaggtcccaactcagcagaacagattctccaaatgttttctctgttatcttagtaccctgaagtggagaactatcccttccccctgcagggcaagccctgggctaagtggtggagtgtgttgtcattgttcccccccccccgcccccccgtccctcacaaggtctggcttagcatcctcgcctacccgtggcctcatcttgaccttccatgcacactcactctgcagcacgcctgatttggtggttgactcattcctagagggcctccccccagctacagacgtagtaactagcaggtgttcgtactgcgatgcactgaggatgtgtcaggcacccagctacactttgacaaggtcttttttggagacagtgccttccccaagggtggatggaaatttcaagcactgtggcaggctaggtggggcaggaatagagggatacttttgaattgagaagttcttgggtgcttttcaaatcaccccagaaaggaagggagctgcctattacagatttccaacttttcatccaaaaaagcctaaaaccagatgtgtttcagaattcagaatttggggggtgttagcgaccttataagaacatcccctgcatgatctgaggctgacaactaaacacactaatattcacatgaaatgggatgactgttgcaagttgtaccaccagatgagtttcaactgggtcaggttttgctggcaaagtcatgtttggttattacagctttgaggatttcagaattgcagataaggaattatgctccggtaattgttaacaatggtttactattactgagcactaatagtgtgccaggcactaggctaagggagaactttactgatataaactcatttactcctgccatcaatgtgtgaggtagaaatcattagtatcccctacttcactgattcctcctaagtcttctgtaaaaaaaaaaaaaaaacaaaaaactactgggtacataccagataccaggaaaagggagcaaaaaagtctgtccagcccccacttaaagttacttgagtcctgggagagaggcagatggccacacagacatgggtgtgctcagagctgcaggaacagaggagggggcccacccagcctacacacggggaaagctccctgggtaggcactatccttgctgtcctccgtgcaggggaggaagccagccgagaggtcactaccactgcttgttactaagttcactcgttcaaggtcagtgactttcaagttctcttgaggtcacacaggtccctgtggtcctttattttctttaatgttgctctgtcctcccttctcttctacagaacacctatctctgctttctcccaagacaacatctatgaggttcagcctccaaaagtagacaaaaagtctacagagatcttccatgcccacatccaggccagtcaaggtatcatgcagcccttggggaaagaagacacctccatgtaccgagaatacatcaggaaccgctacctgtgaggagagaaagaggtccctgcagggggcccagaaggggaccaaagtcccacttacttgcattctaacctgtttgtctcatcttaaaaaggtcatttcctgtcagtcctttacattggaaggcttttactctttttataactagttaattactaatcattggtgttaataataaagaaatggctgaatattttgctgtcattgtctttgctttattttagaaatactttgcttagaaatgtggttatgtagtatcacaccatcacatttagatagtaacagtatttattgaagacctgctgtggggcttccctggtggtcagttggttaagagtctacctgccaatgcaggggacacatgttcaatccctggtccaaaagatcccccatgtggcacagcaactaagcctgtgtgccacaactcctgagcccatgccctggggcccgtgatccgcaacaggagaagccggcatcatgagaagcctgcacactgcaatgaacag

SEQ ID NO: 65 - DNA, 21456 bp, Hippotragus equinus
  source 1..21456: mol_type = genomic DNA
tgacatcatgcctcctggctctcccgcaggttccggaggctgggttgggcgctccttgcgtctgggccccccacccatctctctcgctgggatgtcgttatgggatgctgcttatcctttttcgttttctttctggccacttcaccctcctcgcgggatctcagctccctggccgggggttgaaccccaaccatgaaagcccggggtcctgaccactgggccgccaggaactcccaggaagctgtgtctctgctgggtggggcccacctggggcacaggcccacccggcacttccgggggttcaggcccagccactccccagggcctgacagccgggggtgggtggggcgccccagggggaaggcagtgttttcagggccctgtctgtttcctgggttgctgtcctgccaggtagctttgggcaagtcccttttcctcttaggctgcagtttcctgggccgggagcgccctgctcgccgccctcccagggcgctgttgggatggaccgggtgccgcccccgcccccgcccccgcccccagggcccgagtctcctgtctggccaggccctgcaggctctccgggatctttagcagatgagaggctccgggagggtggggcagggcccgaggctgcctgggcagctgcccctggctggaggctggccagacccaggcagctgctctgggagcaaggacacagagcccagctctcagccccgccctctgcccggctcctggggtagctgcgggattcgtggtcgcccaccagggtcttaatgagtgaagctgaaagtcactgagtcgtggcctacacagtccatggagttctccaggcggagagaaaagcagaaaagcggggagcctttcccttctccaggggatcttttcaaccccaggatcaaacccaggtctcccccatcgcaggcggattctttctttaccagctgagctatcggggaagccctttaatgagtgagccagggttaatgggttaccagcccagtgacacattcaccagcttccccgggctctcaaagtccagacgccctggcctggccttcaaggtctgagctcagcaccttcctgttccagatctgatgcctcacggctctggaagggtcaggaaggtcaaaggtctttcttgtgccctctctgctccagagatgcccccccagggcctggcctctgggctccaatggcccctccgccagcctggcctccccagcccaatcccagtggtgctagacacctccccgcgtgacagcgtggggcctccctccgggtcctgggctccccctccactgctgactgtactaccccatcttgggtccagctgggggctcctggagagaagaaacggcatgggttagaggggagagcgagggaacgaatgaatgatggtgcatacgtgcagactgcaggcagcgtgtgggcctcagaggttcgggcaggcttgcacatgccagccttgtgggggcaagcaccccaccccaccccgttgggcaggggcgtgagcagaccgccccatcgtccatcagcctgcctgcttgcgaccccagaaagttggggggctgaggatagactccccgcgtcatgtaactcccttctgtgcccgtgaccacggctcttcgagtgacagcctgtggacgcctgcagccctggggctgggtgagagggcatcccgtggccagaagtgggggccgccccccggatatcctaaggggccaggagagaccccttgcctgacctgcccctgcccgaagcccggcctcattcagctccccagaggccctcagaactcaggtccttttagcctgggctggggacccaccgggctggaagaggctggccactgtccgagtcacacggccccctggggcaggacccgggccgctcctccccctacctggaagagtgcctgtgcctttaaagcctcccccactccggcccgcggcggtggggggagggggcagggggaggaggggaggagccggcacgggactgagctccgtgcctagtgctggagcggacggaggaccagccttgcagccaggtgagctggggcagggaaggggggtctggctgtgccccggtgctgtgtgaccccgaagccgctgctcaccctctctgagctgccggggggcatgggagagggcagcccagacctggggcctttccgggggcatctggagcgctgggtcccagcccagctctgttctgtcccggctgtgctcccaacaggtcgctcctcctctctcagcctcagtttatgcacctgtgtaatgggagtgggcagcccttcagggtgatgggggcggggctggtgcggccaggttgcgcagggaggtcgagtgaggggcagagcctgaggcccttggcctgactgggtctggcctgggagccttttttgttgtctggtgagtggtctgaggccagctgaccaggcttcccagctgacctggccgcgggtgtggggtgggtggaggaggccggggagtgggcttctcggactgagagggagggggcccagcatggagaaactgaggcctggaagggtggggcaatctgggctcctggggaggttgctgggggggtctggagtggaggcgggcggcgctgggggccgggtgccgtgccgtcagaccacatctgccccgcttgggctctgggggggcggaggggcaggctggcggtgcagggggggtgactgcgccgccccagggggcgcccacccccttgtgggcctcacaggctccgacagccgcttggacaggcttccagccgagatggggtcatcgggtctcaggaagagaccgtttctaattcttgaccctgttccaccagggtgggcagcacagggcacggaccccagctccggtccgggtgtggtgccgagcttcctgcccagggctgtgctcttggacccgggggacgcggctcttcactgcccgccaggtggtaagtggggcgctgggtgcctacctgcccgtgcacgtgcctgcgggcccgagtcacccctgcctgagcctcggctttcggccggcctctgaacggctctggggctctgcccagtttcacccctctgattcgggcgggaggattagcagagaaaccccaggctgtcggcacgcctcatctcttcacgctctcgctgcgtgtcctggaacctgctcgctcagcccagattcctcatgggcgtaagtgtgtgcgtgcacgtgtgtgtgtgtgcacgcacgtgcattcattgggagcaggtggtgcatggcagactcaggatctctgggtgcgtgagacttgcgtactcctgggggcagcgggctcaccgccttctgtgcctagcacaggagccctagggtctggcggggacctccagcccagaccccctgcccccggacccccctggagtggaggtgggaggccatccgggacggagtgtgacacactcgacgtgggaggacaggctttattgttctgaacgtcttgcctctgttgactcggcctgtgggacgctgtcacactcgtcctccctgagaacctgcagccgctgctcggcttctcctgggccccatggcaggccctcaagccggtcccagctcgggatcttcctgctggggtcacctgtagggtctgggtcctcctctgtccattcaggcctttttctgacctccctgccactccaggcaggaaggaaaccactgagcaagctcaggcaggtggggcagagccctgtggcttcccactgcagaagcctccctgccaatggtctggtcatgcagctgctcagggaggaccaagtgctccggtgttgctggccggcgtccagcccttggggacgggtcttgagcctcagtccctgggtcctgcctcgtcccatcttctcagtcatcctggtctgcaggggacaggatgacatccagggaaagagcgatcggggcagccccagcctggggtcgtggtggagagctcacggggcagccccagcctggggtcgtggtggagagctcgcgggagtggggagctcgagggagtggggagctcgcgggggcggggagctcgcgggagtggagagctcacagtcccacgtggagcccgcccaagcgcagtggtgtgtttcggctgtgaggccccgggggcggcagtgtctgcttgggctctgcgtcttcttccatcagctggtgtggccttgtgggctttttgcagattagatagtgcaggtgtggggctggaggcctcggggcagcctagatacagagggcaccaggagaggaaggcctgacttgggaagcggctgatccttgcccttggcagacaaaggccaaggggaggtggggcaacgtccaagttcccccggggtgaatctggagctgctcccgactccactccctgtgtccgggacacacagccccttggggcaggtacggggcggccaggtgtgtgctctgctggtctgtgtggccttggacccactctggccctctctggaccctgcctttccaggctgggcagctggttcctcgggcctggggcgctaccattattggacagatggtggaagcttctaggcgtgaagcaggagggaggtggtgccaccccggccctgctgcagggcctcaggaaccatctctgggcctggcgttcagacactctgagccaggacagggcaggccggcgggagacccaccctggggctcgcggagaggctcacagacaccatcctctgggacaaggattgccttgcctctgtcaagctccgctccttccccgttggggccacacccctcacctgctgccaccacccaggggtcaccgctgacagcacctgccacctccagggccctcccagggctgcgtgaactttagccgcctggtgatgggcggagtccccgggctgccgtgacaggtcgggaccagaccagacacagcctctggctgccctccctgccacgtgctgtctttgcccactctccgcggggattcaaagtgccccctgtcatggcagtctgagcgcggcttgggaaagcatttccagacacagagtatttcagaaaggagtgagttttttgagaataaacagcagagatagtgaaaatgttagttgcaactctttgtgaccccatggactgtagcctgccaggctcctctgtccatggggattctccaggccagaacgctggtgtgggttgccatgccttcctccaggggatcttcccgagccagggattgaactcgggtctcctgcactgccgtagtgagagtgcccagagcacagcaggcctgatcacggtggccttggcctgcagcggcgtggagcaggacctgggttcccaagcagaggctgggcccattcgcagtgctgagaccaccagatcccagccgctaggccagtggtcagtgacaagagcgctggcccttcagctttgctggaaagaatttccaccaagacggaaagcagtgaagcaaggagagcggttactaggcagagagcacagtgcgtgtggacagacacacagcggactcggagggagagaccctgggtcacgtccacatggcagttcagatcactttatggggcatttcttcccgttcccctctagccagtccttgtgatttgcctgcttcacgtgtttggtgcatctcaggcccctgccgtgtgtgcacgtgtgtctcctagccaaaagggattctactgcaaagggctgtgggtagagcttccctcgacatgactccccgtcggcctccaaggagccttttctgtgcgtgtgtggtcagggacaagaactctgcgatccatgcagggtccagcctcctcccttacttgtcccgctgttcttatcttggagtttcgggtgagagactgagtctctgatgctgtatcctggtggggggaggggcgtctgatctcctgacagcccactgagaaccgatgctttccatgggtgagtagaaaatttttagagccttgagacaaagaaaattcctgcaggaagggtggcattaggtgattggttagggcgctatagggtgagaaccaggtgggcatttttgcatcactgggggtcgggaagctggctggtaagggtcagggaggctttcgacaatggtcccggtggggctcagtccgtcccagagatgaccttcattctgggctccggggctgtggccttgggataggactccacgccccggggcgggcctctggccctctgtgccctcctcgagactaggtgagggttcctcagcccctctgctcctcctgggggaccccacctggtcacgggtggccttggcctgcagaggcgtggagcagacccaccccagcccccagcccccagcccccagcccagctctgggccccctgaggagctctgcagggcctgcgggcgtggctctgggcggctcttggggtgaggggcccggcctgtgcctggagggactttcccaggcagacaagtcggcctcttcctccccggccagtgccccagcccgctgccatcttttgggaagcagtgggggtattgtgcggcccccgtggtcccctaggcctcgggtaagccgaccagggtcaggaggagcccggccactgctggaggcccagcaccccttctctggcctcagtttcccctcctgacacggatttgggtgagagccagcctggggcgggggcagggcttggatgtggttttggccagtgcaaaaatgtggggggcggggatgggagaccaaagccagtccctcagcggggtgtcttcctccgggcttcctgtgggggctgggccaggcctcccgcccagggagaaggcgccggtcactgcagcccaccgcttccccatgccccggaaggctgagcctcgagggtaccccctggccctctggggagccccccgggcccttggtggaaagctgggcagaggggcggccagagcgcggaccccagggggcctgggtggggtgaggatgcagggtaggaccagggtctcagctgagggtccccagcccaggagaaacgcccagcatgcccttgaggtgcccagcatgaacaggcctgaggcccaggacgtgccctgagggctctccggcccggcggagggtggagggcagagggcacggaaccatcccagagcgggtccctctgagtaggcatggggtgaggcagaggagtcccggcctggggttttccggcagaacatcgcccttcgtgggggaactgagtttgggagagggggccttccccctctgacccgttgggtcacacagccctcacctgccgtccttgccactgggaccccatggttaaaggctgtccctgtccagcctggcaggaagtctccagagaagcccacggtgtgagggtgaggcgaggacgaccggctcccctcctgcccacaggcctccggcatccccccagcgaacctggtacttagctaacgcttgacaccttgctcaagggcacagaatctgcctgtggtgcaggagcgcagggctcacccctgggtgcggaagacctcctggaggaggaaaatggcaacccgctccaaagcatccttgcctggagaaacccatggacagaggagcctggcgggctgcagtctgtggggtcgcagagagtcagacacggctgggcaacttacacgttcacactttccaacccacttcatctctcattgcactggacagacagccagtgactttcccaagaccgcacgcaggtgagaaggggcaggctggccccggagcccagtggccctcacccattggtcacatgccagctccctgtgactgacacacagacacacacacccccaccccatgcctgggagacacacagacgcacacagacacacacacacacacacacacacacaccctgcctgggagaaaggccctgggggtggaattcacaccagtgtggaagcggctgacagcttcctcttggagacacagagactcctcacagagctccccgagcttcagagacaccctctccgtttgcaggaggacaagcaggctgcgtgctctggaagtctccctggagcaggttctgtagtcacgggctctcacggagcgtgaaggaggccccagctatttctgcagccggtccagcccacaccatctctgtggcccccttcctgggaggctcgggccgcccacccgctgaggaaggtaggctccggccccgcagcggtcgggagacatgggtgcccccctctggctttgagcgcaccggaagctgggccccacgctctgcggccggtcacctggggccccgagaacagtgtcgggaaggagtcaggccaggcctgtccctcctagggtgacctgaaggccaccgtgagggctcaaccaccataaggggccaggcaggtccggggggctcccctcccagaaagggtccctgccagagggggtcccgaggctgagcaggaggatttagggggcagagatgggtcaggagctgctgagagagggcgtggcccgagcaaagacgggaaggaggcctggcatgtccttctgaggccggactgtgtgccgtgccctgggggccaagtcccctggtgggcaggtcggtcccctgacctgtcacccctgcacctcgcgcctgcagaacatgaagaagcggtccatgctgctggctttggcagccgtggtcttggtcctcctcatcattgggctctgcatctggctgcccggggcctccaagcagcacagccatgtgtaccccagggccgccgtggctgcggacgccaagcgctgctcagagattggcaggtgagtggggccccgggcccaggggaccgcccccgtcagtgccctggggcatcaccctcgcccctctggggctcaatccccagccccgctggccctggtcatcaggctgcctgggcgagccatgttcgagcacacagggctgcccctcccgtccgtggaccttcccggcagcctccggtcagaggagaaggggacctggagccgagggcagggtgtggggttctctcagtgaccggctggacccctttctcagttcaaggctgtctgcctcttcagagaaactgctgtttaacgctctttgtaggcccacaactcacatatacaaaagtcaggtctcacacgggaaaaagatgttattaataaaaaaaaaaaagcaacaagttttcattcttttccaattatcaaagccatgttcatctgtcggcgtgaaaagcctgttggttttcaaatatggcaaattttttgcattagaaaataaaacctgtgggttcctctcggtccaccctggggcggggtggcccctccgagccgctcacccccgcccgtgccgccggcagggacgcgctgctagacggtggctcggcggtggacgcggccatcgcggccctgctgtgcatgggcctcctgaatgcccacagcatgggcatcgggggcggcctgttcctcaccatctacaacagcaccacgcgtgagtgccctatgggatgggctccaggggcggggaggggtcgggggccgtgcagcccgcccacccgcccggtccttccaggtaaggctgaggtcatcaatgcccgcgaggtggccccgcggctggcctccgccagcatgttcaacagctcggagcagtcggaggaaggtgagagcgggctcggggcggatgcggggccaggacgagctgtctgcggctgggggtggccctcccatcccttcccggggcccacagcacccccaccgtggaggatcaagcccattatcacagagtgaagggcgtttctgctcaggcccctcctgggccacagggagctagagaagcggaacgacccctgttgcagcagtgcgtatgggtcaggccagcgccctgctcaggcctttgcacccacggcgagccccttgagccctccctgcacacttggcaggggagctctgtgcgggttcccatcgtatagctggggacgcggaggtccagccagagaggccacgtaggctgaccgaggccacacacagctcccagctggctcagtggtgaagagtctgcccgcagtgcgggagacccaggttcaatccctgggtcgggaagaccccctggagaagggcatggcaacccactccagtattcttgcctggagaatcccagggacagaagggcctggggggttacagaccacggggttacaaagagtcagacacaactgagcgcacacacacacacagtcacacacacacagccacacacacacacacacacagtcacagtcacacagccacacagtcacacacagacacacacacagtcacacacaaacacacacacacagtcacacacacacacagtcacacacacacagccacacagtcacacacacacagccacacacaaacacacacacagtcacacacacacacagccacacacacacagtcacacacacacacagccacacacagccacacacacacagacacacacacagccacacacagacacacacacacagccacacacacacacacacagtcacacacagtcacacagccacagtcacacacagacacacacacagtcacacacaaacacacacacacagtcacacacacacacagtcacacacacacacagccacacagtcacacacacacagccacacacacacacacagtcacacacacacacagccacacacacacacagccacacacacacagccacacacagccacacacacacagccaaacacacacacacacagtcacacacagccacacagtaacacacacacagacacacacacagtcacacacagacacacacacacacagccacacacacacatcacacacacagtcacacacaaaaacacacacagccacacacacacagccacagtcacacacacacagtcacacacaaacacacacacaaccacacacacacagccacacacacacagccacagtcacacacacacacagtcacacacaaacagtcacacagtcacacacacacagccacacacacacagccacagtcacacacacacacagtcacacacagccacacagtcacacacacacagtcacacacacacacagccacacagtcacacacacacagccacacacacacacagtcacacacacacagtcacacagtcacacacacacagacacacagtcacccacaaacacacacacacagtcacacagtcacacacacacagtcaccccccacacacacacagtcacacacacacacagtcacagtcacacacatagtcacacacaaacacacacacagtcacacacacacacacacagtcacacacacagtcacacacacacacagccacacagtcacacacacaccgacacacacagtcacacacacccagtcaccccccacacacacacagtcacacacacacacagtcacagtcacacacatagtcacacacacacagtcacacacaaacacacacacagtcacacacacagtcacacacagccacacagtcacacacagtcacacacagtcacacacacacacagtcacagtcacacacacagtcacacacagtcacacagtcacccacacacacacacacacagtcacagtcacacacacagtcacacacaaacagacacagtcacacacaaacacacagtcacacacacagagtcacacacaaacacacacacacagccacacacacagagccacacacagccacacacacagagccacacacagtcacacaaacacagccacacagtcacacacacacagtcacacacacacacagtcacagtcacacacacacagtcacacacaaacacacacacagtcacacacacacacagtcacagtcacacacacacagacacacacacacacagtcacacacaaacacacagtcacacacacagtcacacacaaacacacacacacagagccacacacagtcacacacagtcacccacacacagtcacacacagccacacacacagtcacacacagtcagacacacagtcacacacaaacagccacacagtcacacacaaacacacacacacagtcacacacacagtcacacacacagagtcacacacacagccacacagtcacacacacagtcacacacagtcacacacacacagacacacagtcacacacaccgtcacccccacacacacacagtcacacacacacacagtcacacacagtcacacacacacagacacacagtcacacacaccgtcacccccccacacacacagtcacacacacacacagtcacacacatacacaaacacacaaacacacacagtcacacacaaacacacacacagtcacacacacacagtcacacacacaaacacacacacacagccacacacacagagccacacacagccacacacacagagccacacacagtcacacacacacacagtcatacacacacagtcacacacacacacagtcatacacacacagtcacacacacacacagtcacacacagtcacacacaaacacagccacacagtcacacacacacagtcacacacacacacagtcacacacacacagtcacacacacacacagtcacacacacacagtcacacacacacagtcacacacacacagtcacccagctggatggtgggaaagctgagtttgaacgcacctgttgtgtttttaaagagcatccaagtcactcattgttcacctgtggggttagctggctagattacagggcgtagtttcttttctaacctgtccttcagccccaggggacgccctgcaaggaccccgggggactgtaagacaaggctggagggaggagggatggagatcaaaggccctgtgggtctgaccgcctcctgcaggctctgcccctgggggactgagagtctccgggagcagcccttttggaattctctttctctccaagacacagtctgtgaattttcacccgctgggaagctcaccaggtgtagtgatgaagtcattcagggtatggggctgcaagaatcttacagacttggcattttgcattcttgagattcacgcgtttgactcgggcttgtcaggcgttggggctgttccccagccagtagaaacaaaggtaacatgtgaagggcaccgtccaggaggagcagaggggagatggcacgggtgtgcccagcgccactgcgcagcctggagggcggacgcgggcagggtgagagggcacgtgggcttaccaggtgcaaagacccggaggctggggctggggtggggggtgggcgtctggggggagcaggtggacgcagggtcagtttggacctcgtggtgggtcatcgtgaagacccggccttgtgtctgaaggagggatgggtgttccctgcgtcggagggcactcggggggatgtggctcttttccgacgggacccctcgggctgccagtcaggtggcctgtcgggaagtcccgcgatgggcagggatgctgagggctggtgcccagcacacttggagggcggagccgtggatctgctgagggggtctgctgtgacacacatccaggggtcccggggaggacagatggccctcatggaggccagcaaggctcccagtgagtcccccttgagatgccctctttgaccctcagatctggccatcagggagcagcctcaagagttcagcctgggggctgtcggcacgtaatggggctcagccgtaaagaatccgcctgccaaggctggaggtgcgagagacctgggttcaatcccggggtcaggattgaagatcccttggaggagaaaatggcaacccactcccgtgttcttgcctggagattcccatggacggagaagcctggcagcgggctgcagtccatgcgatcctaggagtcggacacgacctcacgtgtacacacactctggaccaggcagcctggtgtgcaggagggcagacagaggagaggccgggagatacagaagcgacccggggagagggggacgggccaggtgagatgagaaaggggcccggctccctgctgagagggcggcccagggcctcaccggcctgaggtcaggcccgcacgtgctgaaggggagggacgcgtgctggctggcagaccttccaggaggtgatgtggtaacaacctggctcttggaacctcgtgcccgacttctgggtgggataggccactcgagagtggccgaaacgcgctcccctggcccgcatctctggtgaaggcaggaaggcgcctgcgagccggggctgtgctgaggctctctgtgtcagggccgggccctagggcacgccggcgggcggtggggcctggcagggagctggggtccgcggctgtgtctccagtggcatcctggctcctcaaaggatggagctgggagcccaaacccttcatggtcagacggggaaacaggcccagagagggtgcggcgcaggctctgggacagcggaagagaggggaggggctgttgcgggtgactggggccttggtgggttccaggggaacccttgaatcgtacagggtgaaggggctcgtgacccaggaggctcagactgagaggtggtgaggtccggcttccgtacgctctcgctgcacagctgtgcgcctggaccggggtttcagacacggggccgctgtggagtcagacgtgtaggcctgggggacagcggggccccccgcacacgccccccgtgcccccagcagacaccccgagcagagtcacatccctgcctgccaggccgtgtgtgtcagtcgctcagccgtgtccgactctgtgcggccccgaggaccgcagcccgccaggctcctctgtccgtgggattctccaggcaagaatactggagtgggttgccattttcttctccagggtggtcttcccaatccagggatcgaattcaggtcttctgccctgcaggcggagtctttaccctttaccaggcacagccgcaagcatgcatttccttccggagcctctgggtcccactcggggacatgcggaccaccagcgggtgcctctcctttcgcaggcgggctgtcggtggcggttccgggcgagctccgcggctacgagctggcgcaccggcggcacgggcggctgccctgggcgcgcctcttccagcccagcatccatctggcccgccagggcttcccggtggggaaagccttggcgggggccctggagaggcagcgggagacagtggagcggcaccccgcgctgtggtacgcctggccccccgccgggggcgcccgccctgggaccagagccctgacccagctgggctgcacaccgtgggcaggggcgccccgtcctttggtctcctgtcgggggtgagggctggatggctgagcccggccccacccctgcctcacgagagcccccccaccgccgctccagcgaggtgttctgccgagacgggaaggtgctgcgggagggggaccgcgtgaccatgccccggctggccgacaccttggaaacgctggcctcggagggcgcccaggccttctacaacgggagcctcacggcccagattgtcaaggacatccaggagaccggtgagtgggagacaccaggggcctgcggccggaagctctgcagcgggaacccggagcctggggtccttgggccctgcctggacgctgggccctcagggagtgcctggcagggggagtgggtcacaactgtgtctgcagcatggatccacagctcctggctgagtcaaagctgagggaattcctgcagcctaggacaggaagcccggggctgcaggcttggggtcattgaggggtgggcaggaatgcagttgtaggcaggagtgaggattggggaaagcacgaaggtgcaaaccctggaggacttcctggaggaggtggcacctgagccacaggtgaggttggactttgcaggtagagagcagtctgaggcttggagagaggggttttgattctccaggaggatcacagggaaggagggtgggcttgcggagaggggtgtgggggtgctgcacgcagggatcttgtgggcaggttctggtgggtttaggagtcccggttgcctctctttcctgcccctgcctccctaagctgtgtgtgtcagggaggaggacgattagcttatcgacctttaccactgacaccggaaattagcctataaatacttcaaacacttcatctgtctggagccagtttccctggagaacaagggccttcctccatccactagtcagaggaggaggaggctgatgggagacgggggacctctggccccccgagaggacagatgtcggacccggaggccagaggcacagcaggtggaggatgctggcccgggcctggccccggggaggtggcacagttgggggggtatgggggggcagtggacagggctcccctcttgacagtcccccagaagtgtgtcccatccctgggccccccgctgcagggggcatcgtgacggccgaggacctgaatagctaccaggcggagctggttgagcagccgctgagcatcagccttgggggtgcccagctctacgtgcccagtgccccgctcagcgggcccgtgctggcgctcatcatcaacatcctcaaaggtcagccgtgtcccgggctgcgggctgggtggcctgggccagggggcacgcccagtggatctgggcggtcatccgccaccccggggcctgggtaaccctgtggctggtgtgtgctgcccaacacgggtacctttgcttccttcccccgcctcccaagcaggcactgccattgggcagtaactgttccccttctcagggtgagccgagcgactcagggaggcctcccggggcccccgctgtcctggccaaggggacccgggacgctgaggtcactacggctctgcctgaccagggtacaacttctcccgggcgagcgtggagacgcctgagcagaagggcctgacctaccaccgcatcgtggaggccttccgctttgcctacgccaagaggaccctgcttggggaccccaagtttgtcaacgtgactgaggtaagggggcagggggctcagccccactctgctttattcctctgtttgcaccgccaactttggcctcggggccaccaggtgctggggtgactgctgaccctgagtgctggcctctgcgccagggcgctcagcatcagccacgtccttggcctggaagcccctggagccatcagcgccgaggtcggggggcgagcgcacaggggcgtcccagcccccagggctgatgatgaggttcgagccaggtggcaggggccctggccacacacgctcccagtcacaccagcttcccagatccccactgcccaacacgctcgctccccaagtgcccccacacacacccaggctccaggccggacccctgcctccatccccatcacggcgctcatcccctactccgtccgcctgcgagcccttgccccctccaccccctccaggccctgacggagcctcagcctccgctctgctccgcggcatcccacgccttcaccagtgcctcctgcccttggctgcttcctgtgcaaggctgtggccacgtttcctccctctcccgcctccggcccctctgctctgcctgcttcttctcctgttaggacgcctggctcggccttttcccaagggtcccgcctgcgtcttgaggccccggggccccgtccttctcgcctccagtctcttagcctcgacggaccccgccccgggctgccgtggggattttcaggcccagggcgggtggctcgtaggatgtccccgtccctggtccagctgctctcttggaagtagattcgagcttaacgtcctcccctgggattagtcaactaatccgtggatgttgcaagaacccacggcctctgctcggcctccggggccttgccttgccagtgaactctacaggtcaggggcggcccatcacacacccgggacaggacctacaggatccgacaagcgcgcatctccagtcaggctcccgctgtccccagccgccccttctgcaccacgcgcctcccgggcgaagctcacggcctgtcccggtggtgttccgcccccaacacagggccagagggttaacacccgtcagctggtcatttctccgccccaagtgcgggaggttttaaaggccttttagggcccgtaaggacctgtggggagaaggcagtggcaccccactccagtactcttgcctggaaaatcccatggacagcggagcctggtgggttgcagtccatggggtcgcgaagagtcaggcatgactgagtgacttcactttcacttttcaccttcatgcactggagaaggaaatggcaacccactccagtgttcttgcctggagaatcctagggatgggggagcctggtgggctgccgtccatggggtcgctaagagtcagacatgactgaagtgacttagcagcagcagcagcagcaaggtcctgtgggagcagcccctgccagcatcttcagcctcctctctccctaactcctttcactgtctgtgtgtcactcataagccggcctcagggcctttgcattaccagtcaggtggcttttttcagatatcacctcctctgagaagccctccctgaccactctcatctttccgtccctcttgctccctcccctccctgtacttgttctttctagcacatccttgcctgcctttgtcttccctgctgtgagggtggggacaggcgtgtctgttccctgctggtccagcgctccgttgaagagaatgaatgcttgggtgcagtgagagtcagggttcggagggcagacggtcattcagagttgctgggcagcaacagagacaggctggggagagggggttcgggtgggccatgtgagactcagacataggagggttgtggttggagcctgagaaccgctcgcacaagcctgtgccccctcctcgcctccttcacctcctcagggcagctctggggtctcggcaggtggtccgcaacatgacctccgagttctttgccgcccagctccgggcccggatctccgacagcaccactcacctgacctcctactacgagcctgacttctacacgcccgacggcgggggcaccgcccacctgtcggtggtctcggaggacggcagcgccgtgtcggccaccagcaccatcaacctctagtagggctgctgggcggccgggtgggccaggggctgcctgcgtgtctcagaagggaagggctccacgttggcagagtgcctctctggggagtgtgtgttggtgggcacggggcaggccggcccccctctgaccctgccggtcggcagctttggttccaaggtgcggtcacgggtcagcgggatcctgttcaacgatgagatggatgacttcagctcccccaacatcatcaaccagttcggggtgcccccctcgccagccaacttcattgcgccaggtgcggggtgcagggcctgggcggggggcgggccggtgtccccgcggccgctgacccggggctctgtgtccctcaacctccccccaccgctgcaggcaaacagccactctcgtccatgtgcccggtgatcattgtgggtgaggacggccaggtccgcatggtggtgggcgcctccgggggcacccagatcaccacgtccacggcgctggtacgagccccaccccccctctcctgagcacccagccccttacctactgggccacgctgaccccatccccacaccccgcaggccatcatcaacagcctgtggttcggctatgatgccaaacaggcggtggaggagccccggcttcacaatcagcttctgcccaacaccaccgtgctggagaaaggcatggaccaggtggggcaggggaggggcaaccaggtcccggagggggcggggcgaggaaccgagtcccggtgggggtggggtgggggcggggaccgagtcccggtggggggcaggggaggggcaaccaggtcccggagggggcggggcgaggaaccgagtcccggtgggggtggggtgggggcggggaccgagtcccggtggggggcaggggaggggcaaccaggtcccggagggggcggggcgaggaaccgaagcccggtgggggtggggcggggcccccccagtcccggtggggggcaggggaggggcaaccaggtcccggagggggcggggcgaggaaccgagtcccggtgggggtggggtgggggcggggaccgagtcccggtggggggcaggggagggggaaccgtaccccggtgggggtggggcgggccccccccccgagtcccggtggggggcacgggagggggaaccaggtcccggagggggcggggcgaggaaccgaagcccggtgggggtggggtggggccgggggtggggcggggcccccccagtcccggtggggggcaggggaggggcaaccaggtcccggagggggcggggcgaggaaccgaagcccggtgggggtggggcggggcccccccagtcccggtggggggcaggggaggggcaaccaggtcccggagggggcggggcgaggaaccgaagcccggtgggggtggggtggggtgggggaggggacctgtcccccggtggggccccgggcctgcgtctcccatcaccgcagagcaggcagtggctgctccccgcggcccgcggcagctggccgtcacgcccaccgcccgggtctcctcggccccggtccagagaggcccgggccagccgcgcggatgagacccagccggcagccctggccgcggggtgtgtgaagcccacgcgggcggcccgggaccccctgagaccgcgccccctcccgcccgcccgcccgcaggcggtggtctcggccctgaagacccggcaccacgccatcgaggagacgtccacctacatcgccgtggtccaggccgtcgtgcgcacagccggcggctgggcggcggcctcggactccaggaaaggcggggagcccgcgggctactgagcgctccggggaggagaggcccgccggggctgggggccgggggcgggacttggggggctggcttcccctgggagcggcgtagcagggcaataaatgcggcggcgccgggctctgggctgtcctgccgccggctctccactccgtgggctcagcgcgctgtgtgaggtggggccgcctggggggaggatggagacggaactcggaggccttggcagcgcgggcgctgggcccgggagggcgggcggggcttggactgcacccccgagtcccagcaccagggtcgggccgccccgggacacgtcccgtgtcggccaccagtgggcgcgcagccccgggcgatttgtccgcggttccgggaaccgggagacctcctcagctcgctggtgcgcgtctggcacgcactgaggggaaaccgagctttgggggagatggggttgggcaagaggctggagaaaaagatgctggtcagggccaggccctgggggggctttccaaatgga

SEQ ID NO: 66 - DNA, 31505 bp, Hippotragus equinus
  source 1..31505: mol_type = genomic DNA
gggtccaagcctgccctcctctgccccctagtggtgaatgaggaacttgctcccgggtgcttcaccggaccctgtatcatcacttatcttaagagcattcgcttagacgtgttattcagacagaccccaagtcaggctgggagctcggacacaactacttttttattattattgttatttattaactcttccaaggacccgtatctggcgttgagatgacagccagattagaaaaacgaacgtccacggagagtccggacaagctgctggtctccaggggaatctgcctttgcttcccaagcacaggctcgcggtgggcctctgcatcacacagaggctgccatggaacatgctcttaactgtgatggcaggaagatccagtggggggcacgctacaccccgcagtgtgctgactgcggggcaagagtaccgtcgtgagggatgcgaaccctcacttctgaaaacacacacagggtccagacccccctgtctcatcctctctacgggtctcctcggactttcggaagagagtccaccgcctttccgccgcgggacccacttgcgacgtggatttcaatggtgctgccgtcagaacctggggaggaggaaagactgtcacgggttggtgtcaatgccttttacaacttgcacagccatattaaaaagagaaaaaagaaaaatacacaatatgtccacctacgtgggattaaagcatcccaaaggacagagcaaaccctacagaatcatctcaggcaacttgactgatgtcatgactgtattcaccccactcccctgccttgagacactctcagccaaaccctgtggatgctgcagagcaaatggaaaccaggcctgttgacaccctgccgcttcggggccctgggacttgcactaaatcaggggtcctaatatctcagtgctctgtgatgctagcggggtcactagggcagtggggctacatggtcacccggccaccacttttgcacaattcaggaggtgcccggaggccttctcttgctaaaactgagagtggccttttcacggatgatgccatgtggttggaggagggggaagggtgtagggagcaatcagtggaatcaaagccaggcatgacttgccaaaactgtactccttgaggcctgtttaatccatcccaatgacacaccttcctctggactctgtgggaacagatgtgaggattattctctctgggcagaagtacccaggcttgcctgctgttgtgccaggttctagggtgtgtgtgtatgtgtgtgtcaggaatgagccatggaagacatagggaagggtggccttttcagctgtgcgtgaggcaggtgactgcccttgctgaaaacctccaaatcccaaattctctcaacctatacaccctacggacggctgcagcctgttcccgtcatgaccctctgctcgctcacaaacttcaggcacaggcttctttacacccaagctcagtcctgccacaaggcctttgcatgtccccttttctgcctatgaagctctcctgatgttcttgtggctcactcccacactgcacacaggtctcaactcaaatgtcacttcattctcaaagagatgtcctggacaccttgctgaaaccagtctcctgccctctacggatatgccattgttcctgccctctacggatatgccattgttcacagcacttcctttttccttttttttaaaactttttaaatttcgatgacgtccaacatgtttttgtttttttttttcccttgagtcgcttgtgctttaagtgcattattttaaattatttgtctgtagctgtgctgggcctttgttgctatacgtgggctttctctagttgcggtaagcggctttgtcattgtggtggcttctgttgttgcagagcacaggtgtcaggatttctggctcacaggctttgttgccccgtggcatgtggggtcttcttggatcagggatcagaccggtgttccttgcatcgcaaagctaattcttaaccaccagaccaccaagagtccttcacagcaccagggaccaccaaggaaccggtggagtccttcatagcacttgctgctcattaattatggtgcctgggcttagttgccccgcagcgtgtagaatcttcctggctcagggatcgaacccatgtccctggcactggaaagtggattcttccccatgggccaccagggacgtccttcagttctttgtgattttcattctgtctctgccgctagaatggagcatctcagtggacagtgcatttctctctcagtcgccgtagtatgtgtggcccctgacacgcagaaagtgctccataaacaaatgtgagatgcgtaaatcctgtggggtcgcggccttgaaacagggggaggccacacgggtccctctgagcagaaagacactaatgtatcaagacaggcagaaatgagccctatttaacatgtgcagagttttggagaatactcaaggaagagaagacagagcctcaagggtgtaaatacctggagaaggctgagatgcaggtggaggccacgactacgaccaagaaaaagcaagtatgtgcctgcagcgtccccacgaccagcccatgaaaccccacggtttcgcagggtcctcccagggcaggatgaagatacgtctggggggctctagcttggagtaggtcacaccaagagtgatgagcccccagagagcagaggaatttagaagatggggggtgggggagaaaggctcccatcaacgggcatggaccctgcagcccatctcaggagagtccaggttgcccgtcaagatggtgggagcagccatttggctggagtggaaaacgtgctcctcctggaggccaggcagtcagttcagttcagtcgctcagccgtgtccgactctgtgaccccatggactgcagtcccaatctgcagttatttcggagccaaaaaaaataaagtttctcagtttccactgtttccccatctatttgccatgaagtgatgggaccagatgccatgatcttagttttctgaatgttgagctttaagccaactttttcactctcctctttcacgtttatcaagaggctttttagttcattttcactttctgccataagggtggtgtcatctgtgtatctgaggttattgatatttctcctggcaatcttgattccagcttgtgcttcttccagcccagcgttcctcatgatgtactcaccatataagttagataagcagggtgacaatgtacagccaccttgatgtactcctttcccaatttggaaccagtctgttgttccatgtccagttctaactgttgcttctttacctgcatataggtttctcaagaggcaggtcaggtggtctggtattgccatctctttaaaaaatgtccacagtttgttatgattcacacgcttaaaggctttggcatagtcaataaagccaaagtagatgtttttctggaactctcttgcttttttgatgatccagcagatgttggcaatttgatctctggttcctctgccttttctaaaggctgattgaacatctggaagttcacggttcagtattcctgaagtctgacttggagaattttaagcatcactttactagcgtatgagatgagtacaactgtgaggcagtttgagcattctttggcattgcctttctttgggattggaatgaaaactgaccttttccagtcctttggccattactgagttttccaaatttgctggcatattgagtgcagcactttcacagcattatcttttaagatttgaaacagctcaactggagaccaggcaccagctgggaagatgacttcagttccaaaaccgcattcctgctggaggcgcttcacaaaggctttgatttctcacagggtcaccccacactgtttaccctcacatcctgagctcgtgggaacttgtgtgcagtttctgtagttcttgcagaaagaccatggcctggagggtcacacagtggctcgtgaccgaggtctcagctcagcacccaccctcgtgacctgacactttgaggcatgctccacatcctgtggtttttcgtttctaagttcttgcatccttcgctgtcccctcggggtctgtccacaaaggagaccccttcttgctacaaccactcagtgagtctcagatgccagcaccgttgcagatgacccctgaccccccaagcctagccccgcctgggctgagctggtctgctgtctgcaccgagcgctttccagcatgtctgactttccacaggcttctcgtctgatcttagcaaatcaaacaaggccgtggtggaatgcagcaccaatgcagcaccattctgcattggtgctgtgtgaatacctgagtgtccttgcaggaagtgcggctgctggtgacctcacagtgcccaagggccaggcctccttcccagcaactcccagcagtgagccttgcacgtctaggcaggctctttggagctttctggctctgtgcagacctaccattcggggaggcatgtcgtctcttgggccctgggccattgtccttggattccttgacacctcaaagccctaaattggcaacaccaactaggaggtacggagcaccagctatacggaacgtgtgacacctagcccgcatccccttcaagctgtggaatcatctgcaaggtttagccagcctgacagattggaggccctggggtctgttaactcccacactccccgggcactgggaacccatggagccaccaggagttacgcggaccacatgtgggtggcaggaaagaatctgagacaacaagatggatgagacagaatagaaacgtggaaggtaacggggaagcgtgggagagaacagggaactctgaagatcaagggaagactgtgcaaaatggaaccgtggcgggggggaaacaaagatgaaacagggcgtggagggaaagacaaggtattgtgagagtaacaactgcagaagaagagggagacaaggggtgatgaggggggaagagaaccgtgagaaagcgtggaattctggagcgagaaaggaacttttggagccacggaactgtgctcagaggacacagagatgggagagatagaatcatgagaaaggctgctgtgggataggacaggaacttgagggagagatacagaattgtcagaacagaaaattatggttaccaaaaggtatacgtgaaagggtctggctgctcgccgctcaaaagccaataagcgggccaagttggtggaaagggaaaatttgctgtatttcagatgccagcaagtacgggagagagtggcagacatctgtccaaaggccaaccccccgacaggcagagggtgagacaaagttggggcgggggtacgtgcagaaacagtacagtcacctctgataggcatcttcactgagagcagcaccgcggttgctttaggtacagataatctttacttcctgggtgcacgtgttcccatgtctttgcagtcagttctcggaatcgttggcagctcaagacctgggtacagtcgggtcatcgtgtagttaacgtttccacctggtgtgttttggtatctataagacagctcacaggaggtggctcagaatattccctacagcctctcagaaagaatgaaaggcccttgtgtgtatgtgggtgttagtcactcagtcatgtctctttgtgaccccatggactgtaccccaccaggctcctctgtccacggaattctccaggcaagaatactggagtgggttgccattctcttctccaggggatcttcccgacccagggatcgaacccgggtctcctgcctcgcaggcagattctttgctgtttgagctacagtggaaatctcactacacttaaagagtacgttattatcatttggtcacctttgacggtttttcctttgtttttagcatttctcacctctctgattaaactgattctttgactacacttctccaccagcagcaggcaggcagagaacataatggaatggcgggcggcagtgggcaaggatcatacagtctggctttgtttcatttcggggaaagcgtgttgtgggagagactggtcgtcgtgaaaaagagggttaggggaaccctggaagatttttgcgtaagaatgaatcatttgaggatgaataggcagttgtggaaaagaaaaaaaaaaacaaaaatgagaacacagaaaatcattgaagaataaaatggcagaagaactgaaatgtggtcaggaacagagccctaggagataaaatggtgatatgagacagaccacagacagcaaagagctgtgggaaagtaaaattattcgaaagaggaattctggaatgaaacagaaagctgtgggaaaatggagagttgtgggcaagacaaggattatggggaagaaagaaaactgtgggagaagcgtagcgttgcggaaaagacacggggtgggagagagaagtagggaattacaggaaatagagctttgtgggaaacacaggggttgcatggagaaggaggaagaatggaaaagcaagggattattggagagatgggagggcttgtgggaaatcctgattctttacaaagaagctcctcgtattctgaactcaagttgtcatcaggaattatatacagatcctctcactgtgaaccgtcgccacagtcatgaaagtgaactcgctcagttctgcctgactctttgcgaccccatggactataggcctaccaggctcctccatccatggaattttccagtcacttggttagtcctacgagcaaatgtaagcgttctctctccgctcagaaaccttaactggccttttgctgtgtccaagataaaaatgcagaatctgtaaacaccccttgacggatctcttccccacctgcctctctccagcttcccaccgccaaactacatgcaagttcagcctttatttatttataagtctttattcctaagttccccacgtgatacttctcagagacgctcacaccccagcccccgcctcagctaaaacggtgttgattgggttgcaagcgctcaaggaatatttgttcaaaatcagttgactttcctgttaagtggcgagaaagtgccagagactgcattagacgcttaatgacggaggcttggtggaagcctgtcagcctggaagtgaatcctaaagtagcagatagaggcttaaggatatgatttacaggtcaagcttcgtcctaacagtgcagacggggagaggcctaaccgtacttaccacttcaagtttgtatctctgggtttttctctgacatgtaacagtattttctgtcttgtgaaagcaaagtggctggaaaggagaaaggaaatatgcccaagattaaggcagccttatctcatttccgatattaccactttattcgaaaaggcccccggttcctgagggttctggcctcagcatacagcctgtggtatagacacgggggtcttgtatgtggaagtcattctctttgctgacttgtacccacatctttaactgtggtgttaaacaagacccttgagagtcccttgggctgcaaggagatccaaccagtccatcctaaaggaaatcagtcctgacttcactttcactttcaagctttaaagaaatattatttgggccttaaactgatattttcatcctccatatcagttgggttaatggacataaccccaaattagatgaaaagtgaaagtgaagtcgctcagtcatgtccgactctttgcgaccccacggactgcagcccaccagactcctccatccatgagattctccaggcagaagattggaatgggctgccatttccttcgccaggggaatcttcctgactcagggatcgaaccctggtctccagcattgtaggcagacactttaccatctgagccaccgggggagtccaaattagatgaacaggagttgagaaagaggaccgatttgaggaccacagtgcaagagtcttaaaatgaagaggacagagcggaatagccagcgatgggtgacctgcatttcgtcttaaacgcccccgggtgaagtggacacaccaaaactgcacataaaaacctccagaggtcaggctgcctgctgttcattgtcttacagcacacgtcagcgccgggtgagaaatgaccggttatctcagactcagaatgtcacgcaccccaaggcagagctagtgatcattaacgcaaggctacggtgctcagtagcgggaaagggaagattcccctggaggagcgcatggcaacctgctccagtattctcaccgagagaatgccgacagacagaggggcctgccaggggtgacagtccccggggccgcagagagttcaacaggactgaagccacgtggcacgcaggcagagaaaaggcaccacgctcatattacaaggagaggtgagtgacgacctgcaagattaaggtggtccctttccactcatgccctgaagctggttccagaaatcagggcagagagcctccaggtcactgacaaaggagttcctggggagcctggggcccccaacctaggcctgcctctacccagaggctcttaccttcagaaagcaagctcaaggcctcatcggaagtgtgcgcaccgcctggcagctccttcttgggagcggggccttccccgggctcatgggggcctctgggggatgggggcgccccctcggtggccgaggtggtcatcgagtcccactggatctccttgctgggacctggaagtgtcaggcagcagcccgtccagccgtagaaggccagggacaagaggaaaccttgggctggattcaggatcccctggaagggaggagaaagagacagcatataagtcagggtgctgacgggcatcgggggtcacttcggtccacagggttggcctcagctggagcatgtcctgttggctagtttggggcaagagagagattggcttggaggtgctgggccttcagaggtgtgtgggggacacaggaggccagggggtggagaggaaggtcccgggcatcaccccagcaatgtgggttgtctagaacgcttgatatttatggacagtgttccaagggatacctccaactctgtggctttctcactctgcaacatttcttccagagaaattcccagatattcttagtctgcctgaaaagtttgagacacttgccaaactgacttaccagagtcatatgcgtttaataatgatgctaacactgaacacagaagcgtttaattgaggacacggtacgcctctccacttgtttacttgctaagtggtttccaactctttgcaagtccatggaccgtagcccgaccaggcttctctgcccgtgggattctccaggcaagaatactggagtgggttaccaggcccttctccaggggatcttcctgactcagggatcaaactggggtctccttcattggcaggtggattctcttactgctgagccaccagggaaacccaggcacctctccactaacagctcctgtatggagtttttgtagtggagacacaatatactggaaacatcgagaacgatgtatccgtaagctttccacctgattatggcggtgagtttctaggcaatattgttgcctacatgtgattaggtggttgaaatgagtataatctctacatcctgcatttttcacttattatgagatttcagaattgttatattttacattgtcattttcaacatctgcataccattccatcaagatcaaagacagtgatttacttaaccattcccttttattaaaaaaaaaaatgtgggttgtctagaatgctttatatttatggatagtgttccaaggaatacctccaactctgtggctttttcagtctgaaacatttcttccagataaattcccagatatgtttagtgagcctgaagcgtttgagacacttgccaaactgacttaccagagtcagatccatttaataatgatgccaacactaaacgcacaagctagctcatggaccacagccagataagggggccccgcaacctcttcaactcactgcatatttaaataacacatagataatacttctcagtggtttttatcctgtctgggtttttttcttcttctttaggaagtacatttaaaatcaagattgacctaccatcatgaaccacgtggtcttggctgcgtttctgacctgtttcaaagagctgctgttgatatctggttgcatttcaagatagaacaaaaggatttcgttgatgacatttgagaaccagctgtgagacagaaaatgggccacgggtaaagagaacatgcgatattattctttttttttttttttgcttacttttaatgggaggataattgcttcacaatatcattttttatcaatgccagaggtcaggggacatgtctgcacccatgactgttgagtcactccatcatgtctaactctttgcgaccctaatggactgtagcccaccaggctcctctgtccatgggatttcccaggcaagaatattggagtgggttgccatttcttcctccaggggatcttcccaacttagggatcgaacccacacctccggcattgcaggcagaattttttatccactgagccacctgagaagccccagaaacatatctcccaagacctagaagtctgggaggggtgaccaaatagctgcaggagaattagacgagaattagacgtcagagatggcatccccctcagccaaaagcagagaccaagagaccctcccgatggtcacaatcaacaccatatcgggtggaaggttctagcacacatcaaatagcccagaagtcattcctcctttgatgagtaagctgacgtctaaatggagaccaacacgaaccttgatgttttacgtcggaaatttctgatgttagtgtcggcaggtcggtgaagttggaaatggtggactcggagtagttttagagggaggtaactcacggctctcccaggagaatgtccaaagcagcctcctcccatcagataaattattaaccaccaatgtgtaccctgtcttgcagagcactctgtcgctgcagcaaagggctttctgatttggtgctcgtcacaggtctatttgcacagagcaaacccacctgaaatgctggggcagactgcctgttggggacagggtgggcccactgaggagatgaagattgctctatacccttcttgttgttttctttttttcagttgttttttggccgtgccacacagctttcaggatcttagtttcctgaaccagagatggaactcttgccccatgcaatgggagcttagagtcctaaccactggactgcctggggagtcatggtttctgtccttgttgccctgagctgtgagtcatcacacagacacgggccgttgcctctgtgtctcatcagatacaggaatcttgctgtcaagacaaatgcagagacttccctagccatcccagtggtcaaaactcggtactcccagtgcaagggatgagggttcaatccctggctggggaagtaagaccccacatgcctcacactgcagcaaccaccaaaaaaattaattaattaaaaaataaaacaaagatggatgcaaaaataaaagatggatttagaaggcatgatgaagcatttgatttgaacgttaacccccggtgatgggacaatactccggaggcaagtggttgggatgtgaccacgttaaagtgaggattttctgttgttagggattctctataatttgagcggatgtgaatttctttccagaaggttacggctgtagactggccttcctgtctggacagcattgccttcagggccatctggacaagcctcagaaggtttcgtctcccaagactctgcctctggaactcaggtcacacttggggaggcatcttacaagtggtttgcatttcacctccccgtgacaatttaaagaaacagaaatgcattaccaaacgatgaaaaccagcattattttgaagaaacgggtcttgaccatggctcccacgcgtctctcgttctccgtgtaaatgccttgtcttcccttcagtaaggaggtcactgtggagagcagaggggaacgatgtgtgatgttcatgatttgcaaaggccagcaaaccagatgggaccccgcaagtcaccctggagagcaggaggcaagataccacccatgcctctctcaccactgcatggggtggggcggggcgcttctcagacactcgggggaatacatagcttttaaaggtttactttgaagtctttgtggcttccctgatagctcagatggtaaagaatccccctgcaatgcaggagaccccagttcgattcctgggtcgggaagagcccctggagaggggagaagctacccactccaggattctggggtttctctggtggctcagctggtaaagaatttgcctgcaatgtgggagacatgggttcaatccctgggcttgggaagatcaccctggagaagggagaggctacccactccagtattctggcctggagaattcctcggactttatgagttggacatgactgagcaactttcactttagcttttgaaatcatttagatttatataagacatacagagatagtagactccccatatagctacacccagctgcccccagtgttaacgtcttccacaaccacacgttggtcagcatgaagaacacaacgctggtacagtgctgttaactacacctccaattttatctggattttattcattcaggaactgtatttttaacaggttatactttttatctttataataaaaattattttataaatataaaatataaatataaaaaattatttttattataagaataattcactaggggacttgtctggtggttcagtggttataagattccatgcatccaacacggagggtgaaggttcgatctctgatcagggaacaataatgccccatgctgaaaagtgtagccaaaaaatttaaaaataataaaaatttatccttgatttctttcttttttagccaagactctctgcacgtgggatcttagtttcccaaccagggattaaacccaggtcccctgcagtgaaagcatgtagtcctaacccctggacctccaggggagtctcatatttgctattttaaaatgtcgaaagagttagcattcctcctttagacaagttgaaaaatataaaaaaagtttagaaaaaagttaataacctatcatccccccaaagacaactactattagcatcttactgtatttctttccagtgtttttttctacactttgttttcctttatttgatgtaattgaatcactattttttaatcactatgttttaatgcaatggttttaaaaaagctgtatttggctcagacagtaaaagcatctgcctaaaatgtaggagaccagggttcaatccctgggttgggaagatcccctgaagaaggaaatatcaacccactacagtactcttggctggaaaattccatggatggagaaacctggtaggctaccacccatggggtggcaaagagtgggacacgactgagtgacttcactttctttctttctaatacactatgggggttctgtgttttccagtttttcttgcagtagagttgatttccaatgttgtgttagtgacaggtgtacacacactggttttcaacgcagatacgaagagagagacccaaagagccttggtgatgtctccctaagtagcagagcatatcgcttaaagttctgcaatccacagtcgatcgtccagtgacctttctgcggaggtgtgtttctttatcctgcccatgagggacccacaggacaagagggggctggagccttgccccagggctcatctcctcaaggatggggtagggggctggaatgcagtccccctcctctgggtctgctgactcaccttcttgcccatatctttctggtgcctctgactcatgtcctgtgggccccttcctgttcctgcccagctgggagaagacacgggcccagacaacatggggatagccctgtccatctccgcccctcgccaacggctgacctttcctttcctctcctgttcccatctccccctccaccagttttcaaggacactgggtctttgggggcacaccaaggacagacccaggatgagtccaggtagaagggaaaaagtccacaggtccctgggctgtgcactaacgggtgctggcaaagacttcatctagcctatgactgagtaggcttgctccctgtcactgatgtaaacccactcactctcctcaactttattctgctcgtctctccaggatgacagatgaggtcagggatcctagataatgactggggcccaagacctggggctcatccccgtggcctcatccccagggaagcttccctgccctttacctgcggtcactgtcttttggaataggatggggttgcccacgaggaccagtagcagcggcaagtatgtggtgatgtagtgagggatggcgtgctccaggcccctctcgcacctggtggggggtggggggagagaaaaaccgaggcattctccaacaatgaggctttacctgaaataacccactgctttatttgaaatccaagataagaggacccaaagtgcaaagggaaatgcacaggtcacttctggctgccggaaggaaacctgactcacatctcatgtctgtggacaagcaagtaagtcacagaaggagaaggaggatcaatcacagttctgtcttgtctcagaaagcgggccgcttttccagttcccagccagaaaaaaagtaaagacaggaaaagatgggatggtggatgcccactcccaccacaacccctctgtgggacccctgcaaagaaaacatgcacagttcaagcaagacaaaggcactcaacagactagttaggtctcagcactttactacgtgctagacctggctgacatcatcaataagatccaagctctgcccttgaacaactgaaaacacccaagcctcctatttcttgttctcacttgttctcaaggtgacccataatcattttggtggttcttttcggaaagaaagacaggaatgtctactgatgggttgaatgacacatccgtcagcaacaggacatggtggtgtgccacacacagctatgttaccaaggccgggagtgtcactgaacaaatgcgtaatgtagagaaagtggcaacgggggagatggcatccaaaggagaagttgctcaggtccgaccccagatgaggtggaaaaccagaggaaggcgcagccctggaggcccgcgaggacggcatgataaagatgccggtgctttcatcagtatggagtgcgcacgccagagacgaaagtggcaggagaatgcacgaaaccaggcatgaacaatgcagtgcccaccttttgttgccctaaggatggcaataccatgtgaagatggtgcgttcttttttaaatgaagctttcttcttcagctgtgaaagctaaaccatggtctacaaggccttgaggggagaaagggaaacaggaggaacaaaagatgagattcgaatgatgagggacagatgagtgagggtgggagcctgcacagtgctctgaggatgcaaatgatgaagggtggagatgatggagggtggagagatgatggagggtgcagaggagatgatgggatggtggagggtggagatgatgggggatggagacatagagggtgatgatgaaattaaaagacttactccttggaagaaaagttatgaccaacttagatagcatattcaaaagcagagacattactttgccaacaaaggtccgtctagtcaaggctatggtttttccagtggttatgtatggatgtgagagttggactgtgaagaaagctgagcgccaaagaatggatgcttttgaactgtggtgttggagaagactcttgagagtcccttggactgcaaggagatccaaccagtccattttgaaggagatcagccctgggtgttctttggaaggaatgatgctaaagctgaaactccagtactttggctacctcatgcgaagagttgactcattggaaaagattctgatgctgggagggattgtgggcaggaggagaaggggatgacaaaggatgagagggctggatggcatcactgactcgatggacgtgagtttgcgtgaactccgggagttggtgatggacagggaggcctggcgtgctgcgattcatggggtcacaaagagtcggacacgactgagtgactgaactgaactgaactgaatgatgatggaagaggagatgatggagggtgaaatgaggaaggttagagaagatgggatgatagaaggagagagtactaatggagggtggaaatgatggagggcattttgaaaagaccctgatgctgggaaggattgagggcaggaggagaaggggacagaggatgacatggttggatggcatcaccgacttgatggacatgagtttgggtagattccgggagttggtgatggacagggaggcctggtgtactgcaattcatggggtcacaaagagtcagacacgactgagtgactgaactgaaagatcatggaaggttgtgatggtggaagatgagatgatggaggtgggagatgatgggataatggagacgatgagataaaggaggtcagagattatggagggtggacatgatggtggagataattatggatgagatgatggaggtaaagacatgtgatgatggaagttggagatcatggagggtggagatgatggaatgatggagggtggagatgatggaggctgaagatgatgggatgacggagggtgggaatgttggagcatagagaagaagaaggatggagatgattgagggtggaaatgttggagggtggggatgaggcaaggggaagatgttggaggatgagatgatgcagggtgggcatgatgggatgatggaaggtggagatgatggagagtgaagacatggaatgtggtgatgatggaggaggagatgatggaggaggagaagatggagatagacatgatgggatgatggagggtggagatgatggcatggtagagggcagactgatggatggtggagatggtggagggtggacatgaggcagatgagatgatggtggctggagattatggaggatggagatgatggaggatgaaaatgatggatggtggagatgatggagggtgggatgatgggatgatggatggtggagatgatgaaagatgagatgatggaaggtggagatgatggagagtagagatgatggaagatgagatgatgagatgatagaggatgagatgatggaggttagagaggatgatggaagttgcagatgatgatggttgcaggtgatgtagttacagatgttggagggtggggatgattaagggtggacatgttggagggtggggatgattgagggtggagatgttggagggtggggatgatatagggtacagatgttggaggatgagatgatggcctatgagatgatggaagatgggcatgatgggatgatggtcggtggagatgatggaggctggaggtgatgcatggtggagatgctagagagtggggatgattgagggtagagatgttggaggatgagatgatggagagttaaaatgcttcagggggaggccctgtgttaatcttggagcacctgggctcaaataaaacagccccaggatcccacaggtggaggtgagtgataaaaattccctttccgattaagtgcatccctctgtaacagctgcttaccctgtctttgtccttttaaggctcctggggagagcagattattttgaggggtctacacagaggcctggaagtagtcatagttaacaaggcaataggactgtggagacatttgagtgagcagctgcaagaaattaagaaagatggggagaaacagtctacaccacaggtcagcaaattttttctctaaaggaacagataggaaatattttaggctttagaacctatgagtagatttgagtcaaatctactcaactctaatggataaagcagccatagacaatacatacacaaatgggtacgggccgtgtgccaataaaactttatttacaaaagcaggcaaagggctggatctgtattaagggccagatctgtattaagggctgtgctgtactgatccttgggtctgtgctgtgttgtgcttattcactcagttgtgtccgactctttgtgaccccatggactgtagcccaccaggctcctctatccatgggattctccaggcaagaatactggagtgggttgccatgccctcctccaggggatcttcccaacctaggaattgaacccaggtctcccgcattgcaggcggattttttactgtctgaaccaccagggaagtccaagaatactggagtgggtagcctatcccttctctgggggaacttcccaacccaggaattgaactggagtctcctgcattgcaggcagactctttaccagctgagctacccagaaagcccctccctgggtctacaccaccttaaaaccaccaagagaccgtgttcaacctctgattttcagttttccattaaaatgtagaatatatctccttagagggaccttgaggttttacaaatggtaaagggcaggggttcagacttaaagaaatgtctgagacagtttcagaggccacatctcccagtgtgtgttcagaagagcacaggatggagacatgaaaaaaaggtgtagacagcagaagctgaacatgagctattctaaaagcaaccctttgagtctcccagacatctagaactcagccctgggatgttcaagtcacctgcatgcccagaggaagctggtttgaaggattaaaaaaaaatcaagagcgggtaggagggagccatgcccatcacaggcatctagggagaagagatgcacctccagctctgattgtgcctctgaggttgtttttttgtttgtttgtttaaacacagccctcagtacagatccagccgtccgcctgcttttgtcaataaagttttattagcacacagccatgcccacttgtgtatgtattatctatggctgctttacccattagcgctgaataatgaaagtcacttaacatcacactcaccattctacagtgaacaagtcagcggcatttaggacatccacggtgctgtgcaagccccacctcaagctctgcatccacactgggcacagcactgacccaacacacaggtgacgggcaggagcaggggaccctggccggctcgaggagccaggcatgtgcttgcagctgcgcagatcctggacgaaggcccgcccacccacgtggggtcagcacccaggcacgtcctgcaggaggacacccacgggggttgggcatcgggggagccccggctcacctggccacggaaggatagtacagcatgagggcgccctccacgctcagcagggcggccaggccccaggttatcaagtggtacagcaggatggtgctgggggagggagaatacaggtccagaacctcaggtccagtacctgcccggccccgcactctgcgagcagcggtaaaacacatgcagagcaaactctcagcaaacagccccctgattgtgcctctgaggttgtttgtctatttgtttaaacacatccctcagtacagatctggccctccgcctgcttttgtaaataaagttttattggcacacagctgtgcatacttgtgttatgtattgtctatggctacttcaccccttagtgctgagtagtgaaagtcacgtgacatcaaagtcaccattctacagtgaacaactcagaggcatttaggacatccacagtgccatgcaagccccacctcaggccagtttcaaaacatgttcatccccctaaaaggacacccacacccattcaggggtctctccccatcacgcctgcacccccagcccctggcaaccactcagctaccacctctctctatggattcgcctattccggacatttcatccaagtgaaagtgtaaaaagtgtggccttctgtgtctggtttgtttcccttaacctaaggctttcagagtccgtctaggcaaagctatggtgtttccagtagttatgtatggatgtgagagttggactataaagaaagctgagtgctgaagaattgatgctttggaactgtggcattggagaagactcttgggagtcccttggactgcaagcagaaccaaccagtccatcctaaaggaaatcagtcctgaatatcctttggaaggactgatgctaaagctgaaactccaatcctttggccacctgatgcgaacagttgactcattagaaaagaccctgatgctgggaaagattgagggcaggaggaaaaggggacgatagaggatgagattgctggatggcatcaccgactcaacggacatgagtttgagtaagctctgggagttggtgatggacagggaggcctggcgtgctgcagtccctggagtcacaaagagttggacacgactgagtgactgaactgaactaactgaactgaaggctttaagattgacaggagggacaggcatttcaggtgcacagcaagaataccttgccgttttgattgtgccttcttccttttataaaaatgagctggcataattcctcctagggacctagctcccccagtagcaaggggttcccagcctctgtccttcctgaagtcatctcggtacctaacatgcaagggtcttaatgctcagtccaaaccacaaagaaggtctctgagaaatgggtggccatctgacattccaggagagcaaggagactttctatctctctccactgccacccttgatcattccttgcagagttgatactgttaccacccccatccttacatccttaacaatccccatccttcatctctgtacacccacacaacgccaccctgtccccccgaaggagcagaggcagtaagccttgcaggtgatccagagaggttcagaaacttgccaacagtcactcagtgactgaggtgcgtgagtgagggtcaggaacttgaacctactgaggccaaggcactaaccactatgtaattcctcctagacggccccctctccagctccagaattcttgggctctctatgtagcataacacatccatacatacttcttagaacttcttcctatacctttagataccatcagaatcatgccaacccttttttagtatctgtccagttccaaatatgaaatttactgaattacttatttccacggttttaaaatcctcagtttttttgggggggcacctggagaatattttgatatatatatatatatttgacttacaatgtttcaggtgcccagcaagaataccttgctgttttgattgtgccttctgccttttatacaaaaacgagctggcattagatgtttcttggtggagtgcccgctgggaggttctgatggactgtgtctcagttcagttcagtcgctgtcatgtgcaactttgtgatcccatggactgcaacatgccaggcctccctgtccatcaccaactcctggagttgactccaactcatgtcctttgagtcagtgatgccatccaaccatctcatcgtctgtcgtccccttctcctcctgccctcaatcttttccagcatcagggtcttttccaacgagtcagttgttcacatcaggtgcccaaagaattggagtttcagcttcaacatcagttcttccaatgaatattcaggactgatctcctttaggatggactggttggatctccctgaggtccaagggactctcaggagtcttctccaagaccacagttcaaaagcatcaattccttggcgctcagctttctttatagtccaactctcacatccatacatgactactgggaaaaccataaccttgattagacagacctttgttggcaaagtaacgtctctgctttttaatatggtatctaggttggtcataacttttctcccgagaagtaagtgtcttttaattgcatggctgcagtcaccatctgtggtgattttggagccccccaaaagaatgtctgccactgtttgcactgtttccccatctatttgccataaagtgatgggactggctgccatgatctcagttttctgaatgttgagctttaagccaacttttttgctctcctctttcactttccgtgtctaccctccagaaataagagtgctcgtggcctctccaaccttccccttgggcaatgagctagggcagaagaccccggccgctcgcactgaatacctctgtccagccgacctctgggtcaccaggtaggcatccactgcgtagcagaacaaccaccagaagcaggcgctgtacagcagctggatccagagctataatcagaagaacggcatcccagccccagggtgcaggctacgggcggtcccgccccccccatgttatcccagcccgtgggggtgggctccgggtggccctgccccctcccctgatgtcatcgcgtgtccctgaaagccctctgcagacacatggccacccttggaagcccaggctgggatgtggcctagaggcaggcgggtgcctgggtttccccgtctgctcagccggactggtccagcgagccccgcctggtgctcacacgtgtaggcagagagatgaagagctcagagacgaaaggcctggcctggcactttgaaccagacacccttctgctgaggacgaaagaagaggatgcgcaggaaggaccttcccaggagaagcaaggcagggacgggcttcagtgctaagtcctttcaatagtatctgtctctttgcaaccctatggactgtagaccgccaggctcctctgtccatgggattctccaggcaagaatactggagtgggttgccatttcctcctccaggggatcttcccgacacaggggtcgaacccgcatctcctgcatatgcaggcgggttcttcacccgtgagccacctgggaagctccagaggcacctggagggtttgttaaatcacaaacaggccctcccccctcagggcacctggtcagtggggtaagggtgggggtctctgagcttttctaaaaactgcactgggttggtgggagggtcaggactgtactttgaggactcagtgtaacacaggagagtaaaggggtgcggagggggtgccaggggagccacacttactgcactccccacgcagaagacggctggccacacatctgtcctgttcacggcggagatgtcatccacgaaactcggaaaccctaaccacaccgcagatcggaccacgacacctaagggacaaccaggtgataatgctttctttatatctgctcctgactcagacctaaaggggacccggtgactgtaaaaatgatggatggacaaatggacacatggacagatgaaaggatggatggatagaagatagggagggagaaagaaagacgtgaggggggcagagatgatgcgtgaaggagagacggggggaagaaaaaagattcagaagataaggattacggttgcaggcaatcccaggcgctttgatttccacttccactgacgttccttattttgcttgtttgttcatttgcctctaaaacccaactgtttcttggctgtatttttagtgtccagcttaactagtcctcgtatgaaaaaaaaaaaagaacgactgaaaaaaagcacattctttcttaatttttttaaaggatgtattggtttattttattgattggtctttgttgctgctaacgggactttctccaggtgcagcgagcagggccactcctcttgggcttctcgtctctgtggcctcccttgtggagaaccagctccagggcacctgggctctagtaggttcatcacctgggctcagtagtcatggctcgtgggctcagcagttgtggggcatgagcttagtcactccatgccatgtgggatcttccccaaccagggatggaactcacgtgccctgcattgcaaggtggattctcaaccaccagaccaccagcgaagtcccgaaaaagcttattctgaagttgtagagttcttccattcttttaaaaaaatagataaataaaaattgaagattttcacaagttagctcttggtaatctacttctgacatttattatttgtgagttttccttgctcttagatccagatatctaatttgcctataatcagtatccacactcgagggttgtgaggtttgtgataacgtctgtttgagtgtacactgtataacgcaaaatgctcaaggggaaatgaacagcacagacttggatactagcacaatgtgtatagttggcatacaaacatatacttcaaattaggcaaccaaatatacactctgtcctacaccaccaaagggaattatggacactaaaatcctaaagatgttgcttctcattcttaagcacaaataacaaaaataatgttttattccaaatagtgctttgttgttttcactatagagatctgctttgagctcagtaaacaccgtatgtatatatttttgcatgtatatgaggtgatgggtgtttaggaaacattttgtggtaaatatgagtcattgtcctgggtatctaaatgtttccccgtgctgtatgtcagtgaattctcagtaaaactggggcgggacttcccgggtggtctagtggctaggattctgtgctttcacccccatggcccagtttcaatccctggtcagggaattgggatcccacaagctgtgcaatttgtccaaaaaaaaaaaaaagattttaaaaaatcctgagggggaaaaaaaccacactccatgcaataggcatctgtatttctttctgtctttattttggctgtacttggtcttcgcaggctttctctggtttcagagagtgggggctactcttcactgtggtacgtggacttctcaccgccgtggcatctcttgttgtggagcgcaggctctaggtgggtcatgggcttcagaagttgtggaccccagtctctacaccataggctcagcaattgtggctcatagactctggagtatgcaggagcctcccggaccggggatcaaacctgcgttccctgcattggcaggcgggtcctttaccactggaccaccagggatgccttggcatctgtgcttgttatttttcagcgaggaggtctggacaccccctgccttgccctgactcctgcttctgttcatttgcccacagtgccatgtaccttccttcgaaaggcaaaacgatgtaccaatcttatttcctgacccctcaaaaggtgtttggctgcaactctatctccagatattcaagttactgaaactattaagacgcttcccccaaatgcttcagcagaatcagggagaaaaccaatttttaaaaatttaattatcctgcaccacactcactttgtcgctaacagaaaggaatgtattccttcctgtcttactccagtctgaaaaagtgactacaagttccatagcatgtgtctggagtcaagattcttgagcgtctccaagcacaaaacagcaagaggaacaggagagccaacccctgggacacatccaccaggcatctggtcaaggtgggttgaagctgcggcaacaccctcaggacacgaggtggaagccattcaaataccatcagagcctctccttcaagagcagatgattccaacatggccagcacccgtcagcactcacagaacacggacgctctttggatcctgatttgaatgaactcacggaatactggcatatgtgacatgcctgaacatgtagcttgacatgaaggaatcagttttccttattttttaggtggtagtgatatcagtgtgatttatatatatatatatatataattacatattataatatgatactatattaaatatacacttaatataacatattgggcttccctgatggctcagagggtaaagtgtctgcctgtgatacaggagacccgggtttgatccctgggtccggaagatcccctggagaagaaaatggaaacccactccagtacacttgcctggaaaattccatggatggaggagcctggtaggctacagtccatgggtttgcaaagagttggacatgactgagtgatttcacttcactaatataacatattaaatatattatatattgtaatatagaataatattgtaacatacaatatatggcttccctggtggctcagatagtaaagaatcctcctgcaatgcgagagacccaggtttgatccctgggttgggaagatcccctggagaagggaagggcaacccactccagtattattgcctggagaatcccatggacagaggagccttgtgggctacagtccatggggctgcaaaaagtcagacatgagcaagtgactaacacacacacatatgtggtatacagtatgttacaatagacatgttatatattataattatgtatataattatatatacatatgttgaattcttctatagttacatactgagatttgtgtggatgtcatgatataaattctgggatctgcttcaaattagttcagtggggagtggggtacagggatgaagtatagaggaggctaggtgatgagaacagggggcttattatacagtctctctacatttgcatatatttaataaagtccaaaatgaaaagtttaaaaggtcagcagtattgagcttagagtttgtaaaatgtgccatgctagggttgaaaggaggggtcagcaaagtttctgtaatggatcagggagaaaatattttagggtctgtggcccacagtttctctatgcaatacccacttctgccctcgtgggggaacagggtgggtggaagatgttgccccaacagtgcacaagtgcagggcatggctgtatccccatcagactccacttacagacgctgacattcacatttcacagaatgcttacatgtctgaaataccgttgctctgtagattttcttaaaagtatttatttacttggctgggccaggtcttagttgcagcaatgtgagatcttgttccctgactagggattgaacccaggtctcctgcattgggagcgcagagtttgagtcactggaccaccagggaagcccctgttctgtagatttttaagctttgagtgttaagccagctttttcactctccttttagaaagggagaaagtgaaattgcttagttgtgtctgactctttgcgaccccatagactgtagcccacaaggctcctccatccatggaattttccaggcaagagtactggagtgggttgccatttccttctccaggggatcttcccgacccaaggatcgaacctgggtctctcaccttgcaggcagaggctttactgtctgagccaccagggaagtccccgtagatttttaaaacacacttgaacatgtaaaaacattcttaactcatgggcggtgcatagaaaagcaggctggatttagcctagagactacaagtttgcacacctgtgatagaaaacccaaacttagatggataaaaaaggaaataaaaattttatcgtatatgtggagttttcttcctgattctgctacattgctttggaaacaactgcatgtgtgtgagcacaggcttgatattattaactattagtctctcattggtggaatgatcatggaaccattgtattttctgggttttccttcacagcactgcctaaagcttccctagtatgagcagtaacaaatacatcaaagtgttaaaaaaagaaaaaaagaagtccctggaagcaacttttacccatcttgtactgcagaatccactcgtcctccgtagtgtccctgggaggccgtctctggatcagtcctccaatccccgggccaggcactctcaaccacgcacaagcagtacccactccctggggcgggcatcctcatttgcacatgtaggggtccccactcaacgggccatgggccctaaaacacacaccacccgactgctgggcacccccactcatacacagagctccccacttgcgggccccatgccttcaactacacacagatgggtccccacccatggacggggtgccctcatccttgcacagaggggaccccacccacctgctgggcgccctcaaccactcacagatgggtccccccacacgcgggcctggcgtcctcacccgcatacggagggtcccccagtcccggagaccaggcgtgctcaattctgcaaggagtggtccccatccatggcacgtacatcctgaaccatgcacacgactcccggaacgggtatccttcccttcacacgaagggttccccaatcgaggaccgtgttccctcagctcccaagaaaggggtccccactctcgggccccgccgcctccactgggcatggaggggttcccaccgcgggccgcgggccctcattcgcgtaaggagaggtccccattcgctggccgcgtgccctcaacggcacacagaggagccctgacctgaggtgtgcatgccctgaaaaacgcacagacagctccctgctcgcgggccaggtgtccccaaccgcacacgcagtagtccctgccactgggctgcgcccttaaccgcagacagaggcgtccccactcgcgagcagcgtgctctcaagcacacacggaggtatccccactagagggcctcgggcctcagctgggcatggagggatcctgacacgtactacgcacaccctggaaaacgcacagccgggtcccaactcgcgacccgatgtcctcagctgcacacgaaaggcttcccacccacgggccgtgtgccttcaaccgcgcatgcagcggtccccgccacaaggctgtgggccttcaaccactgacccagtggttcccactcgcaggccgtgagcccacaagcacacagagagggttcccactcacgggccacacaccatcaaccacgcacggatgggtcctcaaggctgtaggcgcgccctcaagtgcacaccaagtgtgccctcaaccccgcacggagtggtcctcaccgcaaggctgtgcgccctccatgcccatgaaggtcccactcatgggacgcgcggctctacggtgaggacccctccatgtgagggtgaggacgcctggcccgcgagtagggacctatctgtgcgtttcctagggcacacgaaccgcgggtgcggacccctccatgtccagttgagggcccgcggcccatgagtggggatctttccgtgtgtgcttgaaggcacgctttctgcgagtggggacccctttgtgtgcagttgagggtgcatgaagggtccactcatgggagttgagagctctcaactgggcacagagaggtccccactcgcagacccctgggccgtgtgtcttcaaccgctcatacagtggttcccaccggcggtccatgcgccctcaactgtgcatggagcggtccccactcgcgtgcagcgcgccctcaagcacatacggaatgggcctcatgggctgggcgtcctcaccgcacatggaggggaccccacccgcgggccgtgtgccttcaactgcatccagaggggtccccactcctgggccctcaactgggcatggaaggatccccaccacagtatgcgtgccctcaactgtgcaccaagggccccacccgtgggccatgcaccctcaaccacgcacgcagttgtagtcctcaccacaaggctgtgcgccctcaactcccatgaagggcgtccccactcgcgggccgtgcgctctaaattgggcacagagaggtccccactcgtgggccatgggtcttcaaatgggcatggagaggttcccaccccgggccgtgtgccttcaactgcgcacacagtggtccccacctgcgggccgtgcaccctcagctgcacacggaggggtccccactcgcggacagcgtgccttcaagcacacacggaaagatccccactcgcgggcggcgggccctccactggacacggaggggtctgcacccgcagtgtgtgcgccctaggaaacgcacagatgggtccctactcgcgggccagacatcctcaccctcacacggaggggtcctcaccgtagagccgcgcgtcctcaaccgcgcaggcagtggtccccacctacgacgggccgtgcgcccccaactcccaagaaggagtcctcagtggcgggccgcaccccgtcaacctcgcacagaagcccacccgcggggctctcaaccgcgcacgtaggcgcgccctgaaaaaacgcacagacgtgtctctacttgggggccgggcctcctcacccacaaactgagggagccctactcgcgggcggcgcgcgctcaactgcgcacggaggggtccccacctttgagctgcacgccctcaacctcgcactcagtggtccccacctacgacaggccgtgcgcccacagctcccacgaaggggtccccactggcaggccgcaccccgtcaacctcccacagaggaccacccgtgggccgcgggctctcaaccgcgcacctaggcgcgccgtgaaaaaacgcacagatgcgcccctacttaggagcccaacgtcttcacccacaggctgcgcgcactcaactgcgcgtggagaggtctccatccgcgcggtacgcacgggccctgaaccacgcacggaagggtccccggccatgcgccctcacctcccaagaagaggtccgcacccgcggaccgggcgccctcactcgcacaccgacgggttccccacccccgctccccgcccgcgcgggtcgcgcgctaacccaagcagccgagcaggtcgcaagcggtggcggcgcgcacgatgcgcacggaggcggggccgcgggccgaggtcgctggcgaggccgaggcgatcccggggcccgcgggcaggcgcccgggccgcagctgcaggaggccgagcgccaggcggagcgcgccgctgcccaggcatagcgcgtggaaggcctgcggctggaagcccagcgcgagctgcgtggcggcgtcccgcgtggggcagcagaaggtgcccagtcgcggagaggccatgggtcgtgctggggacgcgcgcggctcgggtctgcctgccgacctgagtcatgtgcttggcgcgggggccgcggggagggggcgtcatgtgccctgggcctccccgcagcccccgcccgatcccctccccgcgctggcagaaaaggcgccaggctcggtgagggcagcgcggaacgccacgaggcctcacgagggtgatgcttggtagcgaggaggaggggtggaggcagagagctcagggtcgggaagtccgctctctcgccggtcagcaggccttcccggggggcgggggaggttaattatccagagcccggagccctcaacagtgctgtctcatcttaacccatctcccccagaaagcacgcgctcttgccagatctgagcagtttgagtctctgacatccttcattttgatccgttgccagttcataaacagtgaccctgccgtgattagcatgaaaatacttcttttctatgacccctctccacaacggaaatca

SEQ ID NO: 67 - DNA, 39095 bp, Hippotragus equinus
  source 1..39095: mol_type = genomic DNA
aaaagagctcatctaccagcttcctcccatcattttttccctccccaaacaagacatggccaagatagtcttttaagacttaagagccattttattttaaaccaaagaatgggcttgcacaaatgcttatttgaaagcataataatgtataatgagaagtttgtgccttttgctgagatgattttccgcccccctctcctgcctctaggaatgattttctttctcctttcttatcacaaaggctcagaacaaattctcattgttccttgaagagaaagtctcaattcttctagtgccctgaaaaagctgcaagtgtgtgatattaatgttatttccagctggagacaagctggagaacaccagacctgcgctccagtgagcctgtgcccaggaccccccagaaccgccattcccgaggcccactcaccatctgtagccctagcccctccccagtgaaagcagtccctgggcagatgagccccagccctgcaccctccaacatggcagagggtgtcggcaggttctgcctgagagtcctccccccactctggctctcaatagcaaggaccctcagcagtggggaggaccccacgggcctgttaactgccgagtggccatgggggccaggccagcccagcacctgcacgctcaccccgctaccagcagccgaggcccctgtatgtggggtgggtgcatctgcaggactcacttcggagaggcagtgagagcagcttcacatcggaaaacaaaacggaaagtgtttcatctccgcaaaagccaaggcgaaccaggtgggtcactctgaccataaaaacactgggaaacagaaagactctaaacttgtgaatcatcaacagagcaaacaaaaataatagagctgtgtcttggagaaagtaagggaagaagaggcataaacatgtccctttctccagtctcagcaccactgcctactgctcttttccactaccttctatccagttccacagcctcacctctgccagccactctatcccctgtccagagcccggggaaatccattgtactgaaagggaattacatttcgattgttgaatagttcacatggtcttaagaagtaccagaattacaagatggtaaggaatactcaaagagagacagttattataaagcccaagagtattaaaaatccctgcctctgagttccactagcagtttctgtaactgctatgcccactcctggtggtggtgactagttagagtgtttggaaggaccagagtggcgtaactaggacttgaacccagatggatcagagtccaaattctgctctcactgtactctgctcactcttgctggactggctgtggccagcttcctctcgaaaggaagtttttttcctctgctgcccacagctagctctcttaaggtcctttgtgtgtgcaaacaaacactggtggtgccttcgcccaggagagtcaatctcagggcctggaggaactgaccagcagctctgctgagtggtgagttgaggtgtgactgaccttggatgtagaattttgaatccaggctcaccttggccctcctgatgtgctcctcttctgtcttttctggagaacaatttaaagggccccttctgccactactacccagcacaggtgatgacttggtattctgaagtcgtggaggtaagtggcagacctggtcaccacccacacaggcactgcctctgagcactgctcctcctcccccagcacccagagctttggaagtttctcttcaccttcccagactaaataataaatccagtaactatggccctcagggtagtatttgcaaatatcactgtaaaacaaaaaaagccaaaatacaccaagccagctgctttggcatccactttcttctaaacatcagagtagtcccaggagcccgggaagcagtagggaggagctgaccaagttccacaggaccagttcgagagtactgtcctgtgcatccagcagagaaaagggccttctgtacagaccacatcattctcgttattttccaattactagtcatgaaaatattctcagatgcttttctacttataaatgttatatagtaaattatacttttggaagaagcaaaaagaaggcttcgttttattcatctgaaagtaacaaaataagttcaggaacacctcccagggaaatgttctctgtgcagggggtttgaacaggggttaatattttcttccatggaacagattatattaaggtttatatgagcctagtaatggcagagtttgattccacaaggtagcttatattttgaggtagtgttttgtaagtaataaaatgtggctactctaactttctgttctcagggtgttctgtggggaaagggaggccactattgttcacattacaccttgacctgaagcctggttgctgatgaactcagatatgctggggatctttggtttcatgacgtgctaccttcttcctctactttcttccccataagtattgcttcaagcactccaagtggaaattcaattttattattcaagttagatgttattgtctatttaaagtaaccattagctgcaaacaggtaaaccctaacctgtcagaggcctaacacaattaaagtttatttcttgctgatagatcacggaaagttcagttggtggtgacggataaagtggacagtgtttctcttctctgtagtcctttagggatccagactgatgtagactttctgtcctcttcagcacttggcctccaaggtcgctgtggcatcagtaggcagttggacgtcagggaaagagagtatgcagatcatatgagagtattatgggagggtctcacctggcataaattcctccccctcagttctttaggtcataagtcagtcacatagtcccatcgattgggggtctagaaaatgaagtccctggctgggcagccacttctccacaacaattatgttttgttcctacagattggttgaatgtctgtgtccctctagaattcacaggctgaaatctaacccccaacatgacagtacttggaggaagggcctctgggaagtgattagctcataaagatggagccttcatgaatgggagtataaaagagaccccagagggcccttctgccccttccaccatgtaaggacatacccaaagaacacagcctatgaaccaggaggtaggctgtcaccagacaccgaatctgccagaaccttggtcttggacttcccagcctccggaactatgaggaataaacttttgttgtttacaagccacccagtctaaggtatttttatcatagcagcctgaatggactaaaacatttgtgaaaaaagagcacaaaacttcggtggacagctaggaggccagagaataaaccaacgatactgggtccttccaggtgatttgccatcaagcgagtgttatacactatgtggctgctatctaaattcaaaggattatttttaacatacttcataatgacctcaaggagctttcttttccatctccctcatttcttaaatccctcttctagtatttggcttggagaaggaaatggcaacccactccagtgctcttgcctggagaatcccagggacagaggagcctggtggcctgccgtctatggggtcgcacagagtcggacacgactgaagtgacttagcagcagcagcagtatttggctgatttttagcagaaaatactttgtgttgtcccactgccatccagttaggctactggatactgtgcccagtatctactaggcacatcaaaaataccatttaaagcctcacatagcaaagtggcgagtcatagaggcctcagctgcagccaagatgggtacccatacctggagatcccactgattgaatccatctgaggagagcaggaactcgaagaaggctgctctgacagaaaccttgattctagtcccagctctctaccaactgacagtgagatgtcagacaagtgactcagcctctctggactcaagtgtccttctctgtaaaatgagggctttggattaagtgaacccaagggtcacctgaaactccccgtttccaagcctatgtcagatggtccctgttccaactgctattgtcttcctgtataatttcacacatattacacatgaggagaaaacagtaaaatatacatacatatatatacacactcaattcatatattaactatatctttttgagagttttcaaaactagccttaaaatttttgacactatttctacatatatccaaagtgcatgtgaagttagcacaacacattttgctgatggtttctctttttctggagatactgtcatgatttttctttgagttaattacgtgacttcttccatccagtttcttccaagcagtgatttagtgcaaatttaatatcgatgaagcatgccccaaggtacactcaccttgttactagtttttaaaagaaaaagattgagctcacttttagaaattagttaaatcaaactttaagacacatgcatggaattactacagcagcacctgatgtaacacagtagacttttatcatggtgtgaacctcatgtcctggaattcaactaattacaggtggtgcaggcaggaggtgggaaatcagagggacaaagaaaggaaagattcgggggaagcaaaagaatgaataatcaccaaaatgctaagggagatgccggaaagaattgaagagcaacctaaagggcaaatatgtggggaaatctaaacataaagcaatagcaatgtctcctgagatttaatatagagaattaaaaatgcattacagtagtagcatacatattgaaagcaggtaaatggaaagtattctactattctttccatttttgaggaagaggtaaaagtaccaatttatattaaactttgataagtcaaggatgcatattttaatcttcagggtaaccactaaaagaatattaaaagaggaattacttctaagtgaatggtgggggaagtggaatcataatttaaaatatttgatctaaaatcaagaaagaagaaaaaggcaacgaagaacaggtaggactaacagaaagcaaactgtaaaatgatgaattaaaacgcaaaattatttgcaatgttattgtcaatagaacaaatgctccaattaaaagacaaaaattttcagatgagataagaagaaacgaagttcaactaaatgctgtttgaaaaaaaatataaaatataaaaaggtaaaacaattaaggaaaagccatatcatgcaacgaaacgtaatcggctacattgatatgaaacaacaaatgcttttggaaaacaaaaagcaggctaataatagaaagggacatttcataaagaaagaaatttgatttaacagtaaaaattcttaatttgcctgcacctaatcccctggagaaggaaatggtaacccactccggtattcttgcctggaaaatcccatggacagaggaggctgatgggctacagcccattagggttgcaaagagttggacacaattgagcaactaagcacaatgaagtattctatgtaaagtaaaacctcacagaaataataggagaaatagacaaatccacaattatgatagatttttttacatattatacctcccagaaaatacaaagaacaaatttcacctaagtaatatatatagaacagtggagctaacaaatgaatacaaaatatttttttcaagagtacatggaaacatttacaaaactttaactacatgctgtgacataacgtttcaaaaaaattcagagaatggtaacatagaaagtatttctctgataacagtgaattacaggtggaaaactttttaaaagataactggaatacctacctgtgtctgtgacttaagaaacaaatctataaataatccatgaatcaaaaaaatcagaaatcacaataaaaaagaaactatttcaaactcaatggaaaatactacatattgaactttgcgagaagttcaaacttctggtaattaacattaacattttatcagactgacctttttgccaacacaattctaaactcttgaagagatacaaaaaaattcccagaaaaccacacacacacacacacacacacacacacacagctctttgaaggcaatagggaacagctgaacatctaaaagcaggcataaactgcaggagccaagacccttgaatgacagaaatcacacagggtaagaaccacattcatctggcttttcccctaaaggaattcccccacttcacaacaaaaagggaattgaggttaagcagaaagcagctgtgtattattagactgtggagtaagaaactggttttcaggaatgactgagcaactgaaaatggaagggagtacaaaaaggagaaacagtgaaaatgaaagtcgctcagtcgtgtctgactctttgcgaccccatggactgtaggaatgaattctccaagccagaatactggagtgggtagcctttcccttctcccggggatcttcccaacccagggatcaaacccaggtcccacactgcaggcagattctttaccagctgagccaccagggaagcccagaaatactggagtgggtaacctagcccttctccaggggatcttcccaaaccaggaatcgaaccaggatctcctacattgcaggtggattctgtaccagctgagctaccagggaagtcctggagaagcaatgggagaagcccagaaaagctggtgccaagtacccccaaatacttgactgacttctgaactgtgtatacgcagagtgagactccaaaactctagcagaaaaagagctggaagactgagagagcagcagagacagaaattgctgcccagtgctggggagagggcttgagttcacgtcctaccaagttagaggagcttggtaaacacttcagacttcccactgaaaccccaaaaacgccacaccttaagagtaaggaccacaccctcttaggattaaggaagaaaatgaaatatgccattctaacaaagcctaagatcaagcctgtgcaatcagaatgaactgccattgattcaactgcctcgcagaacaaaactcaacacttcagcggaagatagaattcagagtcttttcaatgcatcccttacaatgtctagtatacaatataaaattaacagacacagaaagaagcaggaatatgtgactcacagtcagtaatagtgttgtgttgagctatattggagactgaggcaacagggaaaaccataaataatgattacgtttgtgtttgaaattttgatattttattcatcatgtattttatattaattttgacttttaaaaacattaactcatatagtatgtatcctgattaccaattatttgacatctctttaaattttgcattcatgatgagtatcacattctcacctcagtcctcgtcctgaagccaacaaaggagagaatagagaaccataaaaataccaatagatttcttgaaaaaggcatgaaaagatgaaacaagaaacaaagaacagacaggacaaggagaaaacaaataacaagataacagactcatagacttaaaccatgttagtaatcacagtaaattggctttacatacaatctgacaatttagtctggcagagattatcagtctggataaaaaattagatctaactatatgctggctaccaaaatacacactttagatatgaaaacagaagtatgttaaccgtgaagggatggaaaattacatatataggagaggtaaaggggcttccctggtggctcagcagtaaaaaatctgcctgcaaaacaggagacccaagtttgatccttggatctggaagatcccctggaggagggcatggcaactcactccagtattcttcctggagaatcccatggacagagcctgatgggctacagtccacagggtcacacagagtcacaactgacgcaactgagcagagcacaggggaggtgaaatgtctcctcagccctctggagatttttggctgggactgacacaagcagattaacaggagaaaggcataccgcttttatttagtaattttttcacatgcacatgggcattcccacaaggaaaatgaagacccagaggagcggcagggtcgatgtgctcatatactaggttcaacaaaggtggcaattgtggaaaagtaactaagctatttgggggactaaagaaagctaagaattttttttaacaaagtctgtttgtacagatttctctccacctggactcctcatttctggagacaaggatgtttcttttctcctgatatgaggagggtgtctttcatacaggaatttagtttcatgccctgctttcaggaagaaaagcaaagtgcatctgctgttttcttccagtgcctttagctcaaaataatcaatataccaaagtgacatgtcctgaacttcttcacgtgccatgttaatactaatcaaaagaaagctgtgacagctatactattctcagacaaagtagatttagtgcaacaaatattgccagagattaaaagataatttcataatagtataggagttagtacattgagaataatgtgctaacataattataaagtctctcagtcgtgtctgactctttgtgaccccatggactgtacagtccatgaaattctctagaccaaaacactggagtgagtagcctttcccttgcaggcagattctttaccagctgagccaaaagggaagcccaagaatactggagcggatagcctatcccttctccagtggatcttcctgacccaggaattgaaccacggtctcctgcattgtaggcagattctttaccaactaagctatcataatgctctcataaatataataataataatcataaatgcttatgcatcaaataatagagcttcaaaataatatgaaacaaaaatgacataactacagggagaaatagacaaatccacaattatgattagagttcaaaactcttaatatttgatagagtaagatcacagaacaccattaaggatatagaataattgaatactgctatcagtcaacttaacctatttaacatttatagatccctcaacccagcaaaacgagaaaccatattcttttcaagtatacatggaacatttgccaagacagaccatacactagaccatcaataaatgtcttgataaaagtattcaaatcacacagagcatattttctgatgaaagggaattaaaatagaaaccaataacagaaagatacatggaaaacctcccaatatttggaaattaataacactttaaaataactcatgggtgaaaaaatcaaaacaaaaattagaaagcattttgaactaatgagaaatgaaaagacaacatatcagaagttgcggatgctgagaaagcagtacattgggagaaatttatagcaataaactctagttataaaaaataaaacctctcagatcaatgggtcagtttctaccttaagaaactattttaaaaaatagcaaattaaatccaaagtaaacagaagaaagagtaaatatcagcacagaaattggtgaaataaaaacagacaaccaatgaaagctgatgaaaccaatagctgttttcttcgagaaaaatcagtcaaatccttagtgtgacctgaatccttctaaatttattgaacagaatagagtccagaaatatatccacacatgtatggtcatctgatttgagacaaatatgtcaaagttaattcagtgatgaaaagatattttttcagcaaacaatgctagaaaaactgcacatttgcaaaaacaaaaaaaccaaacctttcctttacaccacatacaaaaatcaattcaaagtggatcactgacctaaatgcaaatcctaaaactaaaaaacttctggaagaaaacacaggataaaatctctgtgaccctagcttcagttcagtcactcaattgtgtccgactctttgcaaccccatgaactgcagcacgccaggcctccctgtccatcaccagctcccagagtctgcttaaactcatatccattgagtcagtggtgccatccaaccatctcatcctctgtcatccccttctcctcctaccttcaatctttcccagcatcagggtcttttcaaatgagtcagttcttcgcatcaggtggtgaaagtattggagtttcagcttcaatatcagtccttccaatgaatattcaggacttatttcctttaggatggactggttggagctccttgctgtccaagggactctcaagagtcttctccaacaccacagttcaaaagcaccaattcttcagtgctcagctttctttatagtccaactcttacatccatacatgactactggaaaaaccatagctttgaccagatggacctttgttggcaaagtaatgtctctgctttttaataagctatctagcttggtcataacttttcttccaaggatctagcatcttttaatttcatggctgaagttcaccacctgcagtgattttggagccccccaaaataaaatctgtcactgtttccattgtttccccatctatttgccatgaagtgatggaaccagatgccatgatcttagttttctgaatgttgagttttaagccaactttttcctctttcactttcatccagaggctctttggttcttcttcactttctgccataaaggtggtgtcatctgcatatctgaggtgattgatatttctcccagcaatcttgattccagcttgcgcttcatccagtccagcatctctcatgatgtattctgcatataagttgaataagtagggtgacaatatacagctttgacgtactcctttcctgatttggaaccagtctgttgttccatgtccagttctaactgttacttcttacttaacctgaatacagatttctcaggaggcaggtcaggtggtctggtatgcccatctttttaagaattttccagtttgttgtgatccacacagtcaaaggctttggcatagtcaataaagcagtagatgctttactggaccctagcttaggtgaagactttttaaataggactcaaaaaagcacaaagatttctgttcttcaaaagtcaccataaagagaacaaaaagacaaagtgacagattggctaaaacaagtaaataaataatgataataatgcaaaacagatacctgatagtttgtatctaaaaaatagaaatcatagaaataataacaaaaacaatccaattgaaaaattagcaaatgatttgaatgcttcaccagagaagatatacagatggcatataagcacacaaaaaggtcaatatcattagtccattttccaggaaaatggaaatcaaaaccacaatgagataccactgtatacctacttgaatgactaaagttagaaaagggcaattatcaagtgctaaggaagctacagagcaactaaactcttagtcttgctggagggaatgtaaaatggtgcacgcacttttggaaacagttcaacaggataatatacacttactatacagcccagccaccccactcctaggtatttacctatgtaaaacagaaatttatgttgacaccaaaacctggacaaaatacaaatattagtagacaaactgaattacaacaaaattgaaaatttttgtgccacaagtgataacattaagaaagtgaaaaagaaaccacataacgagaggacatttttgcaaatcttatatctaaaaaaggtacttgagtgcagaatatataaaggacaattaggactagataataaaagaacaatatcaaagcaggcaaaaaatttgcataaacatttccccacaaaaatagccaaaaatcagatgaaaatatgctaaacatcattagtctcagcatcaaatctaaatcacaatgagctatcacttcacacccactgaaaagttaaagcgaaagtcattcagtcctgtgtctgactctttgggaccccatggactgtagcctgccaggctccatggaattctccaggccagaatacaggagcagatagctgctcccttctccaggtaatccaaccaggaatcaaacagggatctcctgcatttcgggcagattctttaccagctgagctaccagggatggctaaattaaaatagacaataacaggtgttggtgaagatgtggacaaactaggatgctgctatgtggctggcagtaatgaaagctagtagcagcagaagtaactaaacagcagcacattcatttgatggaatttattcagccattgaaattcacgctcaggaaacatctgaccgagagaaacatgagtgaaaagagcaggatatagagggggcagccagaatgaccccaactgtgggctgcagagagagctgcctgcagcggggctatgtgctgtaaatggagaactggaaggtctggggcttacggtgggctgggaggggcgggcgccgtggattggagaatgatactccctttgcgtgcaggtggtggaagcattaattctcggccccggccttgttccaagcggtgctcaagctgctataccccagccagtcctcacaactcattgcttgctgggctgtgcttaaacctcccagggggcaccggagcattaacaggtgatttggttgggaatttcgaccctgctgtgatcttcatcactgttcccaactttgcaccattaacaacatacactattgtaagagactctagcaaacacaggttcaaaacaaagaccctaaggagcaccccatccccaaaatgaattgagaacccttataaagaaagtctagcgttggaactctggggataactgggttcttctgcagattgtttctcttccaaggaacccaggcaagcagccacagaagagcagctctcaccccagaactgtggttcagcaaaaaaaaaaaaaaaaagtcagagggtgaggaagaggccagcggggagccaggagacctgcgttctgatgccagctctgccttcaacaagtgatttcttctctctgggcctcagttttcgcttctgtaaaatagggatgttcccagaacctaggtggggagtggcttgcgcttaggcaggtggcggggcccagcgcagtggccgatgcaccaggggcctctgacggctaccggggaagcctgcacattgtgggcctcggcgccctcctcgttgaccaaagggccgtagccattgtcccgcaggaagtgagggtcgcaaccaggggtcgacggtccctgttacccagcgggagcaaactgcccggctgcgggcagaagcctaagccaggcagaggcggagcgagcttccaatccgtccccaggaggtcacgggggcggtcacgtgaccgcacccggaagcgcggcgcggacgcccggcaggctggtaggtgtctggctacgactcggtacgcacagtccgagggctgcggtggacggcggggcctcctccgggacccctgcagggccctcccggaagtagaggagtccccaccgccagcctcacccacccggcgtgggaacgtgggcgcgtcgcttcgcttctggtagccacagtttctgcagctacgaagtggggccgttgccactctgaagttcggggaattggggggtgaaaccggtgcataaactgtaaagtgcagggcaaacaagaaggctgccagtgggcaggtcctactcctgcgtcctccggcctttcaggggcggcggtcataggggcagtttacggggagaatggtgaaaatgagtgttggtggggggggcggtgggggaggaaaggggcagagaggttccccaagttgccccggctccatctaaggctccactgagtcctgtgttccctccttacagcagagagcagggaaaccacaaaataacaccagtgaggttctctttccaacagaccttttgaaataaaagtagaacttaatgtccactaaagaggatttccatgttaatgggaagatggcgttcaggtcagtcatgcccgcgatgtggtagttaagtctcatgttgcacaagatgctgagcccttaacagccctttcttgccttttgtttgcttacagtgcttggcttcctgattaagctaaagctttatattgttcctgccttttatcatcaaaatatgagtggttctggaactagtttagttcaccctgtttttgaggaggggagctgggaaataagaatagtgacacccccacctcacctctctgtgtaagaagagctttccaggcagcacagtggtaaagactctgcctgccggtgcaggagacacaggagatgtgggttcaatccctgggtgggaaagatcccttcgagaaggaaatggcaacccattccagtattcctgtgtgggaaataccatggacagaggagcctggtgggctgcagtccataggattgcaaagagaaggacatgattgagcacacacctctgtaagaaagtagtttgctaaggatgtgactgcctggttgctccctgactcactagaaccctggagggagatggagccagaggttgagcccagagaggtgtaagtgccttggcaaagccagaactagaaccaggtctcccgtgcctgttgtgttggtttactgccattcattgcatatcctgggatatctcctgtcttccaggactgcatctctgtctccctgggatgtgctgtgctatggcccaatagtcactcatagcaggctccctgggggtgctcagggtaggcttgctgaccacaccatggttcagagtgacccacagggaagtgagagtgctcgggaggaaacagtaggtgagaattactgtttgtggccactggctgggtccaagggactgtgcttgctgggtccgtgttctccattgtgggaaggcaggggtgagcagtgtgcagagcactgggacactcctggcagtggggagtgtgttctgagcagactgcccaggagccagagagagacctttgaccactcagccctccactgtttgtccactccccagaatgggcagcagttgaaatgagagcctctgcttactcttatgcccccccccccgccccgttttaaccaggtcgtggaatgctgtgctgcgctccatgagctggtcaccgagactgtctcctgcagccctttctgagccttcggctgtcaggaagctctgctgtgctccttgccacggtaggtgatcctgcctgagatggaagcaggtggcacctgccctggggctactcggactatgggaggtggacaggatgaggcaggcagaggactgagctctctcaggctctgcagagctgtctcagccgcatcccgtgcctgccctggccctgcatcctcatgtcacctttgcctgttctgttcttcctccctggcatctaggtgaccgtcacagcctgttgtggtgatttagttgctaagtcatgtccatctcttttgcgacctcatgaactgtagcccaccaggctcctctctgtccatgggatttcccaggcaagaatactggagtgggttgccttttctatctccagaggatcttcctgatccagggatcgaacccacctctcctccattggcaggtggattctttaccactgagccacctgggaaaccccatcactaccaaacctctaagctacacctcctgaatcagccccttcctcctctcagttcagttcagttcagtcactcagtcatgtccgactctttgcaaccccatgaaatgcagcacgccaggcctccctgtccatcaccaactcccggagttcactcaaacacatccatcaagtcagtgatgccatccagccatcttatcctctgtcgtccccttctcctcctgcccccaatccctcccagctttctcctttggccttcagcaaagagtggacccacattaccccacaccaggacaactggcctccataaccttgaccccacccgtccacgacacatacccttaccagcctatagggactctctgttgttcatagacttcattctacagcccactgttctccagcacacgtactcccttcccatcaagccagcccctcaagtcctgaaccttgccaggctcacctgggagtcccagggcagcctcttccaggcccacctgccctcatgcagcaatcttccctttcacgctccattgctctcctggtctgtgctttgtgtgtagcagttccatgggagtaggctacattttcttttttccactgtgctagaaacacaatgaagctaggtgctctgagttgaagttgataatccaactggagattagggaggtacccagtaagaacccggagaaggcattggcaccccactccagtactcttgcctggaaaatcccatggatggaggagcctcgtaggctgcagtccgtgtggtcgctaagagtcagacacaactgagtgacttcaccttcacttttcactttcatgcattggagaaggaaatggcaacccactccaatgttcttgcctggagaatcccagggacaggggagcctggtaggctgccgtctatggagtcgcacagagtcggacacgactgaagcgacttagcagcagcagcagcagtaagtaccaccaagctggtcacctaggggatcgaagagtatagctgagtctgagacctcaagatataatggtccatctgaggaaactggacgtccagccatggaagagttaagagcagggcttcctcatcactgtcatgtcttaccacgcgtgtaatgtgctcgtgtccgtgtgacatgctgaagtacaggagaaggtctgaagcccctgcctggggcaagcagctggcccgagagctctagcttcaccagacgtggtcaggctgccccaggagttgagagtcaatgtcttgctgtacctcggggccaaggcccagagtaggaagctgtggattaaaaatctaccatggtgaataagaaaacacattttacataatcaagcattgcgtgttgcagagagggaatgtgtgtgggtgatgggaaggaggtctgaaagggcagaggatactggtggaggtggctgaggaggcagcagctaagcaggggtgagaagaactgtggccgaggtcacagcctctctgtccaccagggcaggaggaacttgtgattgaaactcccatgatgctgagcccactgcctgtgggctttggagctgatactctggagctgtttttgacttgagtagaagtactggaccgcctggggggaggtgcactggctgcccagtgtcccaaactagaccttgactgcctgcctccctcgtgcagtcgaccccatgtccagatcacaggctggctccttctttacgcttgaccccagtaggctggtagtgtgtctgatactgtgtttagagagcctggataacacaggaaagagctcagccttggcgttcagttcagttcagttcagtcactcagttgtgtccgactctttgcgaccccatgaacctcagcatgccagacctccctgcccatcaccaactcccggagtctacccaaactcatgtccattgagttggtgatgccatccaaccatctcatcctctgtcgtccccttctcctcctgccttcaatctttcccagcatcagggtcttttcaaataagtcagctcttcacatcaggtggccaaagtattggagtttcagcttcaacataagtccttccaatgaacacccaggactgatatcccttagaatggactggttggatctccttgcagtccaagggattctcaagagtcttctccaacaccacagttcaaaagcatcagttcttcggtgctcagctttctttatagtccaactctcacatccatacatgaccactggaaaaaccatagccttgactagatggacctttgctgacaaagtaacgtctctgctttttaatatgctatctaggttggtcataactttccttccaaggagtaagtgtcttaattcatggctgcattaaccatatgcagtgaatttggagccccaaaaaataaagtcagccactgtttccactgtttccccatctatttgccatgaagtgatgggattggatgccataatcttaagtttctgaatgaatgttgagctttaagccaaccttttcactctcctctttcactttcatcaagagactttttagttcctcttcactttctgccataagggtggtgtcatctgcatatctgaggttattgatgtattctgcatataagttaaataagcagggtgacagtatacagccttgacgtactccctttcctatttggaaccagtctgttgttccacgtctagttctaacttgcttcctgatcggcatacaggtttctcaagaggcaggtcaggtggtctggtactcccatctctttcagaattttccacggtttattgtgatccacacagtcaaagggtttggcgtaatcaataaagcagaaatagatgtttttctggaactctcttgctttttcgatgatctagtggatgttggatcctggatctctggttcctctgccttttctaaaaccagcttggacatctggaatttcatggttcacgtattgctgaagcccagcttggagaattttgagcattactggcgtgtgagatgagtgcaattgtgcggtagtttgagcattctttggcattgccttttctttgggaaaactgaccttttctagtcctgtggccactgctgagtcaaaaataggagtaactggagattcctgctttgctgtgagggtgctgtgaagtaacgccaggaatgccctcgtggtagtgcccggcgcatagtaaatccggtaggtgtttgctgggattataattttttttgttcctcaggctgagtctgtgggtgtggggctggaggtgaccttgacctcgcttctccttggcagatgaagtgcgtcttggtggccacagagggcgcagaggtcctcttctactggacagatgcggagtttgaagacagtctgcgcctgaagtttggacagacagagaatgagggagaaaaggtgagtgcagagcaggcgggtcagacgggggactagttcagcaccgtcaggaggcggggagcctgcccacctgccctggccagccggaggggcaggcaaggctgcgtgtgtctgcacctctcgcacccacacagcctcagaggttagcccttggtgctctggagggctgtgccccaccctcaccccatgagattttgagcaccttagcatgtgcttattttctgtcttcactaatgaagtgtctcttcaggtctgtggcctgttttttattgcgttgattcttattaatattaccaacttttgaaagttccctaggtattatggatatgtcctttagtagatacatgttgtgcagatattttcttccagtctgtgtcttgtcttcatatctactgcacaatatctttcaaaacagatattttaaatatgatcactccatgttatctacttgttgcttttatggatcatacttttggtgtcatacctaagaaacctttgcccaacccaagatcacaaagaattttccccatattttctcctggaagttttctagttttaggttttatattaggtctgatgatgcactttgaatttttgtatggagtgtatagattgaagtttatttctttgcatacagatatccagtttaacactttaatgtgacagctcgaagatagttgtcctttcacttagataagttctactgtacattctaaaggaataacttactttgaaactttttccagattaattttggattgaacacttttttattgaggatccagtagagggtccttgtatgtctgcagccacataggctggttgcctctcaatgtccctcctggtccagtgggcctggtcgtcagctgaactagcgccatgtccccaagttaattgacctccacatcactgatgctctttaggaataatacaacatatcagagatcatagacatttaagtgattttatttaagctaaaaacaggtctatctgttaggctcctttattttttagtagtcagtatacataattgttaaattaagaatttttaagtatttttagttcttaaaccattatatcactatggtctaaaaatttaagagtcaaatgattggatagtgtttctcttcctctttattaaaaacctcagaaaggaacaaattcctgatttttcagttcctaaataactagcataaagaaaaaaaagtcttcaaagttttatttctcttgaatacaacacttttttcccctggtcctataaataacatgacttaattgtaggaaatttgggaagtaacagagaaatagtttttaaatgacccataattcttctacctcgagccattagctcttcaatatattttctttgggtctctatcttttacaaatagttgagctcataccacacttatagttttaattcctgggtttttttcacttgccattatagcaaaagcattattccattttgttaaatattgtcaaaagcataaatcttaatggaaacattatattcagtatatgaataaatatagcatcatttatttagccatttccccaatacttgacatgtatattgcttctagtttgctatacctattactgttggggacatttgtgcttgaattttatcccacatctcattatttccttaggataaattcctaaaaaagaatcattgattcaaaagccattcaaagatattgtaccactttataaccacaccacatatcaataatacaggagaattctctttacaccctagctacaccaaagattatcattcccccttcccaaccccaccaaagcaaaaaaattcttgtcacacctgtacccctagtgaaagctactacttttgaaatgagttgctgtacaccatctaggtttttaagtcacatttctattaatgtaattgattcatgacagttccagaaaattatggtacctgaataattcaaccagcatttgcctatgtgaagggatatttattcaacaaatactaatcgagaatccactatttgccagcctctcggggccaaagcagtgactgtagcagcatgaccctgcactcgcagaatttagaggatgaagatgacccagatggcaaataaacaccgtgggtttttttttttttaaccagagtgtgggatggggcaggctgggctggggtgggcctaggggtggtccggagaggagccacctgagctgggactgttgaaggtgactggcagcccctgcagtagtggacacaggcctgggttcctgaatgtcgagtctgggaggaaattacgccccagtgctgtagccccctcatatttcaagtgccccaaagtgcccctggccgcttgcctgtttctcttttcaaggccaggtcttactcagctccttgtatccaagttaaaactaggactctgcttcctccctgtttcagtcaaggctcctgagatcagcatggggaaagtgagctgtgctcttgtacctgttcattcttatgtcaagaacttgacttattaccattcgccctgaccttatcccattttcattcacagatcttcagcacaacgatccagtttctttttggttttgtctgttctgttctttatttggaaggcagggagaatggatgagggaagagatataaaagtaaaggcacgcttgtcaccgaactaggaaagtacagaaagatataacaactagggggagaaatcattcctgatcatcctcctgttcagaagcaatcactttaatgatgttgaatttttaaatgtttttcagtactttgttttttctgtgcacttgaaagtacagagcattcacaaccttattttaaaaaacatcacactgtatcgtaggaattttccacgtcactgaagtgctctgatattttaagtgctttgtgtcttcccatcgttcagatgtactgttgtatatttaaatctttccctggtactggacattgacattctctccagtttcttctgctataaatgatgctgcagggagcatttttgcacctgtatctctgccccgtttctgattgttttccttaggatactttccctaaaggagacttacggcgacaaggggcctggactttggtgcacatgtcagactttcttagagccggcttcctctgtggaagtgtggcctaattccttacctttccttccagaactaaggcctgaacaatgcagttaggtccctgatctttcccagtcttcctgacccaagatttggggcaaggtctccctgtcaagacagtgtcagcctcctgggtgggtctagaactgtggagctcttgacgtcaagttccgggtcttatctgttccttccgccccagttgtctggccccctgagcagtgttgttctctacccccacttgtagcctcccgccctggaggaccagcttagcaccctcctggccccggtcgtcatctcctctgtgaccatgctggagaagctctcagacacatacacctgcttctcgacggaaaatggcaactacctgtatgtccttcacctggtgagtgtgcctccctggggcccacgtgcctctgccccttggttccttggacggtccacacgcctcttcctcaccttgaacctcagactcctttagaaggcagatgctgcatcttagcaaaatcccctgggatctgaccgtccccccctcccatctctgtccccgggggctttctaacatcagctgatctctgtgcctgcagtttggagaatgcctattcatcgccatcaacggagaccgcacagagggtgaaggggacctgcggcagaagctgtgcgtgctcaagtacctgttcgaggtgcacttcgggctggtgactgtggatggacagctcatccgaaaggagtgagtcctggggtactgggccgagcccctctcgaggcctcagtgaagctgctgctcccactctgcccctgctgcttcctggcacctgcctgggtctctctagctggtgtttgtcatgtatgtgtgcacgagaagctgagaagtgaggtgagttgctcaggcacccgcctcccggttccacctccgtcccactccgctccatggcaagagcacagccagatgtacccccagtgtgtgtgggtcccccggttgtgctgtggctcccccatctgtgttgtgtgggtcccccaggtattctgtgtggctcctctaggtgtgctctgtggccccccccaggtgtgctgtgtggctcccccagctctgctgtgtggccccccaggtgtgctgtgtggctcccctaagtgtgctctgtgaccccccaggtgtgctgttcccccaggtgtgctctgtggccccccaggtgtgctgtggaggttcccccaggtgtgctctgtggccccccaggtgtgctgtggaagttcccccaggtgtgctctgtggctcccccaggtgtgctgtgtggccccccaggtgtgctctgtgaccccccaggtgtgctgtatggccccccaggtgtgctgtgtggcccccccaggtgtgctctgtgaccccccccaggtgtgctgtgtggccccccaggtgtgctctgtgaccccccccaggtgtgctgtatggccccccaggtgtgatgtgtggcccccaggtgtgctctgtggccccccaggtgtgctctgtgacccgccggtgtgctgtgtggctcccctaagtgtgctgtgtggccccccaggtgtgctctgtgaccccccaggtgtgctgttcccccaggtgtgctctgtggctcccccaggtgtgctgtggaagttcccccaggtgtgctgttgaagttcccccaggtgtgctgtggaggttcccccaggtgtgctctgtggccccccaggtgtgctgtggaagttccccaggtgtgctgtgtggcccccccaggtgtgctctgtgaccccccaggtgtgctgtgtggcccccaggtgtgctgtgtggccccccaggtgtgctctgtgaccccccaggtgtgctgtatggccccccaggtgtgctgtgtggccccccaggtgtgctctgtggcccccaggtgtgctgtgtggcccccaggtgtgctctgtggcccccccaggtgtgctctgtgaccccccaggtgtgctgtgtggccccacaggtgtgctctgtgaccccccccaggtgtgctgtgtggccccccaggtgtgctgtgtggcccccaggtgtgctctgtgaccccccaggtgtgctgtgtggcccccaggtgtgctctgtgaccccccaggtgtgctgtgtggccccccaggtgtgctgtgtggcccccccaggtgtgctgtatgactcccccagctgtgctgtgtggctcccccaggtgtgctgtgggggtcccccccaggtgtgctgtgtggccccccaggtgtgctgtggaaattcccccaggtgtgctgtgtggcccccccaggtgtgctctgtggccccccaggtgtgctctgtggccccccaggtgtgctgtggaagttcccccaggtgtgctgtggaggttcccccaggtgtgctctgtggctcccccaggtgtgctgtgtggcccccccaggtgtgctctgtgaccccccaggtgtgctgtgtgacccccagctgtgctctgtggtcccccaggtgtgctgtggaaattaccccaggtgtgctctgtggccccccaggtgtgctgtgtggccccccaggtgtgctgtggaaattcccccaggtgtgctctgtggccccccaggtgtgctgtgtgggcccccaggtgtgctctgtgaccccccaggtgtgctctgtgacccccccaggtgtgctgtgtggccccccaggtgtgctctgtggccccccaggtatgctctgtggccccccaggtgtgctgtatggccccccagctgtgctgtgtgactccgccagctgtgctgtgtgactcccccaggtgtgctgtgggggtcccccccaggtgtgctctgtggccccccaggtgtgctctgtggccccccaggtgtgctctgtgacccctcaggtgtgctgtgtggccccccaggtgtgctgtgtggctcccccaggtgtgcttttggggttcccccagctgtttgtcacaggagcttgcccagctctgacagtgagctcagactgctcctttggttgaagctggggacaccacttttctgtgggtcccccttctctgccccaggctgcggcccccggacttggagcagcgtgtgcaggtgtgggagcgcttccagagcctgctgtggacctacagccgcctgcgggaccaggagcagtgcttcgccgtagaggtgacgctgggtgcgggggtcctctggccacggaagtgtcaggccgtggggcccgggcagcgttgagacactgctttgacgtctgtcccccaccccagtgagtgagagcaccgacagcccccaagctcatgcatttcagagggttgctctttctggcttcatggtacgttaggcactctgatgggcctccctataataatacggctagactttgggtaaaacagacttcttagtgcagtttttggactctcagtaaattatggaaatttctggttagctccctcacctctgatccttcccccaaattatgctgagctgaaactagagtagaaaatagtaaacagtaagcagcactaaagtcaagattgcctgatgatggtatcactacagccagcgaactacgcctcgggccagcagcgacaggggagctgcgcctcaactcctacctaagcgcaggtctcaggagtaggctggctgtcagtagcacccgccttgctccctgttgtagacaaacagattctctgtagatcagtggttctcctctttgtatgcatcagaatcatctagaggacttgtaagataggctcctgggcttcacttttctcagtcactataggcatggagggtgggaggctctataatttgcattttgaacaagttcccaggtgacgctggttatgctggtttgggaactacaagttgaaagccattgatttagaggacagatgaagagcaaacaagtatgagctcaccattaatagtcaggtgcacaggagaatgagccgtgagtgagtgtcaggggaactagcccccagcagatgtagaccccgcaggggcttgatacaccggtatagacggagcctctcaagagcacagcctgtgttagtctgagcctccctgctcccaagcgtctggcacagggtgtgctctcaccgtggccagagtgaatgtagacttcagttgggacaagaggaatcggggtgacatggcttccatccccctgcccgcatccccaggctatggagcggctgatccaccctcagctctgtgagctgtgcatcgaggcactggagcggcacgtcatccaggccgtcaactccagccctgggcgggctggcgaggaggccctgcacgccttcctgctcgtgcactccaagttgctggctttctactccaggtgaccccgggacccctcacattcaccctttcttgcgaccccttcctgaaaagcaccacctcctgggcctgggaaaccttccagagccatcgcttccaggaagcgctgattcttaggttcttagttcttcaccctcctcggttcactcccctctctgaattattccttcctggaatgctgtctcagagtctgagcttagggtttcctgatatgccattcctggtccctggtccctggtggttttccactggtcattggttttttcaacagaaccaagttttatttttaaaaatgaatgagttcattaattttgtatattccatgtctttctcagaagaggataaagtcagctggcacgtttataaactgtggagggcagggaccctgccccggacccccttacctgccttggtgggcacgtgctgaccggcttcctggcctctccacagccacagcgccagctccctgcgcccagccgacctcctggccctcatcctcctggtgcaggatctctaccccagtgagagcacggctgaggacagcgacccccaggtctctcttggggcagctctctgggcagcgggaggccaccagaaaggccactcggatggccattctggagagcgctgggcaggcagctggggagactggtctctgagtctcagtcctgaatgtgtggttgggcatgactttcctagctgccttcaggtgtaaggggaattctagaaggcaggtggattagtgggttaaaagtgcaggcttttggagtcacagagtcccagctctaccacttagctgttggctgtgcaagtgcccaccccgtgggagcctcagttccctcatctgtgcaatgggacaaccgtggcatctacttctcagggttgtcatgaggaataaaggtggcagtttactaggagcccagcaatgcctggggcatagtgaaatgctcagaaagtgctggccagcccagttgccacaccatcctcctcatcagtggcaatatggcagtgatttggatgccagtttgttggactttgtagaatttctgtggttctggagaaagactagaactgaaacatccctgggaagcaatggcgcacactcggggctgtgcagtagagtgggcgcaggggctggcaaccccccgagggctgtgccatgaagcgctgggaggaaaagaagccagtcagcagctttaaccagcttccacggccctgtcctgtcacagctttccccacggaggccccaccgcagccagagcatccccgtgcagcaggcctggagctcttgttctgcagacccaaccaggaattctgcggggaccgtatgtgctctgtaccgtggggagaagccaggaggggagaggaggggaaggtctgcctctcctcggagagcagggtccagggctgaggccccgcgagaacctccctaagccctcagcccaggtgccccttctcccttccaggagacagacagcttctcccctactgacgagtacttcacaccagctccttcccccggggagcagagctcaggtgagacctagagtggaggagggaccctggacggtgagggggaggagctgggtgccaactggtagccctgggaatctgtctcaggggtcagtggatcccaacgccctgtaagagcccaggcacagacacccacgttcctagagcccaggacactgtctgctgcagcccctctgtctgtcttgccagctccagcttgaattcaaggactattgaggccacttcagtgatctataaaaattcttatgacaagttgatttcatttaaaagttcagctcacatatgtgtactctcactgccttctgtttctttttttgtagttaataagtaatcagctaattaagtttatttccagcacagtggtttaaaatatcaatattcaatctgtatagtttatactttacttccaaagtaagtggataaacaataaaaaaaaaaaagtttgaaatattattaacaaaacaaaaaaggagcctgggacctctgagaccacgtggcagctcatctctgcttgtccacttctctagggccaaggtcccagctctcctgggttctgcaagcttgccacgagcccaagcacatcagaaagcgctactttggggtgacggctgaagttccgttttcttctcactgcttccttcccttgttcctcctcccgacccctttctctctctcagtggttagttttttcatgcctcaaagctgtaaataattcctgttccacagtgcacagaactcacagcttacaaacgtcttgagttgctttcatccattaagacaggtgtttgaaacatagatacaggctttccccaagaaacgtgattataaatgatggttatttgcagtgaaatatacgagagaacatagtacaaagctataatatttcaaatatgtacttgattcagtagtttttgtgagctgtcctacgaaaggaaatctagttcggttcccagcacacagtaggtgcttcagtaaaagtttgctgattaactaaatgaacggggaactgtagatggtttgtgctacctcccagcgaagagtgaaaagacactgttatagccagagaggggctcgaaggggtagagaagacagaagtaaggaggggattggggggctgaggaggggcctgagggacctgccccccaccactgcgaggtacagggggaggagctcgtgcccagcagccagcttgggagggggcgctggcaggggtgcctctcttccccagccaggctgccctagctgtggtaccatggagggagcttgccctgcactcgccagcttggggtagaatgagaaggggaaggctctccagttcacaccaaggtgctctgcccagcgaggtgctgtgagctgccagtggggaagggcctcttttccattgtcccctactgacaggctgttgggccagtatttacatcttcccactgcttctgtcgttctcttattacctacggtttgtctgcaggtagcaccatctggctggatggggacactccacctactgactctccccacatccaggtgagtttttcctggggccctagggcgcttggccagggtaccagctgatctgagatgctgcagtgggctctggggactctgagggcttctcctggggtgacgctccagccatgcctgtcttcggtgctgtctcacggctgtccggccagtgcaggaaacgcctcagcccagaggtaggggccgggggtagggtgaggcgtggtgggtgagggtggccttctccctccctcgtcctcctcccccagacacacagcctccactcctgagaaatccccactctcactgttcttgggagtgaaagtctaacttaatttttagtgttttttttaataagagagtaaatatgttcactgtagaaaaattggggaaaacagaattaaaatacggaaaaggaataagaatcactcagtcccaaccccagatgttagctactgttaaacacttttggaatgtttccttctaggctttcctatgactttataaatgtatttatacacacacaaaaaatatatatattttttctttttttttaaccctatttgaatcctaatgctcttcattattttttgttttgagcattttcccattgtcgaggcactccttggcaatgtggtttttaacgagactgttcagagtgcatcgcctgcattctgttattatttatttagcaaattcttggaacaaccagtgtgttgcatccggtcctttgctgtcgtcgtaagactaccgtgacttccttacagagaagcttttgtggcatccctaatgattcccttaattttccacttttgcccactgaagactcttactcagagccctcatgaggctggagtcttctcatttagtcctggaagccctcacttgcacccttagaatgactttcagaggtccggaaggctgtcaaatgattaattgttaataggctttaaaccctttgtgtacatgacattgaggaggagcctccccccggctcatgccaccccgtctgctttccccactttcctttcttccttttcccctttcttactacccaccacccttgtgtagcatccagtcctggcgctgtgcagaagggccccgaagatgctgagagagagacagacagccggatgggagctgccaggggagtctcagcagagggccagcatttaggacctgggacgttgggggctagaagagtttgtccctcaaggttccgagggacatagcaagtgggcagctgcggggggacccagcctggggaggactcccgacgactgccccttccctccccctgacagctcctcttcctcctcagatggctgaagacaccctccagatgctgatccctcactcccaaggaccctctggccccagaaggattttcctggatgccagcgtgaaagacagctactgccccctggtgccccacaccatgtactgcctgcccctgtggccgggcatcagcatggtgctcctgaccaaggtatcagcgccctcgcctgccctggggccatcctggcctggacacccgcccccggccgcccctgtccaccccgccctgctcttctcccctcagtgccccagcacggccctggccctggccctgtaccagctgctggatgggttttctcaactggagaagaagctgaaggaggggcaagaggctgggagctccttgcggtcccaccccatcgtggcggacctccgccagaggatggacaagtttgtcaagaatcgaggcgggcaagaactccaggtgagacgcaggccccgacgccccatcttggggacgggagacagggcctgttctcatcacacctgaggggccaaggctcaagaggagggggccggcctctgccccaccccaccagaggactgtgctcctgatcccccgcaactcagcaatgcacttgatgtttcctaaacgttcttgtgtgcctttggcaggacacaggttccagctcccatgtttcagataaggaaaccagggcggggctcagatagatggtgatttggccaaagttgtgagccgtggaggcagaacccaactcaagggctcagtaatggccagtggtctgcccactgtgcccctcaccacatggctggtctcacaggctgcaggacacagggaggccgttccacccatggggggctgagagcccagatggggtcgtgaggcccagacacacagggccagcacgtgaacagaggaggagaccagttccctccaggcaggggcctaggagggggcgcggcagacgagagccctgggccgagatctgaggccgttcatgtagctggcagggcttgggtctgtttgaggaactgagatccatggtggctgaagtttgcactggtttgaaaataagcaggggactagacgaggcagagcaggtgactgaagcccagtcggtccacagcgccccttgtctcttggtgcccggcatgccccagtgaggtatcaggaggcagagatccctgaaggggatcagcacccctgcccttgcctgcatccaccccgccctcgaggcactgacctgccgctcggacagcactggtttacctgtctgccagcgaggccgagagcctggggctcaaacccagaagctgctttttaagtaaaagcctactgagtgactagaccgtgatgtacagtgggctgaagggtgctgggagccctgccagagacccagcctggctgtggacagcatctgtgtgctgggcctaaataagccgagaagttgggggagccttctagagcccgacgtcagaactgccctggacctcactgtgggaacattgtcaggaagccgcctgtcacttgtctgcttacagagaacctggcaggagttcaagaccaaggccttctccaaaagtgagcccggctcatccttggagtgagtggtgggccctgaggtcaaggagggtatcgtttggacgagggggcaggtttcctccaggcccaggagaagatgctcggggaggcgcttctgagcacagggagggtcctgggagggcgggtccaacccctacgatgctgaggggaggctgggggcagagaaaacaggttgaggagcagggcctgaggaccgacaccactagcagagacccagcttccgcacggacccagcatgaccttgggcaagtcactgtgccttgtatttccataaaataaaccaggaggttggaggagagttgagcttctcagagccccatgttgggggaacatggaagctgactcccagctcagtgagggccagggtgtagttcatcagccgcgtccatcagtccaggaggagggttaccacagggatggggtgctgtcctgggtgtgccctccagggtccttccctctgtgacagttcatccctggcccccaggctgctccaggcgtgcaggaaggtgaagcggcagctatgcgccgtctatcggttcagcttcctgactgtggccccaggccgggggggcccccacctaccccagcacctgcaggaccaagtccagacactcatgcagtaagtggcaatgcaaccccttggtggccggggcgggagctgggcacgcctcaccctcctgctcccttgctccctcgacagagaaaagctggcggactggaaggacttcctgctggtgaagagcaggaggaatgtcaccatggtgtcatatcctgatgcccggccctgggctggctgtgaaggcccctcgggctgctgccccactctgcccactcctctgcccactgtctggaaggacagcagctttagggaaagagcaggtagtttgcacctcagcttccttttgctgaagaaagtgaagagactttagcgtcctgttagtgtcctatctgtaggaatgctccgaggctggaatttcagaaatccctggtgtcccaagattacttcatagaggtcatctgtgtaggtgttgtccagccagcaaagtggcagtgggtctcccaggaggggcaggggcctggggtcaggtaggtttgaggggccgtgccccccctccttagatgttacagtacagtggagtgtgaaggctctgagaaggcctgcggtaagtatgtttattggtccctgtttaaaaaaccatctctaagacttacccttttattagagaactagtttcattactgatcttccctgaaactttatatgaagcagttttttcagaattaaaatttcctgagacttcagtcctcagcgcgcaggtggaagggatgccaggcggccttgccggccaccagctgctgcccgtcctctcagatggagccttccagcccaagacgaggcgcagagatgaagaggattgtggcgaggcatgtgggtggcagccagcgaggctcactcctcagctccgtagctctgctcccaccctggcctccccacgtgtgccatttaaactcatcctgcatgaagatggtaaaacataaacgtgctgtgttccttgagcgcaggacgcccggcgtgaaatacgccagagccagagatccatcgtccttgcatcttagaccttctcaggattgggagttcaaagggaaagtgagacctgggaaagagggtgtcctgggagggtagggtggctgaaaaggaaacctatgaggcgggtggggcaggggcgaaggcgcctaaaggaagcctcggtgaatggaggagctccttccctggttctggcttcaaaaccaccttaactcagcccctcaccttcctggaagacttcccaggcctggtgcatttcatctatgtggaccgcaccactggtcagatggtggccccttccctcagcagcagtgaaaggacttcatcggagctgggccgggggcccctggccaccttcgtcaaaaccaaggtaacctggcccagcccaggcacgctccctgcgtgtcagacaaggcgtgcctggacccctgcctagaagggctagtccccgcgcttgggcccctgggaaactgagcacccccgtgggaactcttactgctttcttcctacctcctcaccccgctttgtaggctcctaagagaacggtcctgtctttgtcaccctagggccccagccagcgtgtggggccacctccccagatgtgttaaagttcctggagcaacactgggtagtgaggccagggagggaatggccggggcccagtaagggtttgttgagttcactaagacagaaaggggacacacaggttaatggatctgagtatcagaatgtaaaagtaggaggtttctacagaggaaacagtctccagggctccttttattttctttgattcatcttcatggcaaactagtatttttggtggggaggcctcttccactttataaaaagctatattttatacatatattatacatgtatgtgtatatgtatatgtaaggaaatggcaacccactctagtactcttgcctagaaaataccatggatggaggatcctggtgtccatggggtcacaaagagtcggacacgactgagtgacttcccttcattatacatattatgttactatacattatacatgttacatatattttacgttattatatatgtatattttatatatccaagtaaagtgtatcataacgatgaaaacaaggtcactgatagctccctggagacccggctctgccctcgctagtcgtgtggcctggggcggtagggagtcttaagtttcagcttcctcttctgttaaagagagcaatagcaccagtaacgtcgtggagttaccgcgtagatcacagatgcacacacacggtgatgcacggcacatggcaccgactgtagccggggctggttgagcatttcctgggaccgtccacaccagcgtctgcgtctccttccggcgtagttgggctggtcttggtgcatttctctccatcgttttcctgtgcagtttgttgcagttgaggtcatcctgcatatgcatgtgttccccgcgtcactttgtatctggtgcatttcctcatgtcattaattctttatcaacatgattcccatcggctccacagcagtccatcatgggaacacagcgtcatgtacttagccatttccccagtgttgaatgctgagattgttcgcagactctatcataaataatgctgctgcacacccctctaggcatctatccttgtcctcatctcagattattttctcaatatggattcccagaaatggaattatgaagtcaagtgggaggaattgtttttaaggttactgatacacgttgtcaaattgctttcctgaaaaatagagcaagtccatgttatttgtttgcatttaattagatgctattgtgatcaggttgggagtagctcatgtacacctgtcactaagcatcttggtcggagtgcagaaggcctttgccagccctgggaggtggggggtgggggcagaggtgccccctgctgccagctcctctccggcagctcacaggcagcggcggaagtccttgaatcagggaggagagcctcgcagagaggacctggggcacgctgaccctcggtcactgtgttcccatcagtgcccttggtgagcccttgttcagacttcaactcagagcagaggatgtgccagggccagggcactgtgcattcagacacttttctagcaccttcctggcatagagccatgccagagatcctcaggcctcaggggtccgtgtgagccctcaacatcaggagagttccaggtggccaccctctcatctctgcttgcgtccctggctctgttctggcctgaaagatgaatttgctactttatagcttgcatatatagtgaagattcataaagtgttgatacgtatattttgtcctgcagtaatgagagggataggtagtccatccatccatccatcatctgtttattactaagctcctgccctgagccaaagctgggcccaggcgccaagaaggaaggatgagcaggaggcccctggccttccaggagctcctcgtcggagtgcttttcttcactgggatttgagagcccgagcccagcccccgcccgtggggtcagggctgccctcaggccgcagagacgagcactgtcccctccccccaggtctggtctctcatccggctggcgcgcagatacctgcagaagggctacaccacactgctcttccgcgagggggacttctgtggctcctacttcctgtggttcgagaacgacatggtgggtgtggctggcccgggcagggcagtcctgaaattctccctttctcctggattctgttcagtctgtctctccagctcttcttgtcgccagtgggactgacagcaaagcccagctggctgggacccagagctcaggtccgcctttgcgctcaggctctgtgacccctgcccccagttctctgaaaaactcatgctgttcaagaagcatccaggtgacacatgaacagaccgccatgccccgcgcaagcaaggatgctcagcccgcactttctgtgataccaggcctcgcttcctgctcccattgctgagacagataaacggaggctgagagcagttaaccagcctgcccagggcaaagctgcccacacctcgcatgccctgtctctgctcctggcagcacgccctccttcccctcagcctgaggttgcggcatccctttccatggtgcagtgtggctgttggggtctcgccgttctcagccccacacacctgcacagcccatgtgttggttgggacaagtgtctccgatcccattttgcaggtggtggaactgatgccctgagatcaaacaccacagccagggcaccaaggtcctaagtgatgaggtcagaacccaggcttggcttccagaacccaggcaggctcccatctttggcctgtgccctcctcagaggtgcccagggtgtggggctgagcatcacctcagcctctagggagagacaggctctgtgtgtatgtggttgactccatggggtaatgggcgggcctcaccatcccggtgggcacaggactgcaggaaccccatgacgacacctggcgcatggtgggagcccaacagagcctgagttgcttccccggcgtgtccttccctgggattcccagtcctttcagagcgagacttggcctttggtcacactttgctcttactgacacttccccagtcaccatccttcacgctgagccaggtccactggttggtggagagctaccaccatgatgcccagcatgaccccaggaactttatgttcatcacgtctaatgttcttgggagtttattctcatccccagttcccagatgagaagacagggtagaaagaggtccatgcattttcccagcaccaagcacttgctaaacagggctgagcctggcctcggacctgctgtgtctgactcaggcccatggtcttcccaccgtgcccaccgcctccccactcaagaagttcctcctcctcccccagggccacaaactccagatcatggaggtgcctgtgctgtctgatgactcagctcccattggcatgctgggaggagactactacaggtgacgccaacccggagggctgctgggaacagagggggacagatgacagatgataagtgcccatctcagcagagggagcagcccttccttcgagagtgtttccttgccccctcccgccccaagcccagccccccttgttagaagctcctcacggccaggcactcagaagagagtggggtgctcttggggttcctccccttctgttgcacactgaaatggcatttgcagctgtctctgctgggctcctgggaccttccctagctggcactggccccatagctggggccctgccatccagggttaggattccagagggtgggccctggcagcctggggctgagcctcaaaactggggagtcagcaaggaagtcctttccagcctggtgctagagtccagtgaggtgacctcatgcccatgtctccctcctgaatcctgtcctccttccccctctccaggaagctcctgcggtattacagcaagggccacccggcagaggctgtcagctgccacgagctgctggccctccacctgtcggttgtgcccacggacgtgctggtgcagcaggctggcgagctggcccggcgcctgggcgaggcctcccgcctccccctgctctaggaccaggagggctgccccgtggattggcctctgcccccagttctccaggcctacctggctcacagacatcgccacagcaagagcctcctcttgtccacagcggccctggggatggcactgcctccaggggagccccaggatttcttaaactcacttagagccacctccattgcgggtaacaagcaaacccccaaacccttctttctggagaaagaaggccagtttccttagctagagcagctgtggatgtgagcttagacccagggccaccccactttgggaaccgcctctccgtttaccccaggagaccgacaggaagtgcccagctcttcttggagtggggagagcgcctcaggaagccgtctcctcccgcgtgaaaggtgctcccctagctgggttgagctctggctctgccgtgtcctctctgtggctctggacggtggctcttccccacctctgagcctatctccccacagtcagtgtgactgcgcccccgtcag

SEQ ID NO: 68 - DNA, 41821 bp, Hippotragus equinus
  source 1..41821: mol_type = genomic DNA
tgtccagtgcttttgagcaactcttccgtttagcccgaagttgagctgtgtgcactccacttcagtttttgcagccctgttctccagaaggtcacaggctgcagcaagtataaaagggtacaacagatgatcaagtatttaaacggcctcaagggcctaaatatctcgcctggcccaaagcagtatcataaaaacatgaagcgaaagacatactggttcccgtgcccgctaactcttgggcgcggaggcgcggtccgaggttcagcgagctgcggtcgcgggcgggcccgtcctcacctccggctccaccctcacggtgtagctgcctctttaagaatcggcgccgcaggctggtccgcctggttctcacgtgactcggctccctgcaatcgctcgcggaagtggtccagcctccacggaccgcgcggggtctcccggcgcccggcggggctgactggccggagcgcgcaccgccgggaggcccgcagccggtcgccagaatggtgcagttatacaacctgcatccgtttggctcgcagcaggtggtgccctgcaagctagagcccgagcgcttctgtggagggggacgcgatacgctattcgtggcggctggctgcaaggtggaggcgttcactgtggtcggccaggagctgtgccagccgagatgcgtcttctccaccctgggcagggtgctgcgcctggcctacagtgaggccggtaagtagtggcggaggaaggggcgcctcggcccctcactggggcctccttcttagaggaccgagtgacgccagcagctctgggtagggaaggacttcctgcttgtaggatggtctcgcccagtccggcggctaaaggaaggtgagagctgtgcagttgtcctggcaaccacaggtgagagcgggcctctggtgggccgggggaatgcttggttgtttttgctcttctggtgtcctccctggaaaggcccgtggttgggtgactggattccactcaactcagacacttgaaaccaaaacaaactaagattcgtttattatagaaagcaagtacaaacaaaagtacggagaatggtatcctgaacccccggttaatcccatcttcaacaattatgccaactcatggccagtcctttatctatttcctgtcgatttttgaaagctcacatgacctgctgatttttaaatctgtgtaaatagagctcgggtcttaggcccctttccccccagaaaagtagcatccacgactccttttccactagaaatgtgaagcagtaccaagggaatactgagtaggcatatccctgttttagaaatatccaacatttaaaaatgggtactttgggactttcctggtggtccagtggttaagactcttcacttccactgaaggaggcgtggattgatccctggtggggaactaagatcctgcatgccaagtgcaacaccccctccccacccccaggaaaagatgcaaataggtagaaataggtactttagtttacagaagaattcaccatagcattcttttaactgtctaataatacacttaaaatttgaattctgcttttcaataggggtgtacattgcagtatttaagatggaaaagcctgtgacggaggtatttactaataaagtgaagagcatgaacctggagaactgtagagctccgtctaaactctctgtccacaactgtgtgtgagtttagtctccctttgtgttttaaaaaaagaaagtggaaaattagatcagtgatttccagaccttggaattttgtgggtcagcaaaaaaactgcggggctaccataagtggtatctgactattcattttgtcgagtaaagctacatgttaaaaaaaaaagtgaaaagcccttttatttactgtcattatttacataaaaacacctagctccaaacttgggatgcctttgctttatgagtaacttattatattgttactcctttttctttttgagtagtttagacatcaataggtctgcagaccagtttgaaaaacacttattaaatctgtaaattctctgtcagcagaaggctctgattttggtatttttaatggtattgctctcctaatcatttcacaatattagtagttttccccacctcctttttagacctgtggattctttaccttcaagagctctattgagtggcaagctcgccagtttcaacattagtgtgtgtgtgtgtgtgtgtgtgtgtgtgtgtgtgtgtgtgtgtgtgtgtgtgtgtgtgtgtgtgtgtgtgtgtgtgtgtgtgtgtgtgtgtgtgtgtgtgtgtgtgtgtgtgtgtgtgtgtgtgtgtgtgtgctggtggggggcagataaccactgtttacatgattggccccattcttccaaatggacatttaatgtagaattgtaagtgaccagcactgtgggaacctctagctttcttgcctgtcagtagtggtgattctggggaatcctttggtgtttaagaatcacctagggtagcttaaaaagattcctggacctcagagaaacggtaatagtttcctggggtgtggtccagcattgggtgagtcttctgttgagtcaggcttgagaatcactgacctagagccgtattgactgccataggcagtgagtagcatggtggtactgatgccttgaagttaacaaagatgtttttgtgattccgttgactgtcttaaaaaaagttctggagtcatgtggtatggtgttagcataagtcagatagctcaagggtaactttcagcttgaacttaatgcgtgggtgcagcttcttccaaattgtaggtagcggactgctagatatgctgatatccagataactactcttaacacatctcagctttttcctttagcttgaacttaatgcttgggtgcagcttcttccaaaacgtaggtaaagactgctagatatgctgatatccagataactcctcttacacatctcagctttatcctttagcttgaacttaatgcttgggtgcagcttcttccaaactgtaggtagaggactgctagatatgctgatatccagataactcctcttacacatctcagctttttccttttgttctctttcctcccactaacactggcttggacttggggattcctgctctaagcccagtgtctcccctactctcaccccatcaaaaagaaagtgaatcttagatcagcagtttctattcactacaaatgctttgcagattcttgcacgagaagaaaacattttcaatttctttttgtctctgattagcaggatgccaggctccgttcataaagattggaggtggtagaatgtaggctgaaattttgaaggatgggcccctaatatcatcatcagtaattgaaattattttaggttttgtgtgtgaagagagaaagaagagatttgggaactcattgctctcaaggaagaaagatctctgtggccagagttgagtgctgtgtagggacttctggtgctggacacttgtttatgggatgtctggaggtgtgaggcagagaggacaagaccacatagcacaagtgcatgaaggagccccaagaatgtctgttatctccccctaggccctactgtggatggagatggttagatagcatcactgattccatggacatgagtttgagcaaactccggaagatactgaaggacagggaagcttggcatgctacagtccatgggatcgaaaagggttggaccagacaggacttagtgactgaacaacaaagccctaccctccctcaactttttaagtcataaaacatattttaattaattgtatattatttctgccttctgataattgttttgtcataggagtgcagccttttaatttatggattagtgttaaccagggttatgatcttgctgcataaaaggaaaaatttactttttttttaaaatcactgactctcagcttgagaataattagaataatgatttttaaatttacttaataaagacagaagctgtcataaaataagtaaaataaagccctgagcacataatgctttgaaaagtttaattcctttctcttatgaagggctagaatcctccagacttatatctcctttctaacattttgagagatgcatggaatgaccattgactttggaactaaccagatccagatttaagcccaagtgccatcatttgttggctgtgttgcctaagcaagatacttagcttatttgagggcttcccctgtggctcagctggtaaagaatctgcctgcaatgtggggcacctgggtttgatccctaggttgggaagatcccctggaggaagggaaggctacccattccagtattctggcctggagaattccatggactatatagtccatggggttgcaaagagtcagacacactgagcaactttacttcacttagcttatttgagtctcaggttcctgatctataaaacggagaaggggatcttgccttgaagggttgtgaggattaactgagagaactctaaaggtctgtttataaggcttatcaggaagacacacttagcaagttctagttcattgtttataaaacaagtttttaatttgaaaacataagacagcataggtactatctatagtttgcaaattacatataaacagttgatatatagactttaccagtaataggcatatatttgtagatgtatgaaaaaacgcttatatttttctaaaataaaatgtataaaaccttttattataactaaacaaattattcttagtttttaagtttgttaagtaactagtaacttgaatatgacaccaaagcactgacaacaaagaaaaaatggaaaaattggctgtcatcaaaattaaaaaattttgtgcatcaaaggacactatgaactgatttgaaaaagcagtctacagaaaagggagaaaatatttgcaaagcatatacgcaatatggaattagtattcagaagaactcttataactcagcaaacaacaaaacaacccaatttgaaaattggcaaagagtttaaatagatatttatctaagttgcgaacaagcacaggacaagatgctcaacatcactaatcatcatagaaacgcaaatcaaaaccacaaagagataccatttcatacccattaggatggtcattataaaaacaaatagaaataataagtgttgatgaggatgtggagaaattggaaactttgtaccttcctggtgggagagtaaaatgatagagctgctatagaaaacagtatgtttccagaaaaaattcatagaatttccgcatgtgaaagtcgttcagttgtgtcggactcttggcaaccccatggactatagcctgccaggctcctcagtccatggaattctcaaggccagaatactggagtgggtagccattcccttctccaggagtttcacttctgggtatacacacagattaactgaaagcaggggcttgtgcacacatttgtacaccagtatacatagcatttttcagagccaagaggtggaagcagcccaagtattcatcgacagataaacaaaatgcagtgtatccacacagccttaaaaagggatgaaattctggtgtgtgtacaacacaaatgaactttgaagacattacactaagtgaaataaacctgacacaaaaggacaaatattgcatgattctacttatgaggtgccttagaacagtcaaattcatagagacagaagtggaatagtggttgcccgagtctgtgtttatgaggcactacttctgatattctgatgttcagtcctggttttcacttttactctacacacatttagttttgctttcaattttatgtaccttagttctgagttagatctgcagatgtatacagatagttcatatttatgtatttgcacataatccatgctcttcagcattgatgctttattgtattatgtaaatagtaaaagacatacatgtacatagggtgggaatgtagaattattgttggcggattcagagtttgggagaagatgaaaaagttttcaagatggtggtaatggctgcataacaatgtgaatgtatctaatgccatgaattgtacacttaaaaatagtgaaagtggtaaattttatgttatatgtatttttatttttacgttatgtgtattttaccacaataaaaattttttttgtttaatgtacttactgagagagtttaaggaagatggaggccacgtggtatcttctgctctcaactccatcagaccttctctggaacagagtgagccaatgtatggaacccacagggtatagttaggtattccacctagatttcttgacgaagaaaatggcaacccactccagtattcttgcctggagaaatcccatggacagagagcacagtggactaccgtccacaggatctcaaaagggtcggacacgatttagtgactaaacaacaaccaggatctctggggagaaaacagattcaggattcatgtctgtggtatcaaaggaaccagcatcaggagaaggtttgcctgtcttgaagcctggctcagtccagaggagagggggcctggtcagcccactgagtatcttcagaaaagggctgcccccacttgcttgctgcatctgtctgtgggaagcagttgtgctaaccacagcatttcaatgtcagttcattggaggaaggcttgtttacataataatgtctagcttttagtgagttctctatttgaaagaaccttgacttctcccttccaacccagaaagttctaaagattaaaaatttaatttaccacccacccacccccatccccccgccaagggctgccgtctgtggggtggcacagagttggacacaactgaagtgacttagcagcagcaaatagaatatgtaagagtgtgtttatgtaatttgacagatgcaagagactgtttaaacaagtcaggaaacacagaagccaagacggaaaagatacatatctggttccatatggtaaaagatgtcagacaaagtcaaaccatagcaaagtcaaaagtcaaactacagactaccaaaagtgatttgcttttcatggccagcaaaggattaatatcctttttacccagagagctgctattccttgataagaaaaacaaaaaaacaaaccaatacaataattttaaaaagtggataacttgtagaagagaaactgtacatggctgcataaacatataacagctttataagtggtctggaaaatataaatgatatttatatccatcatgttgagtcagtgctggtgaggatgtgggggaacagggctgtttaagcagcactggtggaaatttgaatctgtaatatgtaattgtgtttgtaatctgggaatatctattaaattttaaaatatactgaccctttgactgattgtcttacttttgaaaatctacacaattgaaattaacactccagtattcttgggcttcccttgtggctcagctggtaaaaaatcctcctgcaatgcgggagacctgggtttgatccctgggttggggagatcccctggagaagggaaaggctatccactccagtattctggcctagagaattccatggaatttacagtgtagtccatggggtcacaaagagtcggacactactgagcagctttcacttttactttcaagtaaatatgtaggtataggcctatttattacagcataaactatagtggcaaaaacaaaaaagctggaaatttggagttggccaaaaggatcgttcgggtgtttctgtaagacagtgtagaaaaacctgaacaaaatttttggtcaacccagtacttaaatatcagtagggggatcaaacccagggatcaaacccaggtctgctgaataaattatgatacaagtatatacaggatattttgtagatattgaaaagaatgttagatatccatgtatctaccctggagggaaaaatatggaaatcttggtaataaattggtaattttaaaaaatcattttattattttttattttatttatttatttttaatttctacaatgtgttgctttctgctatataacaatgcgaatcagctataattatacatatatcccctccctcttgaggtcaatttttttaagtttcaggttgttaaatatatttaatgtgattccatttagttaaaagcaggaatgacaaactaccactctgtgatctatgtttctatgaaagaaaggtttagaaggacacataccaagctgtgtgtattaacactggctcctcatgggttggactgcaggggagagatcattctgcttttcattttgtatctcttcatcactttgacttctcacaaaacaacaactccaaaattactttgtaatttagaaaatccaagaaagtcaacaattaagggaaaactggcttggattgaaatttttggtatatgtggctttatgctatttctcagagttgacatgaaaatatgacttgtggggatgggcgaggtagcagtatatattccactgatctcttcagagttccttatacctaattttagcatcactctgatatcaaactctttatgtcaggagaggtttgttcaagctgtaaattcagagctacagtcacttgtagagctatcatcgaaattagtcatagaatttcttggtaagctacatgaatatttaataggttgtcttaagatattaactgttttccaggtggctcagtggttaagaatacccctgcaatgcaggagacatagattcgatagctgggtagggaagatcccctggagaagaaaatggcaacccactctagtgttcttgcctgggaaatgccatggacagaggagcctagtgggatacagcctgtggggttgcaaaggagttgggcacgacttagcaactaaataagaagacattaagacggggtgagattgtatttcagaacctaaataaatgcctattgtcagttaaaaatacacccaagatcctgttacttagagttctgttctcttgttcagtcaccaagttgtgtctgactctgcaactccatggactgcagaacgccaggcttccctgtccttcaccatctcctggagtttgcttaaactcatgtccattgaatcgatgatgccatccaaccatctcatcctcaatcacccccttctcctcctgccctcagtctttcccagcatcagggtcttttccagtgagtcagctcttcacatcaagtggccaaagtgttgagcttttggttctagtcaatctttaattcaaccattcacattaggattctgttttagatccttttcatgatgcaaggtaagttgtggtttctaattagaaattctaagtgtaatcttatttccttctcaggagattatttggtagcaattgaagagaagaacaaagctacattcctgcgtgcttatgtgaactggagaagtaaaaggactgaaaactcccgagtgtgtatccggatggtcgggcatgacatggaggcacccttcagcgaaaccttcagagagcagatgtctattgtggaaatgccgctttctgaggcccccctgtgcatttcctgctgccctgtgaaaggagaccttcttgttggctgcaccaataatttagtcttatttagtttgaagtatcagatcattaatgaagaattctcgattttggactttgaacgttctttagttatccacatagataacatcacccctgctgaaatttctttttgtgttgggtatgtcgctgtcatgtcagagttagaagtcttaatcgtaaaactggagtcagaccccaaaaacagagagagtgttaaccaccatcgacgtaagaccaccaatcccatgaaacaggcagaaggtaaataatgaatttagcttactttcttgtttggggtatggagaaaaacccttatttctggcaatctcagaaaggctctactatgtatattgccaagccaccttatttatggtgtggttgcttccctgatggctcagatggttaagaatccacctgcagtgtgggtgacctgggtttgatccgtggtttgggaagatccctggagaaggaaatggcaacccgatccagtattctggcctggagaattccatggacagaggagcatagcaggctacagtccatggggttgcaaagagttggacacgactgagcgactttcacacaaatagatgttcctaatacatgggacttgggtttatgatctggccgtatcttctcctgtatcatgtgatgtattctgtagcatataaatgtattccaacatatatttgtcattaaaaataatgaaacatctactgctagaggagcagtttctagttccagtcctcatatttactattcaaatgaccttgggctaggaataccatctctgtgggtgtgatgatcatgtcctgttttactttgtcagttgtgaggaaggaatgagcaagtgttaagacatttcaaaaccatagcgccttataaatacaagggatgtgtgtgtgtataaatactgtaattggtggggggatgtggtgaaatctaattggcattcgaaaattacttggagttactacataattttcttaaattttattttttaaggcatcagtaatgaaacttcacagcttgagtcagatgattttgttatctgccaaaagcccatggaacttcttggtgaaaaaagcaaacagtcaggaatatctgttacactggagtcaacgggattagctgatgaaaaaataaagtatttccacgttcagcacctgctctataggtactagatagcttttcattcactagcagttaatgtatatttactggcttaatgcaatggaaattagatctcctctcctatttctctctttgaattcacagacgtttcgctcctgatatttcttcctgtctcttgtctgatgacgtcaggttgcattcacttcagcttctacccatttaccagacaggtaagtatgagagtgctgcagtgcagtgagctggaaaggcactgggtggagtggggagtccaatgtgagtaataggttaggtttttctgagttgccctgtggccttagacagattccttagcaaataacagtgagtccacaaaatggaaatcatgtctgccaggagaagccatggagaggaaatgactgacaaaacccatttctctttttgaaatggtcagtaggcccccaaaagaaaatcagggccctgttatagctgaggttcatctgggttccagctgggtcatttggcagagctgctaatgatggctttgtgagccagatgggaaaatgtgggctgggtggaaattcacttacaagcaatggttttcagcctcgctgcatattggccttacttggatgctttttaaaatactgatggccagtctcaacatactggagagtctttttttttataccatgctttgcagcatatgggaatcttagttccccaatcagagatcaaacccatgcccccttccctgggagcatagagtcttaaccactggatggccagggaactccccatgctggagattctgacttaattggtcaactgatgcctgagcatcagtatattttttttaacctttaaaaagatagtttaatttaaaattaaattttaaatcccattgcatggcatgtgggatcttagttccctgactagggatcgaacctgtgccccctgcagtggaagcacagagtcttaaccattggaccaccaggaaagtcccagggtatcagtgttttttaaaacctccccagaaatataatgggcaacccaggttaagaatcattgaattctgtacttagtgctggcctgcttcccatgtttaggtgatggctagggaaaggtataaatattactctgattaaacttacacatttttttttcaatacatggtagtgaccatgtatttagtacctactatgttgggtcttgtgctgaatactagggctcctgtaatgagcaaaactaggcaaagtacttgtactcaatggagcttattgtcttgtggggggaagcagccctgaatggaatgaacattagaaggagtatacagttacacactgatgggaatgctctgtgagaagaatcctgccttgagcatgtataacaaaggatcctgacctcactgggggtcagggaaggcttcctgagaaagaggatctgtggaatgaatggggctgattggtgggcaggtttggttgtggccaatggagagtctttgcttgaggaactgaaaagccggggagaaggatgtgtaacacaaggcaggaaaccagagggccctcagccaccttagagggttagctcttagccaggggtttcccgaagcatctggaagaaaaccccaaatcctctccatggcctgcattaccctgaccctaagctctttttgtcctgctcaccctcttacatttctccatccgtgtggcttttgtctgctgctaggttacaccaagctcactcatgtctaagatctattgtttactcttccagtgctcggaacatagtactttgctcagagcttgcaagactagtgtcttcagctcacagctcaagtatcacctcgccgcagaggacttcccagacttctcagtttaaactgttccctccctgcacgctgcagagtttattctccaccccagtccccctcactagaatgaatgcagttactctgtcttgtgcgctgcagtatccccggaacccagaacaatggcatgttgtaggtgcctcatggatgtttacttagtggacagatgaggggttgggcagtgcccatgtgagctgggccctgatagatgagtaaaatttttagaagattaaaaaaaaattttttttttttagaagatggagattctggtaagatactacctcagggaaaccaacatgtgcaaggtgaaagatcatgtatgtttggagataagcgagcagctctctatgattagagcacagatgtgtgtatgaaagaagaggaagtagaaactggatcagttgttttaggccagttgtggagagtgtagtaattggattttcttctttttttattttctttaggttctcgttagttatctcttttatatgttctttactttaggttctcgttagttatctcttttatatgttcttctgttattaatgtgtccttgaagggcatcaattggagctatattttttaaaaaaaactttgattatgaaaagttttaggcacacagatatagaaaaacagtacagtgacccccaaggtccccatcacacagcttccgcagtgttgccttataatcacccgctgccctgtgccagattgttttgatgcaaaccccagagtttataccttttcatttataagtatttcagcacatgtttctaaaggaaagggattcttttatttaaacaaaaactccaaatgtcatttcacatttttaagaaatgacttgatatcatccaatacccatcagttactcaaatttccctgattgtctaaatgtttttttctgcaatttatcagattccaagtaaggttctatacctgcaattggctcctatgtcttttatgtctctctgctatataggatctgccttcctctctcgtttctctttgagggttagttagcaggaaactggactattagaacagaatttcccacagtctgaattttgctgactgactccccacagtgtcatttaacatgttcctgtatctcttatacttccctgtgatctaaagctgtactgttcagtatggtatccatttgtcagtattgctgttgagcaccttgaagtgtgactagtctaaagtaagatatgctttaagcgtaaaattcacactaggtcttaaagacttagtacaacaaaaaagaatataatctgtctcgttaatcttttattgattatgtatcaaaatgataatattttggatatgttgggttaatatattttaaaaatcttgcctgtttttattttttaaagagcaattactagaaaactttgcatcacataaatggctcacattttatttctattgacagtgctggtctaagtcttgatcaaatgatggtgatgatcagtttttttttttggtcatgcaaatagtcttgagttctcttggaagtacgttgtatcaggttggctcttttttgtgatattaacaactattgatgatgattacctagatctgttaatttattagggttttcaaaatgttgatattctatcactcttttttcatttttttattggcgttcttatataaccacctaagcaactctttggttatctgtttatagatgtttttgcacagaaaagtcaaaatattggttcctcttatttactggttttgtttcctcttattcatggtttgtttgatgtttgtttttttcttttgcatgcagggtctcttacttctgatagaaaaaattcatctcaggaaaaagtgttgctgagtctgttttgttttttctcattacctcacgtgggctacctgtacatgattgtcaaatctgttgaattaatgtcggtttaccaatatcccgagaaatctcagcaggcggtgcttaccccacagtttctgcatgtcatcacaaggtatgtcccagtcccttgctggcttttgagtcacttatttctctgtaaattcctgaggtgctttctaaatctttaaatgaaaattatgtgaaccagtggatagcactataaattaatgatatacacctggggtttgaaagtgaaagtgaagtcactcagtcgggtccgactctttgtgaccccatggactgtagcctaccaggcttctccatccatgggattttccagaaaagagtactggagtgggttgccatttccttctccagaggatcttcccgacccagggattgaacctgggtttattttatttatttattttttaaataatggctcataactgccttttcaacatcagagatttaaattctggttttgcctttgttttgttttcttaaactggatggggatctttctaagaatgggtaaggttcttcatgagggaagatgttcatagggaattctaatgaaaagtcagtgggggctcttgacaacagtcagggcatctcttcagttttagatttcctaaacttttttttcactgctgtcatatcttttctatgtgagttgagttcattgatatggtttaggactgtaaagggtccagaaagcctacctgattctaccctctgagtagtgtagatggggagagagtccagaggttggggttggtcaggctcatgtggctaatcggtggtgagtatcttctgagttgccttatcctcctagtaagctggcatgtaaactgggttcctgaatttaatctcatttccgtttatctcagcagctagtaatgcttgtggttttatttcctgtttttttgagttcaggttctaggcaaggcactgcattgaaccctctggccaaccaaccatgaataaggcacagcctctgctttatgcaaacagcaacgtaagagaggatgaaagacacgtacaagggacacaaacactgggagatttgtgaaaaatgtcctaagactacatggaagtgtcgtaggctctgggaagagggaaattacttccagccaagtcacacgggcaaggtttctgtgttgaaagtgaggcctgaaggctagttagatttgacagatagagactgaaagtgaagggcgttccagatagaggggaagctacaagcaaagctatgtccaggtttcttggagtttctaataagagttgcataggacagtgctttttttttgtttttcccgactgagtggtaatagaatctccagcaggtgctgtggtgtatttcacacagtacaggacccacctgaagatgatgacacccgctcccagtgggggtgctcccctctcttcctactctctggcatggggaacagtgtagaggtctctggtcttttcagttgccaaagggttgtgtagtaatgtcctttaaacgtaaagttgctgaaacaaaagtggggaaaatagtgcctgagagggaacttggggctttggaaattaaggaatttttttagattttgagcaaagaaaaggatgtgaatagagcattactttaggaaaatggatggtggccacagtggaggatggcttgaacatactaatgagctattgggatagttcagtgaggatagtgagggattgtatttgggcagagcaatagcagtgaaaagagaaggaagcatggagaagagagaattacaggacttgatgtctagtgggatactgggggtggaggagacatgagaaaacccatcagttttgagcctgctttctttttttattttttagactttttttgtggggaaggggggatgtgtatcatttttaaaatctttattgaattttttatagtattgcttctgtttatgttttggtttttttggctataaggcttgtgagatcttagctccctgaccagggatcgaacccgcacaccctgcattgaaaggtggaagtcttaatcactggctgcccagggaagtcctgagcctacttttctgaaagactggaggctggtgtggtgtggggcaaaagaagagtttggtttagatattggagttcgaggtgcttagggaatatcagaaggaaacctatcaaggtttttgtacacaggcacttactgtgaagtctccagattgctttgctgtgcagaatgtagcctggagttgttaaaagaggagtgtgaagaatgaggagacctgggtctgatttgatttccattctccaaagaggacttggaccaaccatgtactttgcaggctctagtctttaaaaacaagcttctggactacatgattctgaagattccttcagagagtttgcctaacctaagtgtgttgcccagcacaacccaggctccatttcatcctgagataataataaacttgggttctaaccttggctttgatagtcacctgtctgaactttgggcaggttccctagccatcattttgtaaataaaataagggtattgatccagatccatggttcttaactaggagtgtgtgtcataccaggagctttgtagaaatatacgtgtctagattgagcccccgtgggcttccttggtggctcagacagaaaggaatccacttacagagagggagacctgggttgggaagatcccttggaggagggcatagcaacccactccagttttcttggctggagaattccatggacagaggagcctagtgggctacagtccatgagtcacaaagagtctgtgcgactgagtgactaagcacaacacagattcgaccccagaggttatgatttggtaggggtgcagtggggaccagttatgtgtttaaaaaaagcactccataggatttctgaggtaatctccttgttcagaagctgcctaacttgtcagcgcttgatgagtactggggtgttcagccacccgccttgtcgctccgtggtcctgtgacatcctcccagcagtgggcgtgttgattcctggcctccgcgttgctcagtggcctttctcctcttcctcagtaacaacctgcagtgttatacagtgcggtgcagcgcggcggccgcgagggaggaggacccgtatgtggacaccaccctgaaggtcagagctggctaatgacagtgcagcctaaagatcaaacatgagtgcttgcaaatttacgctctttgcgtttaagctgggcgaacattaaagtcttgttttgttcagttagagctttgggatgtaaagtggtaagcattttgcagtttgtggtttagatggtaatttttaagattactttgaaaacatgtcattcagaatttagatataatgcatgtttttaaaatttggtaaagaatatgtatagtgtaatttcatagagggcacatcacaactatagtatactacagttttattcattttgatcagaagtattgatattggcagttgtatagagctattaaaacagttcagaaatctgtatatctaagagcacagaagtgaatgcatgcattcagatgatttatttataccattatcagatatactaataattcttttgtcattttacaaagccttcaacaagtgttctgtatttccatagttttgatagagtgttattgatgttctagatcagtaacctcgtttttagtgaagtaatctgcttagtctctgaaaagcttttgatcaccaaatagacaattttatgatgaaattctctatttcccgaccttgaatttctgttctcagaaatgcactgatgatttgcatcgtgttcatcatgtgtaatttcacctctgagatggggatttgttatgcatatccatgcttcagggaacccccaagtcatgatggcctctgttcacacattattgtccatctggcacccggaacaccttcttctggaaaaaggagtgtccattgatgatggtgtttagtgcgtaatgtgtctgagacacttttccactatcactgtcacccaaattgtgtgctacctttttctggaaatcacatccaagttctcttttcttctgtgggctgcctgtcacattctgctgctgacaggcttactgcctaccttcagcctcttgggaaatcagaatcacagctttcccatgcccttctgtttatgtttaagatacacacatagccttttcaagagattattttaaaaataatggttatgtccctagtacccatggcaaggtgacagcctctttgtctcttgcttcctctctctccaccccaccttgccttgtcttttgttttaaacatcaggaagaccgaggcttgtgtaggtatgatggtggagtgaggggtacataacacattgaggcggcatcaatctgcatttgaaaataaatctcaattccaggccttctcatagtctcataaaaccagagggaagaaacacagaagagagaaagggagaaaagaggggagatgggcagctagtagaggacgctgcccctgaggctagtccttgaaggtggcagagggaaggacagtgatggtcacacctcctggctcccccttccctgcacttccaccaccctgaaatcctagatgcccctgaatggagcacgccatcattttgctcccttgctgactcaggctttggaagctgtggtgtctgagaaaggtttcacagcctcagagagaaggccataatgcatgctatctttatttccctttcccttgagactctggctcagcatcaccaaggccaccttaactattcataagtgaagtgaaagtgaagtctctcagtcgtgtccgactcttcgcgaccccatggactgtagcctatcaggctcctccgttcatgggattttctaggcaagagtgctggagtggattgccatttccttctccaaactattcatagcagtgacaaaaatagatggaaggttatccccatgcactttgtacaaaagggacaaggaagatgactttggaattgaaacaccattaatggaggagccagggagacctggcagcctcattttgtgagtcccagaaagagctcctcagttagcttcttatccattctgcttgggtgaatgtttccttacaaggacaggagcctgtctgctggtctagggtttcctccagtttgcctggcaaacctccagcctgttagccattctaggcagtgttcatacctgcagagctaacaggggccatctgaatgtgcctgcatttctacacacccatccactaagaaacctttttatgtattttacgagcagtagaatgcccttttatagtgtctgattttgactaaaagcccatttgaaggtaccacctgagccagcccactgttagtggggattccctgggtggcagtaacccgctcagggcagggctcctggaggctctctgctttcatgaagtcagtgtcagcacatactatggggctctttggcggacatatgaaagagatagtcagttatatagtttagataagatagcctcttgctctgataggaataggaatttggattatttgagtagcggggagagacaggaaagtagagattgtatccaatagattgatttttgaagtttttgaagttcatgcacttcattggctaaatttgtgaatttttccttattaggcttgcccacctatcagtatggatgtctgtgctttaagaatacagcttttcataggcttgaaagccatctgtcactttaaaaaccacgttgtacttctgaccaaggcagattctgaaaccgttccagagagaagagagtcacccaagaggtttctgtaagcatgcccatcacccccagacatccttgccaaagtttctggaatgaattgtgttactggtatattttgtgtacatcttcactaatctttttaaatcaaaaatttgaatatcagatgggttttctaggtgttcttttttcagagtaacaaaagaaggtttaatgttctctataatatcctttgtaattgactgtgagctttcagaagaaaataaattataaaactgtttcagtaaaaatctgtggtattgtataataagaatttaaaggacatgtttttctgtgtaattaatgagtgagatcgagcctcttaggctaatcgaaactacaaggctctttattatttttcttccttgacctttcagtggcgatatttttatccaaagttttttttttctggtatttcaacttgaaaagaaattaactaatgcatttcttacctgaaagcacatttgtgatgtataaattatctgttaatctaccttaaaataaaagtgcattcttctaatcttaggttaattctaacttcagttttctgctttcacattgtttgggataaaatggttatttccaaagtggttatgcttctagtcgatgtttcctaagttcctgtgaacttagtggttgggaatgcaatctaatttgaacattcctctatggaaattttaagtaggagagaaaactgctggggacagggggcgagaacatagagtgtatttcaaatcaaacactagtttttgcatttttgaattatttgtgtctgtgctttgttccatcagcagaaataaccaggttgccatgggtaactagtcgcctagagtgtgcacaaagtggtctaaaaatgactgatcctaaaagctttctggcaagaggaaaaataacttgcaatcttatacatttgatgtcttaatagtattatattttttttaatggtttaaaatttttaatttatttgaaaattcatttggccaaaactttgcattttagaaaagactgcatactacagaaaatgcttcgtacagtgaaagctggaaataagatagtgctttaagttgacttacagttctgtgttttacattttcccagcagccctggcctcacgaaggccacatgctggagagagccaggttgcagggattttcatggccaagtctctgttctttttgagaggtcttgcctgttctttgagcttattgcctatttaagaatacttgtggaatgaattggaagtgattggttgaccagtccacgagagtgtagtacatgaactgctgttaggcctacatagtgttgtacactaatgttctctaaaaatctactgtgtagttaagtcaccaaagtgaaagtgaagtcgctcagtcgtgtccaactctttgcgaccccatggactatagcctaccaggttcctccgtccatgggattttccaggcaagaatactggagtgggttgccatttccttctccaggagatcttcccaacccagggattgaacctgggtctcccgcataaatcaccaaagaaaatactaaatgaaaatggtatcagagttacaatattttaggtatctggtatttaccatttaaaatcgccatttattaatactatgtcttgtcttacaattcttgtcctttgttttgcttttagttctagaaaaggtaccagtgttaatcccaaaacacctcctgtagctgaagctgggtggaatttgtatattgtgaatacggtctcaccagtgcaactgtacaaagaaatggtactcctttcagacttcttatttgtagaagtttagagtctaattgatcattagaaattgattctaagtatcacacattcagaatgccacaaccagccagcttcaaggctcttacagaggactatatatcttcaccttcttgttttcacagctcgtgacatttgaggatctaagagaaattcccatcactaaaataagactcccttattcatacccactctcctatgggaattgattagccagtctaaacataaatagccttcgacctttactttgaaccctggcaagagaatcatgaaatggagcagaaagaaatctcagatcatatgtctgtgtctcacacttctttgaaatattaacagatggtcctagcataccacggcacttgtagtattgtcctgtggatatctttattccttttctaagagtgacagctatctgcttatccctgatgatttttataaactattttgaaataatttaaaatctacagaaaagttgcgagaataagaatagcacaaataaaatcattatattccccacatcaatttacctgtagtcaacagagtcaacattataccgcctatgcttctatctctctctttttttgtttttgatgtctgatcttatttatttctgactcttagaacatctcatttttgactggattcagactcagaaggaaaagttctcagagaggacagcctccatctctttctttctctcttttcaaatatttttatttatttatttttatttttggctgtgctgggtctttgatgctgtgcgggcttttctgtagttgcagcgagcaggagctgctctctagttggggtgcaagggcttctcattgcagttgcttctcttgttgtggagcacgggctctagggcctgcaggcctcagtagttggcggcatgtgagctcagtagttgaggaacatgggctcaagagcacaggctcagtagttgtggtgcacaggcttagttgtcctacagcttgtgggatcttcctggatcagggatcgaacccatgtctcccgtgttggcaagtggattcttttccactgagctgcctgggaagcccagcctctgtctcttgacagtctgttgctggtgtttttctttggcctccttcattctcttggccaaaagcttaggatattctgcagcctcttccatatatttcttagtacactgtttctttggagcagcacatccacgtttgtgctgcagaacacgtggagtaacagaacagtgaatcttgagtgctctggtcctaggttccttaccttcttggtttaagggctttcttacaacatactggcggacttcattttcttaggtgagattgaaaagttttcgagttcttctagttcttttggtccccaggcaatgaggcacagtagtatcagggagtccaagaatatccttttctccttttttttttacagtgacctaattgagaatactcaggtcagcatccaccatgcaaccccatcagacttgcactttctttctccagtccttcttggtctgtaacagaaatgctacttactcagcagcaggcagactcagccatgggtcaagacacctttcttcatggggaaaccctgtttatcgttcccagcactgactgggaccacatagcccttccattcttccagagcctcagcagcaacttctgtggccataagcttctcatagaaggtatgaaatttttgttcatcatccatttcaatgagcttctggaaaccagtgaccagaaagagatgttcaacttcattctgaagcctctctctccctttttgcactcttgtactttctaaatgcacaatcatgcctgcatattttcttctgatccattggaatgtatattgcatacatcctagcccaatgcccctaaatatttcaatgcatgtttcctaagaatttagatgcttgcttatacaattatagcacacacatgtgtttcagtaaatttaacaatgacacaatactttatctagtctatggttcacattccatttttgtcgattgattcagtaatggcctagtagcatttcccccatcctctggcccaggatccagtctaggactcaagtaatgtatttaactgtcatgtctctttagcctcctttcatccaaaatatgttcatagcctttgtttcattaaaaaaatttttcttgttttctttttgttgttgttgaagtatagttaatgtccaatatcgtaagttacaggtataaacatagtgattcacaattttaaaggttatagcctgtttataattattataaaatgttggctgtattccctgtgtagtccagtatattcttgtagcttatttattttatatgtagtagtttgtacctcttattcttactcctttatctttttcttcccccgctggaaaccaccagtttgttctctgtatctgtaagactctttcttttgtgttttattcactatcttgttgcatttttagatttcactctttgttttataagttttgaaacatatttctcctcctccaccttttaaacatttattttttcatttcatttcattttgtttcttttctcatgattaaattgaggttatgtattcttggctgggttccctggtgactcagacagtaaagaatctgcctgccatgcaggagacgcaggtttgattcttgggttgggggcgtcccctggagaagggcatggttccctcctccaatattcttgcctggagaattccacggatagaggagccaggcgggctgcagtccatgggtcacaaagagttgggccagaactctgtgtagaggacgtatctttctcagaggttcatgtggggaggtgcagaatattcatttgtccttcaccagcagtgttcattttggtcatcaggtgaaggttttgcctgatttgtccctggcattttaatgctgataattttatcagctttctcctgtgttttcagtcttatttaattgaaagtcttagacatcatccagatgatttgcctattggagtctaaaaatactgattgactcagattagctagtgaaaatttttataagcccactatgagttatagagttagatgtagcagaatctaaattcaccaattgaaactaagatgaaggatgctcaatctgaatttgagaaagatttaaatcatagaactttaaaaatagttaagtctttcagatatgttcattagctgtatcaaattgtgatcaaattattgctcagttaacagtatcattagtattatagtactaattgctttctctgatgattagcgttgtttaacagagtatttataatcatgtatgtgataaattggctcatacattgtgggggaaaagaaagccattttagctaagccttatcagaatgatagataaccactttttatttcttaggatgtaatgtgttcagatagtaactttataaacaacttatagacctgggaaactttggggcgatgtcttcagcatcatgaactgcttgccttctttgtgtgtcaggtagactacagtaacgcctacaagactgcaaaaacccagagctgcatccaccttctcagcgaggctcacttgttagtgagagcggccctgatggatgccagtcagctggaacctggagaaaaggcagagcttttagaagcatttaaagaaagctgtgggcaccttggcgactgctatagcaggtgggtgatgctgcttggaagctcgttaaagaagccacctgagcttcaggtgtaacttaccaacgtttccacctctggcagttccctgacaaatgggacaacacatgaggggctgtgatttatttattcatttattccacagcacttgttgagcacatcctatgtgccaggtactgtgctaagcttagagagataaacatgacctgttcctactcaaggacttacagtttattagatgagcagtgtttatgtctccttcaaatttagaaatttgaagtttcttttcaggcctttgggtggtggtggggcatgaccagtgaaaatacctgagacaactgtattactcatctattgcctgttagctttgaggcagagatcctagttggacagtctgtgattttaatcttagtaatcaatggttttgtaatgtcagaaaaggatactaggaagaagaacgatttctatttctgagaatgatctttacaatttttttttaatataattttttaaaggcttacttgaaccacgggagtcattataaattaatgaaaggcttttcctacttatggtcttcccctggtggctcagatggtaaagaatctgcctgcagtgtaggagacccaggttcaatccctgggtcaggaagatgccctggagaagggaatggctacccacttcagtattcttgcctggagaatttcatggacagaggagcctggcgggctatggtccatgaggtcacacagagtcggagatgactgagcaactaccactttcctgcttataaacaccattattgtagagctgcattatgaatattgaaattcacttgtttctctgattttattatgagcaagcaaaaagaagctacattaattagaatgactttgcagaacaaaccttaggaatttgttccagctcctattggccacagaaaagtatttgtgtcttctggaaagcatgatctggtttattatcaaatgtgttagacatccagacttaaaactgacaaatctgaggggttttttttcccccacttccttccctttaggcttgaaacccagcattcccacctggccttgccatactataagatgtctggtttgtctatggcagaagttttggaccgagtggactgggcagtagaggatggatcacagaaatacgagcggggattaatcttctacattaatcattcactttatgaaaacctggatgaagaattaagtgaagtgaatacaacttcctgcttaattagatcgaatatttttaacttttcactttagctgtttatgcagttctgtttaaaaaattaagttcccagtattttcattggtagtatagtctttttttctaaaaaaggtaactagggtgtactttttcttcattaataatactcatagaattacagcttgaaaaagaacttagaatcatcttctcatactttctcatgacatagacagggagatgtggtccactgtggttgagtgacctgcccaatgtgacagtggcatgtctttagaagagtgtcagagaacctgggccttgcctgcctttttctcatccacagcccttttcaaaaccctagttgcccctctccccaagtgtctaaaacttttttataaaatcctggcccagtgacatttttaaggattgtttttagcccctgatgtatttttttatgttttggttgttctgggtctttgttcctgttcaggcttcccctcgttgcactgtgcggaggctgccctttgctgtggtacatggcctcattgtggtggtttccctcgtggagcacaggctcttgggtgcctgggcctcaatagttgcagctcttgggctccggagcatgggcgttagtagttgtggtgcatgagcttttagttgctccacagcatgtgggatcttcccagaccggggattgaacctgtgtcccctgagttgccaggtggattctcatctgctgcaccaccagggacgtcctccctttcgtgtatttttaaatagttgaatgcagatatacagagttgggtattgtgattccaaatattttaaggttttaagagaaatgaaattttcttctataaatattaagtatattttgtactaagtagtaattctttataatggacttttgagtggaatttaatccagtatttgtttttcttcttctgaacacctgttagtattagaaatactgaccacagcttggtacaaagagatcactttaggtcacctcagatttcccatgctatcatcatcaactctctttttaaatcaaaacatagtacaaaattttatattaattggaatgttgtatcttgcttgtttatccttttttttttttttttttgctgattttgtgctttctatcggctgactgaccttttatttctcgttttgctcaccgaaggaattgtcagcaaaagtagttcagatgttttatgtggctgagccgaagcaactgccacatattctctgtagtccttctatgaagaatattgatcctttaactgccataaaatatttaaggaagctggatacttctggattttcatcagttttagtgacattggccaaggcagcagtggctttgaaaatgggagatcttgacatgcacaggagtgaaatgaaaagccattcagaggtatggtgccgtgcccagcattaatgtccagctaacgtaggacccggtggtcctgagcctggtcagcttttttctggcttctgtgtagctcatttttccttagtggtaaaggaaaatagacttaatattatattaaaaggaagtgacccaaagtgggagtgcttgggctttggatttggaaatgaaaaagaataccaaatgataaatggtagctaggggtatccaaagacctttcaacttagtgtcagatttattcagagcacagtgcttggtactgaagagcatataggctctgccctaagctgacagtgtgacgtggcatgaggaggtgtggggtgtgtccctaaaaatagaacagtgctatatattcaagtacagcaagtgggatgttaaccttgagccttaggcatccagcagttgcagaaatagcctgcccttgagaagatcacaaatgactgtgaaagactggggatttgaatggtgtatcaaagaaaaggtggcttccccctggaagagtggccctttagggacgtgagccaaagaagttaatcagtcgaggaagaaatgaagaagagacattagctgagtacttatcgctcaggtgtaaccaagaagagcaggagttctttattgctgcacacatggcacattttgttatggtgaggagagcaagtcaacactgccatgtcctctactttgaagaggagaattctaggaagatgaactttcataattttgaagaatcctagatagacataaatttaaagctgtctataatatatgacactttgaagcttaactatgttaataacttctaggaagacagttattaatgatgttcttagaattgtctttatagttaaattaaaaattgagattataataaatttttaatggcttatcagtgattcttaaattcattagcatgtatttccaagatgaatgcaatgtatatgttgttcctaaattttgtttttttaatctgaagatgaagttggtatgtggcttcattctggaacctcggctattgattcagcagaggaaaggacagattattccaactgagtttgcagttcacttgaaggagactcagcctggattgcttgtggcttcagtcctggccttacagaagaacaacaaaattggaattgaagaagcagattccttctttaaggtttgtcactttgaacatgttattttagatggcctgatgaagttgatgggaagtgaggagtagaataagagaagcaagttttcatttgtttattgaaataccagacttacacataaccacttaaaaaaatacaggttaaaaaaatgtttcttgaaaaattctgttcatgcaactggagtatgttaaaatgtttaaattggcttttcccatggcactaatgctagtggataaattgttgaacacgtggcccgcatgatggagtgctttttagaccagctgtaacttgatcagtgctatatttatctgagccataggggcttgtttcactgttctcaaggtgctttgtggtaaagatggagacacgatccctcagctcttagtggacttttgggaagctcagctggtagcctgtctcccagatgtggtgcttcaggaactttttttcaagctcacatcacagtacatctggagattatcgaagaggcagcctcctgacaccacaccattgagaacatcagaggacctggtaagataatggaatggtacagtgaatcaaactttatgtacattccctggagaaggaaatggcaacccactccagtattcttgcctggagaatcccatggatggaggagcttggtgggctacagtccgtgggtcgcagagagtcggacacgactgagcgactttactttcactttcatacattatgataatgtcacttatttttaacagtataacatcaaacataatattaccagacttttaaattttattatttaattttatttttggttgcactggatcttcattgctgtgtgcgtatttgctctaattgtggaaagcaggggctactttcttgttgcaatataggggattctcagtgcagtggcatctcttgttgtggagcacaggctcaatagttgcggtgcatggacttagttgctccatgatatgtggaatcttcctggaccagagatcgaacccatgtccgctgcattggcaggctgatccttatccactataccaccagggaagtcctaccagattctttctttaagcaggagttaaaaacacacctataacttgcctgcgagtgacatccacatttgaaattttatattctaaggagcgcctcctaccactcctttattatgtccttgtagtggtacctcagtagccaaagtgtggggaatagggctttcccccaaacccatctgcactcccttaggtgatggtcatgaagtagaacatgcgagaagagacacctgcagacctccctgctgggagacgaactgcagaagcgctgtgggagagagacttcctccctagacttccacttcctgtcggctgcacagactagagctcttttgcagtctgagccgctctgacaactctgctcttacgcttcctgttctcctcaccccctttaccccttattgatgcaaggctaatgtggattttcttgaataagggagtctttatgggaattctcttcagaacttatggaagaggttttgagtcccaaggaaagtagtagaaataaaaatcattttcaatgttactgttaactttttttttggccacactgcatggcacacagaacttgcctgatcatggattgaacccgtgctccctgcagtggaagcgcggagtcttaaccactggcccaccgtgacagtcccttattaactttttttaaatgtaattagtttaagagaagtattaccctttttgttagaaactgtctctttgcacccttttgaaagttaaaatattaggaaatatttagtaaagatttgttcattaagaagcagcaaggctgaaacatttcccaggggaatacattctaagactttcttcccattcccaagaaaatgtataactaattttgggacacagcagaaagttggagactgcttactttttgtgggatggatgaagaaaaccttgttttattgtactttgtttacagtaagtttcttttacattttagataaacacctgtagtcattatggcttaataaatccatgggttaatgtcttaatctcatctgaatctttagtcgacaaaaattatatggaagacctttcaaaattacaggtaaataaagatgcctctttttcttatgaatttgtatattataatatagtatagaacttaaatttggtaagctcccggttgtcctgttaactgagagtgtatagtttgggtgacagatctatagtgaggcatcctcagcagctctgcagggaattcctgctgcttctgcccgaaactgctgaaggaaggctggttttgttgctggtgggtgggcgagtgagcttcaccgagcccagtgacagtcttgcctcattttcaggatgtgcttgaaaatgctttgtgaaatgaaagtacggcaaatgcttcatggtgttttcattttgattcactttttttttaaatttagttaattaatcttttaaattttagcattcactcatacagtttaggcctctagcccaagccaagcgtgcctatctatcttataggaaataaattaaagtggccagtttatctggttccttaaagggtttttttcccccagatatttattaatttatatattgggctacatggatcttagttgcagcatgtggtatcttcagtcttccttatggcatgtgggatctagttccctaaccaggggtcgaactcaggctcctgcactgggagcttggagcttagccactgggccaccagggaagtcccagatttttttttaattaattaatttattttaattggaggacagtcacttcacaaccctgtggtggcccctgccacacattgacacagatcacccatgggcacacatgtgccccagattttttttaaagtaagaaatatgatcaagagaatgtagcccatcccacaaggattctgacctcaacagtgttttgactgaaagtgagaaatgaagtccacatttgacctggtgggtggggctgggctgcatgtgtatgtgattttatttgatggagtcagcggcctgaggactgaatataatgctcacatctgttgtgtttggtctgcccgtgtaactgctaacatgtgaaagctgagatttcaaatgaagaagtgttgagtttctagtttctctttggaaacctcagcagcactttcatccagccgtaatcccgggccctcactgcctgagacctgtgggctggagcccctagtggtttccctccttacgcagggctcacgcagtcctggctgcctgaccagctcacgctcatctccagtctccctggtccagaggcggagtgtccggcatccattttccttatacccagctgcctctgtacattttcgtcatctggtttggccttgttaggctttttgcaacccctgatttatgctgggaacttggtgtaaatgtagttactgcttttagaaaccaaaatgtcaaattgggagtggaggtcaggaagggaaactcgagaccatattgctgttttagcctctagacagcctatgatgtctccagatagagaattacttacatttttttaaaaattgccaaagaagattcttgcaggttcttatctctagtactcttatgatacagaggctgctgagggctgaatctcagatgtgttcattccacaaatagtcctcgatcataaactataaatgtgattgatgtatagcattaaatgaggcaggcaagaccttgccctcatagaatatatgtgttaattatatatttaaagtcataatatgtgctgttaagtatcccctataaagcttcaaagcatacttaaaatctcggcttgaaaaagtgtaattcattgacctttagaatccattttaaagtatttaaaagggagtctttactgatacaggacagaaggttcagttagcctaaatttttctaaatccttttcctaactcttaactcttttctaaattatctggggtcagtcaatcaatcttgtcatttagaaaaaaaggactatcaagaacaaaaagatctcatctcttcttacctcagaatgagattcagaatcacctggagagctttatcaaaattgtatgacctccctctacccaccagctaaccaccaccacacagatttaatttgtctctgtcacttgtcctcaaaaaacattgtaatagtatatttgtgcaaaaattaatataaaaacaatctataaatctatctataaaatctatcaaaacatctatgtgtcaaaaaaaaaaaatgcactactgtgtttagaacacagtagctagtaaatgcctaccttttacaagaattgtcctggtcccctcccctcacctttttgccatttcccccctcttggagccacaggtgtgattgtgtagagaattctgtgaattccagtcccaaggagatcagaaaagggaataaatagtgcctgtgttgagggtggagagtccatttccaatattggggtggggggaaaggaacacacaggtgagaagcagacaacattgagtattttaaagagtagtagtaacctgtgggccattttttatccagtgatgcatgtctggttgtctggtaattttttggtttttggccacatcttgaagttgcaggatcttaattccccaaccaggaatcaaacctgtgccccctgcagtggacgcaccactagacctccagggaattctgtgtctggtgtttcttatttttaaacttcttgatgatatggattcaactatctaaaagttcctgggtaacccattttgtaccaagctttgattcatttcactttaatcatcttatttcatatttgctatgttactgtcagaaaattattcagatgaaagtgcatattgcaggaaggaaacagaccaaccttattctcctagccattctttgataattggagtaaaatcataatgctgactgtaaatggatagttcatgttccacattctcctgtgagtctgagaagatgctgtagtaaaaaaggataaaagaagaagaaaatcaggatatgactatttcatttttatccagaataaaggggaagcagagattattttggtggtataatcaaaagtagtattaatattagtagttcaaatgcttaaaagtaaaatgttggtcacgttctgaatactgaacagctgctctaagtcatttagcttgcagcaaatggtattgatacaaattattagttcttagtttgcttagttttcttaaatgttaaattttatttttggtttatatatggtacatgtgtattatagaaaccttggaaagtgtgaaaaagaaagcaaaagtgggctttatccttctatgcagtgaactggtttctatttcaaacttcaatgctcttccaaaggcatgtacctatgtagattttacaaaattgatcatgctttgaatataattttgtattttttttttactgatttgatcatgagcagcattttgtccttaactgcctttgaaaacaattttgatagctacaaaatattccataatttgaatgcaccataatttatttactcatcacttcttgatgaatgtttagatttcttctagtttttcaatattatggatattcttgagttgaacatcattgaacataaatcttgaccaccatgttgattatgtccttgggataaagtcttaaagctttcccgttcatttaagtatgcagtccactaaagcgtgtgctctaaaattgcgtgttttttttctttttttgacaaatgagacttagtcttttttaaaaaacttgtgttctgttatgttgtgctttagttttttgggtgcctcattccataacctttcacttttctgttcatagtctcttatatgtggtccttcatttgacatagcttccatcatcccattcttggagccactctcagaagatactgttgctggcctcagtatccatgtcctgtgtcacacgcgtttgaaagagtatgaacagtgcatagacaggctgttggagagatgcccggaggcagtcatcccatatgctaatcacgagctgaaagaagagaatcgggtatgcctttcagattgtgttttttagtctttatctgtgataatcaaatgataattttgttgccttatctgcaaaatggggacagattatgccagtccaacctcacaggactatgtgggtcaaaagagcatgtatgcctaatatgttatatgttttgagtaccatggcaccccagtccagtactcttgcctggaaaatcccatggacggaggagcctggtaggctgcgcaacatggggtcgctgagtgggacacgactgagtgacttcactttcactttcatgcattggagaaggaaatggcaacccactccagtgttcttgcctggtagaaccccagggatgggggagcctggtagagcctcccccgatgggaggccacatggggtcacacagagtcggacacgactgaagcgacttagcagcaacagcagcagaggctgtcaacatgtgttgtgctggtatgttatcttcactaaaaatctcttgtttggagatgaagtccgctattatctgaagattttgaaaacataatgaatgatgagaaaatcctttgtgggttatctggtctttagagattagaagagtttttgattttagaaatttttcttttgttcttccttctttcctgctacctgagagatgaaaacaagacatgcctatgtttcttcttgaaaatagtggtgtacatatatatgtacagtgtacatactgttaagattttcaaggtaaaaatctgacttacgttatagtttaagcagaagacttcaaacaaagtctttgccttaaccaaagtgatgtatttttgccctgtgcttccttgcacaatctttttcttcttgttggaaatctgagtataaaatgcatcaaactttaaaagtactcattttttcccaagatagactttgtggtggaaaaaattgctgcctgaactttgtcagagaataaaatgtggtggagagaaatatcaactttatttatcatcactaaaaggtaaaataatcttttttgctttattataaatttgggagtcttcatttccataatttgctgaaaccttgctttctcgtgtattttatgtgattctcaagtatggtgaagagggtctgagcttgagggtctgagaattacccagagagcttaccttattcatttatattttttagctcttccctgggcttccctggtggcttagacagtaaagtgtctgcctgcaatgcgcgagacccgggtgtgatccctgggtcgggaagataccctggagaaggaaatggcaacccactccagtactgttgcctggaaaatttccatggaccgaggagcctggtaggctacagtccatgcagtttgcaaagagttggacacgactgagagacttcacttgacttcacttttagctctagagctgattcctctaagttaattttttcaaacacttaccagtttatcatagagaaactcacagcctcagtattttaaaaattggaataactgttaagtccattttgttttaatgatctgggtgcttaatttacttcatgcaggaaattaagattatttattattattagttgtaattataagcaagtactgaggaatgacaagtttctcaaaaatttagaagcttagtatctctaaattacacagtattttatagcaaaggtagttactgtttaaatttttataatttatagtcatttataaatattgatagctatatggttttgtttctcttctcttgtgtgttaatatcacttgctaatggttggcttgatgacaaaggtatggttctattgataccaatgtgcctaaaatattagaagttgacagtgtgggaattgtattttccacctgaggtcactgactttaagtgttaggcaaagctagtggccattggatggtgcttttctggagatcctcatttaagtaaaggtgtatatttgtgactgggaagacaaggaggaacgttcatactacttgtcctacccatctctctgtgtgatactttcatttttacaaggtagcagtgtcaggtgtggagaaggcagtggcaccccactccagtactcttgcctggaaaatcccatgggtggaggagcctggtgggctgcagtccatggggtcgctaagagtcagacactactgagcaacttccctttcacttttcactttcatgattggagaaggaaatggcaacccactccagtgttcttgcctggagaatcccagggacaggggagcctggggggctgccgtctatggggtcacacagagtcgaacaagattgaagcgacttagcagcagcagcagtgtcagctgtttgattgcccagtcccatctgcgtcacataattttgagctgattattcttgttggtggatctctttctggggcaggtacctcgcgtcttcacaccccagtagtgtcattatcttaggcaagactcttccttcttccttttctgatcctcattcacaaactctctacccatagcttaaccatagtcgttcctccacatgttcatttttctgtatctttaatatgtgcgtgttcacacacatgtgcatacagtgtgtgtgtggctcacggaactaagtgctgtgtgagatttaacctttatcagattgtatgtaataccttcagggctggaatcgtgttttaacatttttcatgttacactttccttgccagcaatgtgcttctccataggaagagtctataactagttactgatttgaagggaagacgcctgaataacctcaagtccatttttattggggggggggggcggggggagttgtccttatgttggcgcctgtggtatatccagaagagaccaggattggagttagaattggaggtgagttccaagccttctacttactgagtaagcctgaagcaagccagttttttaagtgcctgggactaatgagaagttcaagactgactatggagtaaaatgctaggcaaaaattgcaagatggtatggttgagatggagatcatggatttatatattaataatataccattattaatataaatatttaatataaatataataatgtagatatataaagtttaatataataaaccaccaccagtatacttaggagcttggatttcttactttctagtgcagcatatctcagccttgtcagtactcacatcttggtactacttggtgtaggtgtctcctgtgcattttaggatgttaccagcatccctggcctctacccactaaataccagtaacacttgcccaggtaaaatagaaatgtctccagccattaccagatgtccctgggggtgggggtgtggcaaaattgtaattgttgagaaccattgcactaaaacagagccactaaaactagggttagtgattgacttgtttcaaggaaatacttattactatttttgagtcagtgaactgtgcttcttagtaaaagttctagcaagcactgtagtaaagtatgaagtttaaaaagtcagtttaaattctagccagagataaccatttttaacattcaacacgtattttctagacacactggaggatttaaagtactctatggatttatgatattgaccttgttcttgtaatctgtataagtgaagtgaaaagtgaattcgctcagtcgtgtctgactctttgtgaccctatggactgtagcctagcaggcttatcagtccatgggattttctaggcaagagtactggagtgggttgccatttccttctccaggggatattcccgacccaggaatcaaacttgggtctctcacattgtaggcagacactttaccctctgagccaccagggaagccgcccagaaaatactggagtgggttgccatgccatcctccaggggaatcttcccaacccagggatcgaagccaggtctcctgtactgcaggcagattctttaccatctgagccaccagggaagtcctaacctgtataagcccctcactaattggcagaagaggagaatagggcagtggcaagatttttgttggctctataattacaatggttcccaaatcagtttttttgtatgtaggttattcttacaggttccacatttagaccaaataaactagtttaataggaaagtattgataattcatgagttttgcaagttagttagtaattattgtttattaagattctgttttatgtcagtatgtcagaatgcattactgtcttttaaataattctccaaggactctggaagctagtaggtggtaccactgcatgatagatgaggaatctgagactcaggagtttgaccttctcaaagttacccagagtgtaagtcgaagagtgatccctgcccaagtctgtcataattccagagccaggcatctttctcatatgttcctgtcataccattcactaactttttagcaacaagagcatgtcattcctttgtataaggggtgatttagattgtgtatattggacagctggctttggatggacgcacacatacctgagcaggaatttttatatttcagttactctgcaaataggataagtggtaggcatgcaagaatcaaacagagaatggcactgcagaaggtttagaaacattgttcttaaatgtcattcccttttcttcccagcagagggctgtgtgtatcaagaacaatagagtcataaaattagttacctttataaaaatgtttactaatttccttaatatttaatattcattagaacacatttttcagcttgagaaaaaaagtaaatggtcttgaaaacagatttatgcttattaacgtgaaaatcacaatagagaagaacagatttaggaaaatggcatctaacacttggggcttcccactagctcagatggtaaagtgcctgcccacaatgcgggagacctgggttcgatccctgggtggggacaatcccctggagaaggaaatggcaacccactccagtactcttgcctggaaaatcccatggacggaggagcctggtaggctacagtccatggggtcacaaagagtcggacacaactgagcaacttgactttcactttcatctaacagttaatgccctctgtgtgtgtgtgtgtgtgtgtgtgtgtgtgtgttcgggtgtgcacgtattcgtgtgtgcatgcatgcctgcttagtcatgtctgactctttgtgaccccatggactgtagcctgccaggctcctctgtccatggaatttcccaggcaagaatactctggtgggttgccatttcctactccagcggatcttcccaacccagggatcgaacccgtgtctcttgagtctcctgcattggcagacaggttctttaccactagcaccacgcagacagtctataaaggagctggaatatagtcttaacattaaaaacagtgttcagttgattgtattttcctacaaatgattctggagagagtaaattgttagaactgtaaagcatttttagatttaaaagactgtttttttttttcctctctcttaccatatttataacattttgtcccctgcattagcttctcactggttgagtgatgagagaattgggtgaaaggcagaatctcagttctaactcagatattctttctcacaaacagaaacactgtcagttgttgctgtggaactagaactaagggatttcttaaacgtcctcccagaagatggcactgcagcgtttttcttgccgtatcttctttactgcagccgaaagaaatcattgacttgaaagtatcattttaaatgtaccacaatggcacatgactctgaatctcgaaaagctgaatgccatatgaaacatatatatataaagggtttttatattgaatgtgtacatacactgcaaatgctttcagtctgcttgctaagttgcttcagtcatgtccgactctgtgcgaccccatagacggtagcccaccaggcttccccgtccctgggattctccaggcaagaacactggagtgggttgccaactccttctccttcagtctacttacctcactgttattactaatttcataatttatgacctgagtccatttaattgtccagaatgttaaaaagctacaagacattgtaattccctcaaagaaagcatatattttgaaagatagaggctgacttttataccaagaaacatcagtttactgttgttggagccacgacagtctttttcatcccaggaacataaaacagtttgtaagtgtgttcaaaagaatgtccttccaa

SEQ ID NO: 69 - DNA, 23687 bp, Hippotragus equinus
  source 1..23687: mol_type = genomic DNA
ccttgtgtttattttagggccaagggactgatctttgaacgggaagcttcaaactttaaaaaagaagccttcagactggctttgaagaagacaagctagacactgcttcagggcacggccttcagaatgcatctcgcctgtccaggggcgtccctggtgaggagctctttgaagggtttgttccacagagggccagagagctgatgctcatggaaccagattggtggatttgactttctggaacaatcgtcttgctttattttattctttctgagaggctggaggtactgatgggactgaagggcctccggggaagggaagcagcactttcatgctaaatgaaaactagacaagtgactgctggcgactgaagacacctaaacgccccacatccggattcagcagactggggacccagaggaattgccactgctggggagaataaagccagactggaaaagaaaacccaaatgaagagaatgagggccctcggagagtaaatggcggcctctacctccacagagagcaagttggcctcctggtgagtagcagggcctgcgggggtttagttcctgccaggctgctggacagatgttttgggtgaactgaaaatccccaactggattgtctaaatttaattaagcgggcgggaaccattttcctcagagccactaatcaagggccatttctctctgaagctgatgtgttgtgaccgctcaagcctcttgcagggtctagtgctgctggtagattgcagaaaggatagctgtggctggattctgcagctgggccgtgacagtaccacaggcgatcgagtcctcacttttgagagacaagcagaggtggccgtgtggaatttccccacgaggagaagtttggccagactggctcttgaggggtattacacaacacctgcctgaaacttttcttaaccctaaatgggttaagcctgtctgaatttggttcagtgaatgttaaatcgaggagaggaaagtgagaggcgtggtttcaaaagaatgagcagagtttatgacgtttatatgtgtgcagttcaaaatgacactcaagtgttctttgtgggcctgtcaagagtcggggcactttcatccagggaacatgaggaaaaggtggaatggagcccagcagtggggtttcattcgttcatcatgtatttatctacctacaggcttccagttccctgacatataattgacgttcagcactgtaactcacataatcatgaaaagattacagtcagtttagtgagcatccatcatctcacacagatacaaaataaaaggaaaaattttttccttgtaatgagaactcgggatttactctgttaacaactttcatgtataacacatggcagtgttcactacatttatcatactgtacattacaccaggcctttgctggtggatcagcagtaaagaatcctcctgccgatgcaggggccgtgtaagatatgcaggatctatccctaggctgggaagatcccctggaggaggagatggcaacccactccagtattcttgcctggagaatcccatggacagaggagcccggcaggctacagtccacggggtcgcaaagagtcggagacggcgccagcgagtaaacaacagcaacaacacgttacaaccctggcagtacttataactggaaggttgtacctttcctcatccgatccccacttcccccaccccctgcctctgataaccacaaatcccatctttttctatgacattttgtctgaagcataactgacggataacattgtacccaacacagtgatgtgctgtttctgtacgttacgttacaagaggctcaccacccggcaatggcgtttctgggctgcgcccgaggcatttttgatctgctcttgccctgaagctggtggcacattgagatctagaactcgggcaagcggaatgtgctggaaacagagttactgcttgtcacggggaggataaagtgggggccagggagggcagcagggggagggtgtagattggggagaagagtgcagtcactgctctggcctgacgggcatgctttcagagacagaggctgaacccagggccagcctggggagtttgccttgtggtcttaaggagataattatagtcatacctcagaggagaccccgagtctttagggaagagcagagggttgtgggaattgagagcttcctctgcagagaggaaatgagaagtttgatgaggggtcctgtcaaaggagggatgaggcttttagtttttgtcttgtaagttttttggctgagccaggtggcatgcgggatcttaacttcctcagccaggggttgaagctgcgccccctgcagtggaattacggcgtcttcaccagcggaccaccgcagagaggggtgcggtgcccccactttgccattacagacgtgctctcctgcctggagactgcagattccttgtgtgcctttgctcgccgtggccccagggctggcgaatgcagcgcacgccacaagccctcggcaagtgtgtgttaaacgactcagtggcaggaggtctcgtgcccagcagttgtgagggcagctaagacatccctaacttacttcgttatcagcatcttagaagacacgttaccaaaccgtgtgggtacggagttaaggcgcagtgtctcaaataagaggcgtcatcgtgggcgcactgtctttccttagctgctcactgtgttttggggcagagggtcggacagctggatggaggcgtgtttttagcttgagtcggccgcacttaacaaaatggtcttatctctttgtagctctcagcttccttctcctctggggcccccagaaggcttttcagataccaaggcatgagtccctgttgggctgggccaccggaagctgcgtgttacaaggccctgctcacgggatggaagggaacacggctcctttctcttctcttggcaggtggaactattttttcctctatgatggttcccaggtgaagggagaaggagatccaacccgagctggcatctgttacttttatcccccgcaggtaagccactcggctcactcggtggggaccccatgacctttcaaagggtttatatcttgacagttttcttcgcataatccaggcatttgccacttctactctctcattctttcttgattatgattatgattttggctatgcggggtctttctgctgcacacaggctttctctggttgcaccagtggcggctgccctctggctgtggcgcacaggctactcctttcggtggcttctcttgttgcggagcgtggctctagagcgtgggcttcagtacctgtggcccgtgggcttagttgctccgaggtatgtggactcgtcccaggccagggatcgaacccacatcccctgcactggcaggcagattcgtaacccctggaccgccagggaagccctgttcccttactcgtagctgtattctttgttgctgttctgatgttgaaatgccccagccagcggcccagtacttctgccttctctacctctctgttactgtcacgattttctgtctgctccattggaaaaaaaagaaaaaaacttttctctgaacatataccagagtaaagaggagtgagtcatcagccctcatgcccgacttcaacaaagatcaccacctgactagcctgttatgagctagcctaactcctccctactcttgtttttccccctggagtatttgaagcagatcctagacgtggtgtcatctcaccagcatcagggaacacctctaactggaaagggtatatttgggtaacatcccgctcggcgaaagttgccattggtgacaataataccatcctatatagtctgtgttcccatttcgcctttattatctgagatgtcgctcagcccttccttccctctccctttctctctcccttccttttctcctaatcagcatccaaacaagacccacgagccctgtgcggctgtatgacgctgctcaccccccccccatcctctcccccctgtgccactgaattactgaagacagcgggtccctgatgcaggggagcgtcagcacgtgtcccactcggactgggctggtcccttcctcacaatggggccattcggtgcttcctgcccagagcctttcctgtaagctaaaggatctagagccttgactgagtccaagttcagccctttgaggcaccagtgctccattctccgtggcatcacgtgctatctcccccgggggtttacttagcgtgaaggtgggtccggaggcccgtgtgtttgctcacatgattgtgctctgacttgcagagcggggattagcctgcaccactccggtctctccacggggatctgaatgggggtatgtgtgcaggcctgtaatcccgggaacaggaacgccgttcctgggccatcatctcctgcattcactgtgggcgttctgtgacactccgggcaaggttcagccaacttggcctcaaaagggccaatgctttaggctttgtaagccacgcaaggtctctgtcacgtgttcttccttgttattttgacaacccttacaaaactgtaaaagccatcctgggctcacagattatagagagaaacaggcagcagagccgatctggcctccgggctgcagtctgccaaccccgactctgaggaacgacctgggagttaggaccttcagcctcatgtctggactggctcctctccccagaccccgctggaccaacaggagctgctgtgtggacagatcgccggggccgtccactgcgtttcccacatttccggctctcctcccgccctcgtccgcctgcggaaactgaagttcgccgtaaaggttgacggtgattacctctgggtgagtttgccaggctgaaccagtgccggcggggtcgcctctaccaagaggcgcttgtcttgctgagaggtgtcgtgacagcagggtttacaaggtaacccttgccgtggctcctgagcctgctgcctcgtcccctgcctctgtgtcatccacgatgcccgcgtcccgctctgcgggtgccatcggagctgagcgctctcccaaacgtcactatcacagcctgcattgcacaaggcggcgttcgccttgcttttgaaagacttcagtcgtcctgtggacgttctttttgctctgtgatgcaaactgagtttttaatctccatcttttcttgtttctcctctattcctccgtgtactttccacacttactggggaagggagctcgaaacttgaagacactggtgcatgtcggttaggtctccaaggaccattaagggaaaaaaacaaaacaaacccacttacagctcgtagtaccctttactctcaagtccctttgtctcctgcctactcttattttaaatttattcctgagggaaacagatgcttacatgtgaggaagtatcttcgcctttataggtattattttcaatgttttattgtgaaaatttcctaacataacaaacggttgaaagaactgtatggtgaatacccacatacctctgagattctacagtgaacccttcattgtcgttgctttatcacatactatctattcatccctttatcctctattttaatgctttctgaagttgcacatatgagtatataccttaccgcctggccccaaatacgccattgtgctgcacgttaactagagttcaatatgtgtttgtggttcttctgctcttttttgaggtaaaattcatttacatgcgatgaaatagacaaatcttgagtgtatgtggtgcgtttggataaatggtgcacctgtgtaacacaaatccctatcaagatgcagaatatgttagcatcacgccaggaggttcccttatgtccttaattccatcccctccccccacatcccaggtaacactgtttggagtgttcccaccaaagaagaattctgcctgttctagggtgtcatgtaagtggaataatactcacatcattcctctgtacagggtcctgtcctgctgcttaactgggattcatccacgttgttgcacagccccacggtgcattcctgtttatcactgagcagtattccacagtctaaatgtactggtctgcttactcagtctgctttttctggatacaggaactttgtgcagtttggggcacttaagattaataagggtctagagaaatgagtatcaaaactacaacgagttatcacctcacaccagtcagaacagccatcatcaaaagtctaccgataataaatgctagagtgggcgtggagaaaagggacgcctcctgcactgtcggtgggacggaaattggtgcagccactgtgggaaacggcttcccaggtggcgctcgtggtaaagaacccgcctgccagcgcaagagatggaagagatgtggtttgatccctgggttgggcacatccctgggaggagggtatggcaatattcttgcctggagaacgccatggacagaggagtctggtgggctgcggtccatagggctgcaaagagtcagacgcgaatgaagcgacttggcacgcacgcactgggtaagacagcacagaggctcctcagaaacccgaaaacagagctaccaaatggtccagcagtcctactctggggcacatatccatacaaaactctaattaagaaacatacttgacttccctggtggtccgggggctaagactccacactcccaatgtgggggccctgggttcgatccctggtcagggaactagatcccacaggctgcagctagagaagatttcacacgccacagcaaagactggagatcccacgtgccacaactaaggcccggtacagccaaataaatatgggaggaaagaaagccacatgcaccaccgttcagggcagcactatttacagcagccaagacacggagaacgtccatggacaggtgaatgggtaaagagggtgtggcccgttgcatacagcggcccactgctcagccgtaaaaaagaagggactcatgccatttgcagcaacatggatcaaactagagattagcatactaagtgaaggaagtcagaaacgaaagttggaaagacaaataacacgtgatatcacttatacgtggcctctaaaatatgacacaaacaaacagctacaaaacagaaaaagtctcacagctacagggagcagacttgtggttgccaagggcgaggaggttaggggaggggagtcctgggagtttgcgagtagcagggcaaacacataggatggataaacaaggccctgctgtatagtaaaggggaactggactccatgtcctgcgataaaccataatggaaaacagtctgaaaaagaatatatgtggcttcccaggtagcactcgtggtaaagaacctgcttgccaatgcacgagacatttgtttgatccccggttgggaagaccccctgaaggagggcatggcaacccactccactattcttgcctggagaatcccatgaacagaggagcccggcaggctacagtccatagggtcacaaagagtcagacatgaatgaagcgacttagcgcagacatatgtatccctgaatcactttgctgtatggcaggaattaacaacattgcaaataaacgaaaagaataaggctctaaaaacattgctatacaagtctttctgtggacatacatttccctttctcatgggtaaatacataggcgtgaagttgctaggtcttacggttggtgtgtgttgattttataagaaaccgccagacatttgcccaaagcggttgcactgtcttgcgttcccactgacagtctatgagaaggccaggtacttcacaccctcatcagcgggcatgtcagtctgtttattcacaattttagccactgagctggatgtgaagtggcatctcaatcggtgttaatttgcacccccgtgactagtcacagcagggcttcttcatgtgctttgtggacatttgggtgtcttcctttgagataatttcccccagtctctgggtgtgcttaagtttcttagtaatgtcttttgatgaggcgttttttggttttaatgaagtctatcagttttatcttttacagttattgctttctgtatcctgtctaaaaccactgcctacccattagagaagacattctccaattctggggggcggcagccggggggagcacgtttcatagtgctagcttttaaatttaggtctgtaatccaccttggataaatccttgtgaatagtatgagcagaggtcaaagggccttttctccttgtggatgtcccattgttctagcaccgctggtgaaaaacttgccttttcctatttgcttcctggggctcctttgttggagctcaaatgaccgtttaagtgcggctctgcttctgggcgtgctgttcttgcccactgggctttctgaagattctgtacacgtactgctctgtcttgttgtctgcagctttagaataagccttgaaatcagctgggggaagtcctccaaacttactcttctctgagacagcgtttgctcttttcagtcctttgtatttctgttgcagaatcagtttgtcagtctctgaaggaaagttggtgagattattaggatttctttcaatctgtagaataactgggggagaagtaagcacttaactgggcgccagactgtagacggcacttgagtggcgcttacattcagagagtatttgtttgtttacctgtttttgttcatagttggtttgttgaagtttctgatggttcccttaggagagattcctccaggtagaattagtgagtcaaagaagatgaagtgtttttcaagctccataaacagggggccagattacttcctaactgagcaagtgtctatcgtttgtggaacggaacaccgccgtcgctccgccctggcgtgacgatgcactgggtgcgggttatggaagggccccgtccagctggagaagggatggccactcctaaccgcctggatcccatgtttgctgtgaaacccaaatgaaacatccagtgtccagatcacagtggtgaccatacgggggttcaggagagaggtcacggttggctgcagtgatgagagcaggcctggggagctggaatctgtgtgtgttggcgggggctgagggggtggggatgcccaggcagatgagcaggaagcagggatgatgattccagctcaggtggcaggagtgggttcaaaacccacccgtttcctgtggagcgctgcatggctgggagagggtgtggggctgcacacagaggatggatctccaggggcccgtggagtctggcttagtgaaccttgggtaccaggacttcaggcttggcatccgagaacaggaaaacgctgtcctctgcaggtgctgggctgtgccatggagctccccgacgtcagctgcaggcagcttctgcaccggctcattggcttctttcattttcacaacgggcccatgtctctggcctgcaaggtacgaggagggcagcggggaggctcacgtggaacctctttagcaaaactgacactgccagggcacatccaggcatcgggaaccctttacacaaacacgacatgtcagcgacagggtcatgggcccccggaacccctcccagacgcctttcttccctggtggcctggggcccattcatccaccttctgtcctctccttgcctgggggtgtgggcaattcagaagatgccctccctgccagccgggtccgtgtgagggacagttctgcggggggctggagtccccactggagcgcgagtctcgggatcgcgggtactgacgccggctgttctgtttcagagctgcccgcgggaagaactgcgcaccgagtgggacacgctcatcgagtacatcctggggaacacgggcgacctgcacaagatcttcaactgcctctggcacctggaccgaaccaaagtaaccggctcggcacccctgcccgctgcatgtgtggatgggaactgggcttctggacgcgagtgcttccccttcgatgagctgtccctctgtccccatggctgttaagaatttaggttccaggcagtgcttgccagccgcgtgggctaggaccagtcaggtcacctgtctcagcctcgttctccttacccatggtggcgtgacacccacctcccaggactgttctggggctgaaactgggacagttacgtaaaggacagatgcccaggaaagagtgttattcctttgttaatgcccagacgtgctgaattcagtaatctgaaggcccccttctcagcgttatcattagttattctcagcatccagaaaggcccagggcggccactgtctgggacaggggggctgggcagggtctgtccctgagctgtcgcctcggcacatggagacgggaggccacctgcactgctgcgggctggtggcctttggccttggcagacgtcacatcctcaccatcacagcggggggcagtgtgagcggtgctatgaggagccctgcccgtgccccgagcatcttgggagtgggaccttccaccatgcgtggcctggctctctgcgggtggggaccgtgtccctgtccctggggtgtggcactggctcgatgctagaaacagggacgggttttcccgctcctgtttggagggcttcttggaagttggcccagagcgttccgaggggctgtgaaggaactaaccacccacggtaagggctccagcgtggctccttaacactcagtgctgactgctcccgggtaccgcaggttccggctgccaggcaggaacctggaggaggctggtggccactgctggcccttcgtgggcaggttcagatcctctgcctgtccctttagggacttttttataaggaccgaggaccgagacgtgcttccctgtgtgaaagactgtgatgcttccatttcccttctggctgagttaggggaccgggtcagacagtaagccacctgccacagggccttgggctgcaggggagggtgggttcacctgacctgaatctgaggggcgggctctcccctgcggctgcctcctggtctccgcgccaccgatcagggcctccttgacgatgtggacggttgcctgtgaagagccatatgcccagttctctctgcctcccggcttcagggaggcccccggtcccaagcagctggcgttttgtggtggcagctgtgcaggatgtcagaggcgtgacgtgaccagtgtgcggcatgccctccgtccgggctcgggctcccagcgatgcgtttgccctccgcagccccctgcccgtcccctcctgcccacgggggcgtgccaactggggcttgcctctcgccccacacaggtggagcccctgctcctgctcaaggcggccctcatcctgcagacctgccagcgcacgccccacgtgctcgccggctgcatcctctacgcgggactgtgagtagtacccccgccccttctccctcatccccaccccccgctgcagccctgaccacccggccacctcctgatcggggctggggagccgagagctctgtgtgtggccagtttcagccggtcttctttggcaactcgagggtagtttagattcgattgaggggccgtgcctgtccctagggaattggaagctgttgtgtccagagaagaggtaggagtgaacaaggcagctttgcagagatccatgtagctctcagctgggccatgcctgcggagtggtcggtctcccgccctgaccaccgtcaggagaggggtatgaggcccatggcacgccccctgctgcccagggccccagtgtaccagccgtggctcctgcttgggctccggcagctgtgtggttgggtctccctcgggctagcctcacagaggtctcattgcacctcttcgcctggctggagggcctcttagagagcctgggagcccgccatgcctcctccgggcctcaaggaggcttggccatcccggtcagaggcaggggagctggtgctctgtgtccagtgctatgatcctggagggatgtgccctggagaagccctcctggcaccttaggaatattcttagtacaagtcggtccaagcatttcgccatttaaaactgatggggaacagccagagggcccctgtgagtgcctccccaggtgacactcccaccagctgtgtcccccagatccgagctgctgcgggtgctgggactgtcttgatgccaggtcctgactctgtttcttctctggtgttctggttcctgtccaggatcgtcagcacccagctcccgccctccgtcacggccaaggtcctgcttcatcacgtggcacatcaggaccaggtatcaaacccctctccccgagcaccctccccccggcggggagtctcccccagcgagtctgtctttgtgtcgggcaaggctgatcaccagcactggatggggcaggggggcagggggctgccatgtccttcttaggacccccgtccatccgtgtggtccccctcaagtgaggtcctggcaaagctggaagaaaatgtttcctcctgcgtggtcggcttggatggttggtttttcttccatccaggtggaactgtgagaatatgacttcccgcagggtgggctttatgtcaaagcaatgttggatttttttcagagagagactgtaaaagacggcttaggacgacagtggcttttaaaatacttctatcttatatttgcctaattgttttcataatgaaggaaaagtcataacgtgctcattgagaagaaaactgcccacagctgggccacatagagataatcacctctagcttcacttccttgagctcttttctcttttgttttgcaagttgattcttagtgtgtgaaactggttttaaatctgtcggaaggctagctttttgcacttgctatgtcagcagacatttaaaaacgcacgtggggctctattccggctccttctcactgtggtgcaggtggcgtgagaacacccctcctggtgaactgtctgataaggagagggccgaaggggtcttttcctttttcccccttgttcagctccgagaatcaatactaaggaagtcatccgactgctggaaaaggtttatactcaaaactcttgtcacagtaagatttatgaaagtgaaaaatcagattatcacttagacatctaaggtaggagctgcctgccatgttttcttggcctgctttactgccacggctgcagcttgagtagctggacggagacctacagccgcagtgcccaaaacactgactggcctgccctttccagacaggttgctgatggtggtctcaagtcagggagtgctgaattctcctgcaccacggtgaacttcctatgactttagtcagccgttaaaaatggccgaaggtgctctcatgacagaaactgtgagtccctttttcgagcagagaaatagaactttatgtaatgtgtgctcaaagtattttaaaaatgcacggactttacaggaaaatgtgcctcgtgttcacaggattggcttgtggaagaggggattctgtgtgatttttttgaaaagaatttttgtctggagttagcttctgtgaaggaaaccacatcctttcagaggagggcaagtcattttggctagaagagcagtttttggttttcctcttgctttgctgggtcctttcggtggagacggccggaaagctcttttgaggagattccccgggtttcccgccttggttgtaaacgcagaggccagccagcctcgcctcgggtttaggctgaggccttcgctgtgagggtcacaggcccctcacgctgctgtcacaatggggcctgtgtggacttcagccagggctgcgggagacgtggccgtattccggaagatgacttccctgcaggtctggaagcacaggaacactcgctgtccttccccaagaggaggaatgagaggttggaaaggggggatgccggtatgcgcctgggtggcgtggccgccttagccggcgtggccgccttagccggcgtgaccccagccccggcggggagcaggcagcctggggggatttgttccatccgcgttgctgtgggcgagcggctgggcccagcacccgggcctcggccacgtttcagggacagatggcagcatgcggtcccgatgggcaggtcagggagagcacgcggtgccccgcaccgacacctgtctgtttattttcagaggaaacctacgggaggggacgccctgcaggaatgtggtgagtagacgggtgtcctgccacggtttggaaatggcctgtaagcagcctggccctatccaagtcacgtggaaggcggagcagtcccaaacagttatcctgtcggctcgtgagatcagggaaatattaacaacgctgcaagggcaaagttactctcaaaatcccagttgtaaagcctctgattttaggcacagcttttaaatcctccctttcagctcctccttaaccctcagcaccatgaggctgctcagacgagttccaaaaggtgacaatggggagagggtgacggcagggccactgccaggaagacctttggcagcagaggggggtttagtttgaagcctaagttcgggcagacccctttggtcagttagaagtgcttttgatccaggttctgtcttaagtgccggtcagttttcttccaccaaacgtcactctgggagcagagtggcccacatgggctttcccttgctgacagcagaaactgtagctgcagctttgtggcttctgttctggggaacggagcccagagctgcttgctgggctggcctgcgggctggaggcatcatgccaaaaacacttcctgccccctcttctctggcccagagagggccctgaccacattgctctgcacttctaggagtggcgctccctcccaacgttcagatcacgcctgttttcctgactgaagaggaagccgccagtctccgcgagttcccctgggagcccccagccaggtaagggggctcaaaagaggctgctctgaacccacatgtcgggcagtccctcccaggggctcatccagaagccccgtgcatcccatcctctcacgattccctcttctccacgctctgccctggcagggggtgggggtgagggatggacaatcggaccttcagcagagatgaggggcatctggcagagtgagacgagcgtaggtttcagatctgagatccgtggcttacctgctgtgtgaccgtgggcaagtccattccctgcccgagcctcagtttttccatctgtaaaatggatccagtaatgcctacgtcttgggttcatcgtgaaaggtgaaaacagcattcgtgcagcgcccatataggacctgactcgcaattaagccccagacctgggtgcctctgatccagggggctctgccacttccagcagtgaccctggtgttaccgtgtggcagcacatgtcaccagtgcctgttatttgtaagggagctgctttagtcccccaggcagggccttgaccacactcaagtcgtctgcccttcctcaccagcactccggtgcctccagccagactccaggagccttcagccgctctgaaagaaaacgcccccggacacatgggctccaaggctcagacctcaacgaccacacctgaacccccgtctcctgatgccgcctgggcagatggcagcagggagaacggacactggcccggccctgacctgaagatcacgctgcccgcgatgcggcaccgcactgctgcgggcaggggttcgggtttattcagggggaatgaggacctggacttgtctgaaatccacatcccagaggctcaggaaacagaagcatccccgggccatcctgctgcagatggcgggggttctggttgtgaggaatctgtccacaaccccagcagtcccggagccaagccgcacggggccctgcccctgggccgcctccctgcttccgctcctgaggtggtcccccagaacggagccctcgagcagcccgcagaccttcctggcaatggcggccaagcccccgtccccagggaagaccacgtccccagcaggacgagcgggcctgggcgggcaccttgcttggttttgaggcagaggggcactgaactgcccccggaggaacatggtggagagcagcgccgcagtggggctcccaagggctgcttgacccccggcccggactccacagacccctcagacaaaggcccctctgcagacagaaccgcgtccagggtgagcccggcctcctgcaaggggctcgtgcggatgaacctctacacacacagcgtcaagggcctggtgctgtcgctgctggccgaggagccgctgctgggggaccgcgcggccgtggaggaggtggtgagtgtgcagcggggttgggggctggggcggggtcgggctcagccgtcagctgcacggcccagtacaaacgcccttgtttatatggtggggtgcagggagtgcccacctccctgtttgtgggcggtgagcgtccagtgccaagcacagagccaagtgcaaaggcagccaccagggctgccctctccagcgtccccactttctcggggtctctggttcgtagtgacctgggagggtgctgggcactgaccacacatggcctcgcccccgcccggcagccctcacatctctgtgtggccagagtctgcacgtgttaccacctgggttgggtttctccacgagccccaattcctgtccatctgaagctccttcctaggagcctgggccctctgaaatgctgactggctccagaaggcaccactcaaacccatgcagctctccccccacgcctagaggctcactgacctctgggctggggtccatgctggatgcagttgccatagtaacagccctgctttagttgccagggaagcagcggaggtaagagcagctggttgagactgctgcagggcgaacggcgtcctggggcctgccgtgtttctcttcttcaatctgtgttgtgctaagctcatcttattagcatgcagggcccatgaccctttgtaaaggagcgggtcccccttggagtgcagtggaggagggaaggcgggtccctgcacggagccctcccgcacctgcctggcccctctcccctttccccaggccccaggtcaccctctccacctccatctccctggctctgaccaacatcccccccgccccccgcctcattgtaacagctcggggaccaggggtgcagttccgcacatccatcctccccctccccccacaccttggtctcatggtctgtttggcttagcgcccagctcagatgaggccccccaagatagaaagaagaactaccacaggctgctcagagagaaggaggtaaattagggttcatgctacatttgctgtatgtaaataatttacatctgctacttctaccaagccttgaacagcgctggggcccagcacggtgacgcccatctcgccctgaagtagcgatggagacctagctaacgcacggggcgggtccacacctcttgcttgtttcccggcccccaccccgacccctctgtcccccgtgggcctgaccatggcccggcaggtgggaaggtgaaggactgaaggcctgccttccatggccctttatatgtggacatggcacttggtctgtcacggcccatcctggtgtcaggacaatgacttccctgggctttcatggacaggacggtttggggtctgggaggagagagaacacagctttacagaaaaggagaaccagtctttcctaaaaagagaagggtgtaacagactttgatcagcttgctggtttgagaggggagtcggttgatcagacctggaggccgtctcctttataactggcagagagctttcactgccttttggtcctgacctgcacacaaaacagttgacctgatttccccccggactctgctgctgtcagaaaagctaggccccaccccccccaccctcccagccgggtgcacgacactcagacgtgagcgtgagcacagtccccccgggtaggactcgtcgccatggctccgtgtcgttttgccatcacgtctttgcgtggaccagctgccaccgtttctgcttgctgagggtgggtcagggccctgggtgaccggggtgagtggggagcagccagggagaggtcccccctggttcagagggaacagagtcggctcctcccaccagggggcagcagagagccaccgacagtttcctgctcagaaccctgagatcatctcagtgactttcagccacagtgatgggatcaattattcattgctacagcaggatggggaactgtgagcgtagagcagacgaggcccgaggttagtgtgttggcagaaaatacgaaaaaccttcctctcccctgaaactcgtgcttctgagtacatgggtgtccctgcagcgactcttccgcatgtttgggtgtgcactgacagtgagccactaacttagctgtggactaaaaggcagggggtcccggcacagcctcagctccgtgtgctctagtgtgttgtgcaggtcatgtatgtggcagcgtgtcttggggttggcaaactctaatgtgaagggatacacagcagatgttttctgctttgtacagctcttcccctctgctgttataatacaaaaacagccatgaacagtatgtaaactggggctgtgttccagcaaactgttatggacacaaaaattggaacttcatatgatttcacatcacaatattattattttgactcttttttctaaccatataaaaatataaaaaccagtcctagttgtcaggctgtaaaaatggtccacgggccatgtttgccaacccctggtctcctcctggacactgcctgtcattcacacctgtgactgagtcacagcctgcagctgacggtgcctagttcacgctcacagtccagtcaccaagtggctgtggaccgggcacctcctgggagccaggctgtctgctgggccctggggacgccgcgtaaaccttgtagccagacctaatgcctgagtttcatttctgcaacatgggccagaaatactaatttaagtccagggtgctttccaagatgacgcctgagctttctgacattcacctcagaacattctctctgcatcactgagcctttttattgcgcatagtgttttgcacagctgttgtgaaataagtcagcccacagacacatcttgttagtccagggacgggtgctcgtggaagagagagcgcttcttcaaggacgatgattttcatattcttgacttcaggaaaacgcctccctccagggagcactttagaatggacagagtgtccatatgttatttgacttccgccagtcagcagtgatattcctgttttacagatgaaaagaacaaggtgcaaaaacctctgtaactggccctggtggtctggctaggaagaggctgagacacgggctcgttcacctgggcactagccactgtctccttgtgacttcagtagcccccggggcggccccatggggccctatttcaggtccatcgggtgtgacatccctgcttgatgggccccagagctcagccgttggtcattggaaaatgtcgttgtgggaaaacagattgaagagggaagttcatgctatatcgttaggtcgcaaaactagcgtcagtcgttgcttacagtctgacgcccatctttagcttataaacaacgactcatacgaaaggggacagtcctgtgttcccacggcacctgcacgtgacatcccccccagaggcgatggaacatagaggtgcctgggcctcagccctgcacggccttcttcacctgggtcctcccctgggccagtgagcggagagccgcccgcccacgcccctagctcctctggggttcccgggagggagggggcgcgctgcacatgcggatgacgtcatgacgtctcagtctggctgagacgcgccggtcaaccggcgcgggcggcagcgtggtgaggagggggcgggccgcctgccagcagctctgcctggatgctgaggttctgggctgttcttcttagcttgttttcctttttaccgcttcttttactttttggcttccctctatgttctcatttttctacaagtttgaaaaggtctctctgtggtggctcagacggtaaagaatttgcctgcaatgttgtagaccggggttcgatccctgggtcgggaagatcccctggagaagggaatggcaacccactccgttattcctgcctggagaattccatggacagaggagcctggtgggctacagtccacggggtcgcaaagagtcagacaggactgagcgatgaacgctttgaagaggtttaggacctcagggcagaagtcgggacctctccaaacacgggtcctagcccccgtggcgctaagtcgggcggccaggcggctctcctcgggtggcctgctgagtggcggcggcctgtcccctcccgccccgcagtaccacggcagcctggcgtccctcaacgggctggaggtgcacctgagcgagacactgccccgggaccaagcggcccccgcggtcagaacctacagcttcgcacactacgaccgcgtccagaacttgctagcaggtaagggccgcctccaggaagtgggtgaggggtcagcacccgggcccagctccctggctgggcgggaggtaccctgtggtcaggatgctctttctctctcggagcccagctcccaccgggtttaactactctcggcaaactcttcccggctggtctctttctggccctttctccagcgttttgagagaagcacccgcgtccagactgatggggttgcctcccgacttggacccgcgtgtgccgagacaagtgctgaccaccatcaggggcggtgggagggcccagcaccgcggcctctgtcccgctgcctctgggcacccacgctcctgcctgggggggcctcacttcatcccagcttttggtggttctgggtttgggtgtactggggggcggcactctgccacgcatgacgacttccgtgtcctcttccggaagccaacctgccgcaggtgaccacagcgcaggaccgccgcttcctccaggctgtcagcctgatgcattccgacttcgcccggctgcccacgctgtacgaggtgactgtgaggtgagtgtccccaggccgcccccagcccagcacccggggtccctggcagagcctcactcacaaccagatgaagaccagtgcgaggactggcccgggccttcctgacccgccctgcgggctgctgtcatccaccctcaggcttcccggagtcctgtacatgctgggtcctttctggggctcgggctgctccagacactgagggacagcagggaggggacccaaggccctccccgtctcggtgtttccatcagtcactgggggcggaggaggggctgtcgtctgtctgccaactggataggtcccgcgtgctcctgaccacaacatccagatgtccccacctcaaaggtctcccaagggcagcgtgtcctccccgcaccagcatgtgcccccggatgctcacagtcagcagcatggtgtatcacaccccgggttttcttggcgttagttgggttttttttgcacataagaggtgctgctgctcagtccctcagtcgcgtctgactcttgcgaccccgtggtctgtagccaccaggctcctctgtccatgggattctccaggcaggaatactggagtgggtcgccattcccttctccaggggatcttcccaatacagggatcgaacccctcatctcttgcattggcaggcaaggattctttaccactgaaccactggggtagcccatataaaaaacatgatcagtattttttattattttactggtctgtcttcttaaaaaaaacaaacaaactggagcacatgcacttgctgttttttaagttcctttttcactttgttgcgtctcttgaacaccttcaggccagcagatctagacctgttaattagtggcatttacagtctttaaccaactaaactctactttttctctctacatgcttctcttatgaaaccagtagcagaaaagaaggcaagttagaggatcagaaggggagtgcttgctgtgtgtgtggtgtgtgtgtgtactgtactctggagtgggttggtcgggtacattctttgtaacctcatttcacagacaaggaaactgagacacaagtatgcagtagggtgaatgagtcgccccagatcagaggctgagtcaggatttgcgcccaggtgtctcgtctccgtggcgtgcgccccgccacgcacgcttgtggttggggcgtgcgtgcgtgcgtgtgtgtgtgtgtgtgtgtgtgtgtgtgcgcgtgcgtgtgtgtgtgtgtgtgtgcgcgcgcgcgtgtgtgtgtgtgtgtgtgtgtgtgtgtgtgtgtgtgtgtgtgtgtgtgtgtgtgtgtgtgtcagtgtagttgagaggcgggctgtggggcgtgggctctgggcctggctgaccaggttctaatgtctgtcagctgccacacaggagtgtgggcgtttctgctgcccagcgctgtctccagccaatatttctgtgtatctttccacaataaatgtgcctcctctggctttaagtcagagctgcccacgctggcaacccagacccaccccccacttgtggacctgcagcgtctcaccttcctcggagctgagacttttcatggtgggatacgtagctcatctgagtaacagtaatggaaacaacagcctccatttctgaaccatcccaccatgggctgagcgatttgtatccattcctaactcatttactccgtgaagtctcagtgagggaattgactgctgtcatctattcttctgatgagaaagctgagactcccacagccagaagtctcagggctggggtgagcacccaggttgcgtgggacctccagacccgtgctcggaaccctgaggcaccccttctctgtggccacagtgactgggcccatgcttgtcctgctgggccagagacctcgcggggtctctggggtctgagatctgcatggtgccagactgtggtctcctctctccgcccccgaacaggaacgcttccacggctgtatacgcctgctgcaaccctgttcaggaaacctacttccagcagttggccacagcggcgcggagctctggcttcccgaacccgcaggacggtgtcttcggcctcccaggcaaagccaaacagaagctgctgaagcatggagtgaacctgctctgaaccgtgggtcgctcctgaccctcgcggtgcctctcaaatcaaaccccagcaaaggaagtgccgtcttgttaagtggaaagcccctctattttactttccctggaatagtcctctttggggactgcagtttttgagtgttactccttctgtggatcagggctggagggggtcgttcctcaggttggcagacctagagcttgtggtaagaacttgacagcgtgggtggtgtgggggccagggtggggccacggctctttccaccccaggggctcaggtcagtgactcccccattacacggaggccggggcgcccgacgtttcctggggctgctccaccccagccttgactcgtatacagagactgaggctggtgttccttctagaacgccgttgtccctggtctagagtgcatgtccctcgctgtctgcagggggtgggtctgaggtgactgcacagccaggagacggatctgtctgtctgcaagcacaccgtgcgcccact

SEQ ID NO: 70 - DNA, 46962 bp, Hippotragus equinus
  source 1..46962: mol_type = genomic DNA
tgtcagctcatcacccacccgtccacccccatttttcggtctaaacttaccaggtgggagacggccctgggcagggactaagttactgcgctgtgtcgagtcgagttccgctgagcttcttagagacgctgcgggaaagaggctgaaacccagtagccgccgccaccgccaccgcctctgttaccagggggtctcgcctccatcgctggctgcgagaactctgagggcacgtgaccggaagtacgaaggcgggcctgaggggcacgtgaccccagagcacggccgccatgacaccttccgctagttccctccctcctccgccggtgcccgcctgtttcatttcctctcgccggctttaagcggtgaaaggtcccaggaacttggctgtctcacccctttggcctagagctcctccggtcccgttcggcgctgcgtcttcggccggcagcgggcaggccgcagagagcgtaatcgcgaccgcggccggagggggagggaccatgcgcaagcagggcgtaacccgtcacgtgacgaggaagtaccgttaacagctttgtcccggcgtccccggcgctccgggatgacgtaagcctgggaggggaggagtaggagggaagactgaagctcaggtgcggctcttagcgcgcggtaagtgtgcgggcgcctaaccgggagagaggctgtgacccacacaaagtggggggctgccggcctagaggtggtggagaggggctgagacttacaggctgtgagcctggctttgaaaacttgattaccgcctcttctttcaagagacctgaatgtagtattaaagttaactgctgttgagttaggagttcgcgaggcagggagctagcttgtggtcagatgtctgcaatgatgcgtgcaagacatgttgagtgcatgagtgagtgagtcgccatttcttggcctaaggtagagaggagttctctattacttgagtagtagttgttgagtcactcagtcgtgtccgactttgcgaccccatgggctgcaacacgccaggcttcgctgtcctccactgtgtcccagagttagctcaaattcatgtccattgagtcggtgatgctatccaaccttctcatcctctgtcttcccttctcctgccctcagtctttcccaggatcagggtcctttccaaagagtcggctctttgcatcatgtggccaaagtattggggcttcagcttcagcatcactccttctaatgaatattcaaggttgatttcctttaggattgactggtttgatctggctgtccattggactctcaagagtgttttccagcaccacagttcgaaagacatcaattctttggcgttcagccttctttatagaaagatcccattatgaggaaatccccaacttccccttggcataatatctttaatttttcttccttttccctctctcttgccttttcttccttcgtcgcatctagtggggaaaagagaacgctgtgatttgcgttgggtgttcgcacagcaaacactggttcagtaaaatgagtactaggccgagagaaaaacccatttttgatcctactgctttttatgttgccatcaagcaataggggaaatggaaaggtaattagatttggactcaagattagtggattttagtctcacctctgcttatgagctctgtgacctttagtaaacaagctcttcaaaaggttttttcattgactttggtaagcatttatggccaccctctgtttgcttagtgttttgctaggctaactgtgacagaagtaatagttaaactcagttttgtggacagaccagtttttcttatctggaggaagattccagaaacagtatatattaaaccatggaggcatagaaagtttatatagaatgaaagatttggacagagattcttgttaaatatttacttaagtcttgaatacatatatgtgtatgactaagtcattttgctgtacccttgaaactaacacagcattgtaatttaactatatgtacctcaataaaaaatcttgtttagtaaaatttcaaacacagacagaatagtacaatgaaccctcatgtatacctaaccaaactttaacaagtatcaacattctactgttcttgtttgaacagcttaaaaatttcagggtactttttatatccattgttgaatttgattaatagcagctttcaatttgagctcaattctactgtatctaggtactaagttgtctccaactctttcttgactccattgattacagctccccaagcgcctctatccgtgggatttcccaggcaagaatattggagtgggttgccgtttccttctccaggagatcttcccaacccaaggatcgaatctgtgtctcctgcattggcaggcgtattctttaccactaagtcaccagtgaagcccaggtactagctaggaagattatattaattttgtttgacaatttctttgggtgttagttagcttcttcctctgttgaatcagaagtgtgacatggctattttaaaaacacacctggaaaaaaacacacaaaaactgcctctgatactattttagaacgtaatattgaaacttagtgtccaggtcaaggaagttagtgtttctactctgttctggttattaacctactgaagagttttatgttcagttctggacaggacatgttcaggcacactaaaggccctgtgtggaaggcttaccagaactgagaggaatttggaaattgtcaggtcagaatgagtgaagaactggtgttgttaaatttttagaagacctcatgacatttttcaaatactgaaggactgttttgtatggcgtaaacatttccttgagcttcccaggtggcactcttggtaaagaacctgcctatcaaaatgcaggagacataggtttgatccctgggtaaagaagatcccctggaggagggcatgcaacacactccagtactcttgcctggagaatcccatggacagaagagcctggccggctacagtacatagggttgcaataagtcagacactactgaagtgacttagcatgcatgcagacattttcttaaactgtagaagccacagttgggaataaaagttccaagtcatcaggtttcagcccagtagtaaagaagtaccttataatggtgtgagctgtggaggagtggactgtgcagcttcatgagagggagcacttcctttcccttcctgaaaatgttcagggatccagaaccttaattcagattaatttttgaattatgtggatgtgtgcaccgagttatctatgagtcttccactttgagatttatgagaactgggacttattctggacctgaaagcctgggaagattttggtaagtaggtctgggaggtaaggagtctattcagagatagtaagcgcagttcagttcagttcggtcgctcagtcttgtctgactctttgcgacaccatgaatcacagcacaccaggcctccctgtccatcaccaactcccgcagttcactcagactcacgtcaatcgagtcagtgatgccatccagccatctcatcctctgtcgtccccttctcctcctgcccccactccctcccagcatcagagtcttttccaatgagtcaattcttcgcatgaggtggccaaagtactggagtttcagcttcagcatcatttcctccaaagaaatcccagggctaatctccttcagaatgaactggttgaatatccttggagtccaagggactctcaagagttttctccaacaccacagttcaaaagcatcaattcttcagcgctaagctttcttctcagtccaactctcacatccatacatgactactggaaaaactatagccttgacttagacaaagctatgtcaaataatacaagtaatggcaaagtaatgtctctgcttttcaatatgctatctaggttggtcataacttttcttccaaggagtaagcgtcttttaattttatggctgcagtcaccatctgcagtgattttggagccctccaaaataaagtctgacactgtttccactgtttcaccatctgttttccatgaagtgatgggaccagatgccatgatcttcgttttctgaatgttgagctttaagccaactttttcactctccactttcactttcatcaagaggctttttagttcctcttcactttctgccataaggatggtgtcatctgcatatctgaggttattgatatttctcccggcaatcttgattccagcttgtgcttcttccagcccagcgtctttcatgatgtactctgcatagaagttaaataagcagggtgacaatatacagccttggcgtactccttttcctatttggaaccagtctgttgttccatgtccagttctaactgttgcttcctgacttgcatataggtttctcaagaggcaggtcaggtggtctgggattcccatctctttcatagttttccacagtttattgtgatccacccagtcaaaggctttggcatagtcaataaagcagaaatagatgtttttctggaactctcttgcttcttcgatgatccagcagatgttggcaatttgatctctggttcctctgccttttctaaaaccagcctagacatctggaagttcacagttcacatactgctgaaacctggcttggagaattttgagcattactttactagcgtgttggagaagctctatgtagtctacaaaaacaagaccaggagctgactgtggctcagatcatgaactccttattgtcaaatacagacttaaattgaagaaagtatggaaaaccactagaccattcaggtatgacctaaatcaaatcccttgtgattatacagtggaagtgagaagtagatataagggcctagatctgatagatagagtgcctgatgaactatggacagaggtttgtgacattgtacaggagacagggatcaagaccatcctcatggaaaagaaatgcaaaaaagcaaaatggctttctgaggaggccttacaaatagctgtgaaaaaagaagcaaaaagcaaaggagaaaaggaaagatataagcatctgaatgcagagttcaaagaatagcaagaagagatgagaaagcctttcttagctatcagtgcagagaaatagacgaaaacaacagaatgggaaaaactagagatctcttcaagaaaattagagacaccaagggaacatttcatgcaaagatgggctcggtaaaggtcagaaatggtatggacctaacagaagcagaagatattaagaagaggtggcaagaatacacagaagaactatacaaaaaagatcttcacaaccaagataatcacgatggtgtgatcacttacctagagccagacatcctggaatgtgaagtcaggtgggccttagaaagcatcactacagacacagctagtggaagtgatggaattccagttgagctatttcaaatcctgaaagatgatgctgtcaaagtgctgcactcaagatgccagcaaatttggaaaactcagcagtggccacaggactggaaaattccaatcccaaagaaaggcagtgccaaagtaagtgcaagggaaggtataaatttggaatggtgtaacactcttacccggagaaggcaatggcacccaactccagtattcttgcctggaaaatccatggacagaggaggctggtaggctgcagtccatggggtcggtaagagttggacatgactgaggacttcactttcactttttactttcatgcattggagaaggaaatggcaacccactccagtgttcttgcctggagaatcccagggacgggggagcctggtgggctgctgtctctggggtcgcacagagtcggacatgactgaagtgacttagtagcagcagcagcagcaacactatcattgggcttccctgatagctcaagatggcaaagaatctgtgtgcaatgcaggagactgagtttgatccctgggttgggaagatccccaaaagaagggaacagctactcactccagtattctggtttggaaaattccatggacagaggagcctggcgggctacagtccatggggtctcaaacagtcaagacatgactgagcaactttcactttcactaacactcagcaacttcacttgcgaactgacattgtatatgctgttccctttttgttctcatctccattgaagtctttttaagagaaatagaaactaggttttttacctgattaggtcataatttccaggtcattctgtcttcagtgagatcaatgccaaatggtctatccatatcagaatttaaatttgcaagtggaagagatggccactgtggtcttgatgtcattcctttctatcttccttaggaccttacacagtgattcatcttctttttcttgtatcttcagtccctatcattctaaattctgtttgagtctcccctgctcataaggtcaagagaggttttctccttctcctcaaaatgtcttgagtaactaaaagactttatctttagtttctcacttctaaccgcttttcttaagtccttggtttctagtgtctgcccacagcactttacagaaattatcttgtctaccagtactaaatccttcaatgtctttctgttgcttaccaaattataatttgttcaggttccttggtttgagattcatagtgctttgaaacttgtacctcaactaatatccaggtttatctttttttattccgttgcttgtatcctgtgtttcaaccaaagacttatattctccaaatatatcgtctgacttgccagtgcaggagacacggattcaatccctgagttgggaagatcccctggagaaggaaatggcaacacactccagtattgcctgggaaatcccatggacagaggagcctggtgggctgcagtctatggggtcgcaaagactaggacacgactgagtgactgaacaacagtaaatacttggcttcttgctgccttgttaccctttccatttcctcagctctagtgctgcttcccttagagaggtttctgtggttacttttaactcagtgtgatccgtctgtcctctgtgttccaacgtattactttgcttttgttccccttatgaggtctgtgtgtgtgtatgaggtgtgtgtgtgtatgaggtgtgtgtgtgtgtgtatgaggtgtgtgtgtgtatgaggtgtgtgtgtgtatgaggtgtgtgtgtatgaggtgtgtgtgtgtgtgtatgaggtgtgtgtgtatgaggtgtgtgtgtgtgaggtgtgtgtgtgtgtgaggtgtgtgtgtgtgtgaggtgtgtgtgtgtgtgaggggtgtgtgtgtatgaggggtgtgtgtgtatgaggtgtgtgtgtgtgtgtgtgtgtgtgatgaggggtgtgtgtgtgtgtatggggtgtgtgtgtgtatgaggggtatgaggtgtgtgtgtgtgtgtgtgaggtgtgtgtgtgtgtgtatggggggggtgtgtgtgtgtgatttgtctttcctcagttgattataaagtgctttctggaattattttgtcttgttagcaccactgtgcctcatattttactagaagcttttgatttggagaaaaacacaccagaattatgagtttacattttactcaggggcttgctgaggactttagcctgggcgatagccactcagttagctctgaggaaactgctctgaagaggtaggagagaagacagttcacatgtgaattttagctaggaaataagtgcaggcaagcctatatcttggtaaaagactactcctaatcataaagaatagattttagtgcttttttatgtatggggatatataaaaatctgaggtgattaaaattcttcctgggatatacatctaactatctgaggggcctgttgtcagcagcagcgggcctcatcctcttgacttaatttattctcagagtgccctggtggtcagcaactgcagcgggttgggacttaacccttgtagaactggatggtgagcagagctgtttgtctggtgatcctgatttttctgtgtcagtaatacttaataatgtgaatgggtgaaagaatgagagaaggtttttaaataatattttgagtataggagaactactaaagattttttttttccagaacaccattcttgcacagatcaagctgtattaaaaacagcattaatagcagaaaataaaactatgttatgtgtatgcagtaaaaagtattgtaagcttcgatatgtgttttgcccctggaaagtatgcttcatgaatgttaggacttgttttgtcctctgttgtatctgtgggatctaaaaggatgcctggcacatagttggtgctaagtacatatttgttgaataaatgagtgagtgaatacatgtgtttttggaaaaaaaaaaaaaacaccaaaaccacaaggtataaataattaaaaacaagtataaacaattatttctgaaattttccatggtatttgatttttattcttaacttggtaggtaacaaaagattgaggaaaagttaaaattaatgggtagaattttcttaaattctgtttctttttttctggaaactcgtataatttgacagaaacatacacttgggtgttgttgaacaggtaagaatgcttttgttagtttacaaagtcttcactgggtggttggcatttgctcccttgtattcttttgtttagtcactaagttgtgtctgacttttgcgatcccagggatgtgaatttttactcctgttttttcctatcaggtctgatactgaagctctcattccccttggtgtgctaattctctgcatccgacttcccacaggctggaggaagccatccagaggccctttcctgttaaacactgttgaattgtgggctcataaccattgaatgtagtgagagacttaaagacagatgctttacagctcaaagaattgcagctggagttgctattttgccacagaggagcttgacaaaatttttccttgtgttctgcaagtgtctattctatactgttagataaatagagtaggataggattatggagaaccttgagagtctggattttttctctgggagttttggagtcaaggaatgatacagtacaagctgactgtctcatataatgtcacttgtacatgttttctttccacctaggtgccaggcacctccagagcaggggatccttgtccctttctcatgtttccttgttttctccacttgttcctgagtccagacttgctctgctcgccgcatgacaggccagtaaatcggagacagaagtgttgaggcaaagaataactgcatttgaaaaggcagctgaccgagacaatggcagacttgagtctcaaaataaccatcttattggggtctggataccagattgttttataggcgtggggaggaaggtgaggaagtaaagtaaaaaggctattaatcttgcaaatatctcctggaatggccagtgtcagggaggagactgttaatttctcccttcctgtagccatccacaggtggagagggtcctgaagaaaggcattttggtttaagattcaggcagaggtgcagggttccttgaggcaggccattatgtatggatcgcaacagcagtggggagcaaaggttaaaaggaacagatccaacatggggtcagattttgttcttcgctgtaacacctgttcatttaatgcttgctgaaagagtggtgcgcttcttaaattctatttctgcaggttttattcaggatcactgtgcctgtccctcaacgtagtctcatctgtttgggtaaatgacttttgtgccagtgataccagagtcctacagccatgttcttgcagaatttgagtctctggatccattactttcagccctgagactggactccactcgtctaaaggtgattttcttgatccatatatcagttttattttcatattcatattttggtttgttctctgttacatgtgtgacccccccgccaccccaaacattttttatgttttatagactcctgggtattcttacctgtgctgtaatactttgcatagaagtagtattttcttagcgctttcttgatttatttttcaagcagttgattgactccttctttcccatccttaaagatcatgatattgattactgaatccaccccctcccccaaatcttactgcgttccctcagaaagtaatgtatttgattgaaaataatgtagtttaaatgagtatacctcattgccttttgaacaataagaaccattgcagttctatgaagttcatttcaaaacaacgaatttgacgtaccccctctgtttaagggaacagagctaaaaattagcattacaaaattagccaaaaattagttctgtgggaaggactatgtgcttctctcaaactcttgagttcatttgataaactcaggaatgacatggtaaagaacagtctcataaccaattcctcaccccagagcacccttctagcctctgagcaaaggaacaggaagtaataggcaaagtaatatgagcaacaattatgagggttgatagctgacatttttttagctgcaagttacagaaaatcttctcagtaatggctcaagcaataaaggtgtttataacctggtttgaggtcattgtttctgggtttagtgtggtggccactgatattccttaggacccaggctctccatctttcctgttctgctagcttctgtatattgaccgttggtcacatttgcaagataagcaggctggcttcaagtcttgaatatctccagtagcagctcaagtgagatggagctgcctgagacaaaggcttttttccccttcagattttaccgtttatctgagagggcagagttttccaggatgcccccacagggtttagtctcattagctagacttgagtcccagggctccccctagctgcagaagaaactgggtaagtgaagatttggattttccagcttctatggtagaaagaaacaagattgaagaggattgggaatatgtttgtttgccagtcagtaatttttaccaagtgtactaggcacagcatgcccactgctgcttgtggataaggagcggaaggtgtggggggacgtaatagtacagcgacttgtatttgcgtcatctacagtctcacttgatctcagagctgtgggttttctgtgctcatcatacagactagaaaggatttacctgaacagatggttaaagtggttgctttatcccttgggtacttgatcttccatcattgtggtcagcactggaatgacctagctgaattgcccagaagatgaactagccagtaactggcttctgccaagggggaaattactcatttatacagttgagcctattcagctattttgagattcagttaaaaagttaaaaccgaaatgtcctttcttctgtgtctttcactattctacaataagagcttgagtcctgttggatggtatctaactgggcagtgggtaggctggtgaggaggagcctgacacagattctgagtatctttatttccagtagtgtgatttgctaagtgactgagagtctctcacttgtccgtttccatgtttctagtgcacgagcatagccgtgtcgcgaaaatggttggctttgggcagttcaggaggaggactcaacctcattcagaaagaaggctggaagcacaggctttttctttctcacagggtaagattaagggttgccctgtcatgtaccatctggagtatctgtcataaatgtgagttctccattgtaaatatcatttggaataaaagaagaaggtaaaacttgagattgagtagtaaattacccatttttgaggagctgcctaatactttcccttctgtgctctaggaaggtgcaatttctcagatcgcctgctgtttacatgatgacgattatgttgccgtggctaccaggtgagacactgttctgaaactatctgatctttcccagatgcatctgaaattgaaaaatgtggttgtgtgtttattagggtgaccaaccatcctggtgtgcctgggcctcaccctgttttagcactgaaagtcctgtgacctgggaaaccatttagacccaagcaaaccaagatgggcaattggcagttgataggatttgtggaaaacactaatataaggcaacatttctgagacctcaaagtagaaaggtaacataatttagaacctcagagttctctatttgtatttgattggtggactaaagcaaggagattaatatcgtggctttctacttcctcttttctgaagaataagaatatgcttatgtatttaatatagttgatactgtgatgcagtgaaattgtacctttttcactactgccaaaaatttgcttctgtgtctccattctttcagtcaaggtcttgtagttgtttgggaattaaatcaagagcgtcgtgggaaaccagaacgaatttatgtgtcttcagaacacaaaggccgaaaagttacagctctctgttgggatacagctattcttagagtatttgtaggtgatcatttgggaaaagtttctgccatcaaactcaacacttctaagcaagcaaaggtgagaaacagttcagtgctttgtataagtgggtgaatatataaggtattgtctcacagaatttctgttaaagaacacagtttgatctgtgtgtctttcagggttatctagagcccagactattaattttgagaaaacttgtttgcatgtaatatgtatggtaccctagtttatcttggtcgtgttgcagaatggctgtgagctaactttcataatttgcatgttgtctatcacattactccataattcacctggatggcccacttaaacaaagcgttctttaatagttggctgtcaagaaagaacagatgcctgtttattagttatgtgaataaaatggcagacatggaggaatggtaccagttgcccaggctcctagtctcctggtccccattttgaagaaattcttgagtgcaggtatactttctttcagaatagaggtaacttgtgaatggaatcttaaaggcactccctggattgggcttagcaatttgggtcctgaggcttcgtggaatgctctagtttgccgttaagacagcggacctgcttttcactgtcctccttttccaaagctgttacatcagaagtggggaacttgtctctcattggcttatttccttggaggatcgtggcagattagaagagatctaaataccattgcctaattattcttttagttaacacatcagagtattcttgatgtgttaatgaaatattcacaatgacccatcacagttaccgcttgattcataacgtatttttcattgaaatacatttgggattcttagccctagtttgtctctttttccaagtggagaagtactgtctactggtgaacagttctctcacatattccaaaacttattttgtctttttcattccaacttctaagaatagataatcataaacagagccttaagaattctctgcagttacgtagatccattcgttgaatggatgaaactgatagtctaacaggcaaattacttttggcctgtttaaaatttttgttttgctctctaagctgttttcgtttaaaaggtaaagagaggaggatcatgtgtatacagaaagataaattttattttctcatcacatcccctttaggcagccgctgcctttgtgatgtttcctgttcagacaatcacgacagttgattcctgtgtcgtccagttagattatttggatggaagactccttgtatcttcgcttactcgatccttcttgtgtgacactgagaggtacatttactaaccatgagtcattgggaatacagaatttcagagctggaagggacttagaagtcatctcgcccaatttcttcaattcagttatacaaatattaataaggaaccagctctgtgcaagttgatgttagagagcagagaggatattgaggagagtgaccgtagtccagtgggtgactaaggcacaaactcagttctaccaagaagcctggtctgagtgccatgaaggaaggctaaacaaaggcctgttcctgtatggggaatcagggcgtcttctttgattgagtttgttgttgttgaaattggctatgtagtttttttctttttttcttttgctggaaaagcaagagacttttcgggaaaggttcccaggtggagagcaaggataatggaacccaggagagctgctctcccacatggctcagagtctcagattttatggtgatgtggaattttgctgtgtatttaatagaattttactaaaaggtagaactgggtgaagactaagtaagaactttgtgaagctgacaaatatttactgaaatctcaaagatcaagccaagtgggcttccctggtggctcagaggttaaagcgtctgcctgcgatgcgggagacctgggttcgatccctgggtcgggaagatcccctggagaaggaaatggtaacctactccagtattcttgcctggagaatcccatggacagaggagcctggtgggctacagtccacggggttgcaacgagtcggatacgactgagcgaattcactttcacaagggtcaagccaaagggccggtgaatggcaaaggagtgtattggtagtggctgtgaaataccagaacaggaaatggcttgaaatgaataaatcttgtgtatcactgtgcttaagttcctcagccattctcactgcatagaaatattcactgccccccaccccgccttttcccttctagtagccttggccagctaccatattcctctgaacccatcccctcttttagaaatttattatgaagaattttgagcacacacaaaagaagagagaattgcttaataaacccctgtgagtctgctagccagcttcagtgatttgatgaggaggtttagtaggtgaagtttgaaggcagaaaggtaggaggggagaggctgttctagtaggaaggtgcagcctcttggggagcagcaagaaagaattaagcatattccaagatgtgtcctggcttgagatggaagttgctggggatcccgttggtaagtttgcaccatactgagagtgacagctgtaaatgtcactctaactaagtacatgggccctcagatcattttaaggaagtgtacatgtgaaaaatcagggtttgaagttggtcctcttagaactatccaggattggaagctttttatgtctttctaggggttcttctatctcgtgagaaggtgagaagaggttgcactttgttttcttgggatgagaaagacttgtggaaaggagaccagtaataggaggtggcaggtgtctggcatcagaacctaggtatacagctgtggagcaagactttgagacacaaagcatctgtatacctggaactagtaggaaggggaatgtacttggttctgacttatttcagtctgtggatcagtgatgaagttagacttacagaactggacatcatccaatgtcacccgttcacttttagcctagacctagtgagtaattgagcttgcctgacatcatgcagctggaggaggcagactagaatctttctgtcttgattttgtgccttttctgtacctcagtcacttctagtatatcctttgacattggaccttttggccattaaatctacccttgagattttgataaaatattagttaatctcacaaatttcgtaactattcttcatttgtggtttttgctatttactacacagtccagttcagaaatctgactgacattctgacaagtggtcagaccactggactgaattaacatcttactggggttgttttgagaatcttgtgaaatggtataaagaactaaataaataaagggaggtttatttttatctctgtgcaaatgagaaatgcttggttggatgaagcacaaggtggaatcaagattgccgggagaaatatcagtaacctcagatatgcagatgacaccacccttatggcagaaagtgaaggggaactaaaaagcctcttgatgaaagtgaaagaggagagtgaaaaagttggcttaaagctcaacattcagaaaatgaagatcatggcatctggccccatgacttcttgggaaatagatggggaaacagtggaaacagtgtcagactttatttttttgggctccaaaatcactgcagatggtgactgcagccatgaaattaaaagacacttacttcttggaagaaaagctgtgaccaacttagatagcatattcaaaagcggagacattactttgccgactaaggtctgtctagtcaaggctatggtttttccagtggtcgtgtatggatgtgagagttggactgtgaagaaagctgagtgccaaagaattgatgcttttgaactgtggtgttggagaagactcttgtgagtcccttggactgcaaggagaccaaagcagtcaaacctcaaggaaatcagtcctgggtattctttggaaggaatgatgctgaagctgaaactccagtactttggccacctcatgtgaagagttgacttattggaaaagactctgatgctgggagggatggggggaaggaggagaagggaacgacagaggatgagatggctggatggcatcaccaactcaatggacatgagtttgagtgaactccgggagttgttgatggacagggagacctggcgtgctgcgattcatggggtcgcaaagagtcggacatgactgagcaactgaaccgaatatagttgctaattcccatttcacaggattgtgactagagttggttataaggatagccaactgcaaaaataacatgttttagaaatgccttcttcattagctagaattcagtttgggggatcatggatagtacaataattaaaattttttatttatgttaaagttttgtttgtttcaagttatattcctttccaaacaaacacgtttttttgttcaaaccaaggctcccgataactgacccaagtgagatacgaggttgcttttcctacagctttctgtcagtgttgttaatgagctttactagaagaattatgtatgtgaaagtgctttgaagtgcatacagggcaatacaggaagttatggtttcattacttacgttccttatttgggaaataaaatacatttctggcttattttagttaatccttaaaactattcttctagtaaagctgatgttttgttttattcatgaagcaagttgagtgcagggtgcgtgtgcgggtgctaagtcactttagttgtgtctgactctttgcgaccctatggactgtagcctgccaggctcctccatccatggggattctgtatacaagaatactggcgagggttgccatgccctcctccagggatcttccctacctagggatcaaaatccctacccagggatggaaccagagtctcttgtgtctcctacatgggtaggtgggttctttgctactagcacctaccgttcaagtagacaccactgccacatgtaatgcggtgaatgctttgaaaacatggcgtgggaagcctgaaattctgcttgtaggagtcagagaagactgtcagaggaggaaggatgcagttagctcatgaaaaataaaggagtgtttgggaagaggcatactcattgtcaccctccatgttctcaggcagttttgtatgtgcagttcttttatatatctagttcgtgtaatcctaagggaacggaatgttccaaggtacaggctttcagaaggagttagcgttttgaggaaagagtgaggcgtttattgggtatttgtgacagacgagtggcctggaggcaggattggagagtatcagtggcctccacggggtaggtgaaaaacaagatgagccatcagtaggatttaaggatgtaggaaatggtttggtagcactcatcttttagttttgaaaaagagccttcacattaactctgactgtggctaataaactgagtactaacctggagtgttttgcttcctataacagaaatagttaatggcaaatgagagttgtagccctgttttgatctttccattctgttgttcattccagtaaattgctaacatgaagaaagggaggaccctatgggtggggttcttatggccatgtggatttgcagtgccagtgcttttgacgtttctgtcagtaaacatgatttttctttttttgtggggggtatcagagaaaaattttggaaaattggaaacaaggaaagagatggagaatatggagcttgtttcttcccgggaaggtgttctgcaggccagcagcccctaatatactgtgctcgccccggctccaggatgtgggaggtgaactttgatggagaagttttaagcacacatcagtttaagaaactcctctcctcgccacctcttcctgtgattaatctaaggtaatgacttatatgttcagcaggaagtatttgaggaacttacatggggtgggggttgggttgaaatctctgacgttctatatgcatcaaagattttatcataccttttaagagtgaagtagaatttttaataaaagattcagagaaacctaaaactctttaatcagttattttttacacggttaaagcaaattgaacaagagcaaatgcagtgaactggctcttgaatttgttttgtaggcagaaattttcctgtgtatcgaaaaaggtacttttatattgtgattaaatcatgaatcgtgtttacttcctagatcagaacctcagtatgatcatacgattggatcctcccagtctttgtctttccgcaaactcttacatgttaggtaagtttctctctttgatccttaaaaaacaaacaaacaaaacaaaaacttattctgtttcttgttcagaggcagttagctttttaagtttgtttttgtactaaatcatttttagaaaatcaggaaatgactgtgtaaagtgctatatataagaggaatggtaaaaaagcatagaaatacacttccctttctggtttgaactgccctaaaccacttgaacactttatagttgttgggtacatctgacaattagagctcagagctataggtacacattctttcataacctcccctccctggtgggatacaacaatgaaagcaagcctcagactgaaatctgctgcatatgtatatttcttagcaagtgcagaagtagttgtagaatttgttcttgtaaatgtgaaatttcagctccctgttctttaggtgctttgcatgaaaaatctgctcaagttggatccagccagccatattctaatgtcagagtttagctagctttctatttgggttaggtacaaaaaagtctactattaagtggtagcacagagtgccacttagagctgttagctgctgggcttgccagttcttaacagcttgttctacaagcatgggagtgagtgcccactgtatggtttccagtcagtctgtatgtcttgaacttctcttatttcagcaataggatattatttctaatatcccttaagctaattaacaagatcgttaatacagattcaggaaacattctgtagagctcttattgggtagtctggagtttggctcctgattgagttttttcaaagacaaactaacctctttttgaatgtaattaaaaaaacaaaaaacaaaacacttgaaatgtcaactaactgcccctaactaaagtatgtatatgttgcactatctccactgaaatatttggaagtcaattgtaaagagtgtaactctttgataaatccataattcaccctgaaagttactggagaaagctatttatttgcccatagatgaagcatattaaaaactctttctttatggcacttatcacagtttataattacacattcaaacctatgtatgcctatcttattcctagacggtaaggtccatgagggcttggtgtctgttttattcactgtgtttttttaagtgtttggcataatgcctggcccatcatagacacttaagcatttgttgactgtgtgtgatgtgttgggtgtaggcaagtcccttaccccagagtatgttttttaatgtaaggccacagtctgcttggttctcctggtagtgttagttttttgagttaagctgtttaaagctcccgttagagtcctgcctagttaacaaactcctgggtgatctggctctgcctactcctcagcttaagtaataattagtgccactctgaagcctttcctggctcctccagtggcttccgtcagacgcttgcccccttgctctgctgtcgcttttgttcgttcctccatcaccatcctgtctcactgtactgtgcatatccgtcccagcaccgcaccgttagctcctttactgctggcacagtgcttggcacatagaaagttctcaaataatgactaagtaaaaaaaatcagtaagagggcttgttgttactttttctccccatttgtgtcatgataactttcactgttatacccacgaatcccacaaggaagtcccacaaggaagcaaatttgtacacttaatttccttttcagtacactggtatcacattcctgtttttaacttaaaaaaaaaattgtatttatttacttggctgtgctgggtctcagttgtggcacgcaggatctttgatctgcattgcaggctcttttgttgcatcctgtgaacccttagttgtgcacgtgctgggtctcagttgtggcacgcaggatctttgatctgcattgcaggctcttttgttgcatcatgtgaacccttggttgtacacgtgctgggtctcagttgtggcatgcaggatctttgatctgcattgcaggctcttttgttgcatcctgtgaacccttagttgtacacgtgctgggtctcagttgtggcatgcaggatctttgatctgcattgcaggctcttttgttgcaccatgtgaactcttagttgtgcatgtgggatctagctccctgaccagggattgaacatggggcattggaagcatggagtctaagccacaggaccaccagggaaatccctcccttctttaactttttaaacaatgttgttaggcttgtgtcgctttctgtttattataaggggatgaaggctgtataaatgacaaagtctcagctcttatgtaagtccccctcccctgccccagcccataactatttctacggaatttttccaacctgagtatgaagttcagtatcaaaaccgtgatcctgtatctctgtattcaaggatcttctggtctgatttttttcccctctggctcctaaaggcaaccttccaattttagttttaactatggttctgatgatttctttcttctttgtgataaaggttacttttctgtagggacagtgatctgatcttacattggcaaagtgtttaatatttgtgtgatgacccagttcctattaaatatcactcttggttttgtaaacacctggtacctaccatttgtagtacacttggaggcataaactaaataaaagtccatgttctcaagatcataatttttggagagatatagtttatttctagaaagtgtttaacagcaatgaaaactaagagttgtgagcaatggctgagggctgtcacagaggatttcaaaggggagtaaagctgctgctaatccttgagaggtggttaggatgagaatgttatatatggagattgctttgaccaggaacaagaagtagggattaccaacggtgtataaaaaagcaatagcagcctggagagggtaaatgagatacatgagcaaaggagtatagaaggaaatgagccaagatggagagcgccagaggactggaaagggaggtggatgaagaagcagtgtccagagtctaggaagtaagattcaggaaggaagggacagtatggagggttggcccctgctgggggctcaagaaggaaaatgaagaaggaggttattgggtttggtagctagaaaatctgtgacctttcaagactataggtaagtggaatgttcagaattccagataacagtgggtggatcattgaggatcagtgagggtagcagtagattctatgaggtgtggagaaaaaagtccaggttttggacccagactccttgggataaatttggactcttgtatagtcatgctgaatggccttcgacatattatttatctctctgggcttcagtttttctttcttacaaaataggaataatgcttctatcttaatgagttgctgcaaggttagataataataggtatagcctttaataaaaacaaaaaaaaaacctcccagagttgactgggaattttcaaccttttattgcccacataaaactaaggacatcaaattatttccctccctaaaagtagctcaccagagcagtgaggaatggtaaaatgttatgtttagtctttgttttaaatgggccctgtcataccagatatgagaggtttagctattttaacaaacatcaggtaagacaccagcgttttatttttgtagaatgtatttagtgtatctgaatttttcccgttttggcatcatgttatgatatctttcagtgggcttttgtcacagacaaaagaggtgctaggacatgattagctgaatttactgttgggttttctctgtataggcagatcttgctttaatagctaatgtgagggtctgaattcagggaattataaacttctgagtccgagcaaactagaattctcttgacctcttccatgttttcttgcagtgagcattgtgtgttgacttggacagaaagaggaatttatattttcattcctcagaatgttcaagttcttctttggagtgaagtcaaaggtaattaggttttttttttccttatataatttttaattgcatggttgtgaaagatttaattattgtaggaggattctcttgcagtgtaagaagtagaaagtagaaagaggtgacattcttttaaagattaacatcataggtgtattccattgtaaggtacttcccaagtatacatttgtgaatttatagttagttattttaaataaaattttcatttattcttaagtattagcaaccactgctaaagattgaatgagttaattttccccttctacttacccttagtctttatctctgttagaaaacttgctttaactcttgttttgtggcttaataatttggggttgacatattggggaagccctgagttaataaacactcttcgtgtgcaaaaaacagggcggagggcaggggaggggggaatttgaaaagtccttgtgggaacaatagctattttatgtggctgaggcaaagactatccgtcgctgtattcttgtttaagccagaaatggaggaaataaatctaagatttttagtatgattgcccagagattgtatcttgacttacgagtcattttgtactttgtaaaaacataaaaaagataaatgaaccattatctcatgatctgatcaacattgatttcttgtgaattaagtttcctgagggtctcctgtgaaaactagtgttttagattctttcatgatgttctgccaagacaggtatttttttaggaacagtttgttgattaacatatgtgttaaagtctgtttattgacatcaaatttattactctcagaaatgtgatagtctggtctcaaaagtaccctcttttaaagtgcccttcttttcacaaaaaaatagcattttaaaatatagtgttttaggtcagacaggtattcctcttattcttgatctttttagaatagtgtctaaaatatgattttctctttgaaatgaaaatataaaaatagaggtgaaattcgatcaaaccaaactgtataaaatgaatttattaaagtaattttgtccagtcacaaaaatggaaaagaaatatttggttagcgtcctgcatgttcacccctgtggtttttgtagatattcacgatgtggctgtttgcaagaatgagctgttctgtttacacctgaatgggaaggtctcacatctctccctgttgtctgtggagcgctgtgtggagcgtctgataaggagaggcctgtggaacctggctgctcgaacttgctgtcttttccaaaattctgtcattgccagcagagtgagtcagtcagcttacatgttcatctgggttgttaagatcagtctggcttgcgggattatgctatacagttgcttatacttattagtctgcagggggcttcacaggtggctgaggagtaaataatccgtctgccaatgcaggagacgtgagtttgacccctgggttgggaagagcccctggaggagggcatggcaacccactccagtattcttgcctggaaaatcccatggacagaggagcctgctgggctacggtccatagggttgtaaagagccggagacaactgagcaactgtgaacagcacattagcttgcagattaagcagtaataaatccccaaaggaagcatgacctgtaagtctggagtggggagtgggggcaagaaaaaccgtacgtgtgtgtgttagtcacttagtcctgtcctactctttgtgaccctatggactgtagctctccaggctcctctgtccatgtaattctccaggaaaggatactggagtgggtagtcattcccttctctaggggatcttcccgatccagggatcaaacctgggtcttctatattacaggcagattcttcactatctgtgccaccaggaaagcccccaaataaaatttacccacaaatttattttagtttcaggccttgttttaagtgaaattattatgtgtacagtaactcttaattaaatgcttaattcctaagaaaattctcattaagtcttttactagcttttaaagcccctttaaagcacctttgaggttttatgttctatgttagacttctgtcaatgtattagcactttgaatatggaattagttacaaatggaaagctctcctattgggtttctacttgtttttattagggaagaaaaactttaactgtagataaattggaacacttgaaatctcagctggacttaacaacctatggtgatctagtttcccaactggaagagttgatcttaaaattggaacctttggattcagcctgtagcagtagaaggagctccatttcatcacatgtaggtattcgcacttttcaaagggttttgctctacagtgagatgttctccatgaggttgtcctcacttacttccaggatcccaaaacttagcttctttccagtgtttatactggaggggaggtggcgggtgtcaagagggggctttctttcagctcttggacagctctctgaagcacttctttgtgtgtgtcttagaactgtgttttgttttgtcattgtttattatatcttgtttgaaaatgtacattacgtagcctctggtacaagttaaattgcccctaatatgtggtttcagatgcttcatgttagcttgagtcttagggcagctcaggattgtctcgtttaatcctcattctccctgccaggcttggtggagactggctggagaaatctggtcgtgtgatgctgcaggcatgtcagagggaccggctgccaggcatcgagaccttgcttaccgttttgttctaataaaccataattgtcattaatgacttactgcttttattgttgattttttccttaaaagagctatatcgtgttataaacattttaatttttctttaattctttttctttttaggaaagtttcagcatcttggactctggtatttatcgtatcattaatagtagaagaggcagtcagtcagatgaagactcttgttcccttcacagccaaacactctcagaagatgagagacttaaagagttcgcctcacatcaagaagaggaccagccagatcattgctgtggctcccagggaagtgaaggtgaggaaaggaaagtgtttttattgattgctgatgtgaagcagttattttctgtggcttctttatttttcctttacgaggtattaataatttttattaagttgatagagtttccatccagactgattgatctcttcaccattagaggaatgggtttatgtttagttggaatttttccctctcatgtttaagctaaatttggtaaagttcctaatattgatcttgtattaaagagcgggaaaggttaagagaggaagtcattaaccaaaagagtggaacaattttatcctgactaaccgaattatttttcattaggaatgaaaaattactacagttttgggggtcattgccttcacttttcgatgttcaagtattcctgtggccgaactcttgagaagagattaatagagactctaaacttcctttatgactatggggattcagggttagtaggaaaaactaaggtacctgtctgagtgttttatatgtggaccatcttgagcatcttgtaaacctgtgttccactcatttgtatttgggtcagttgtgattttggtattgaatcttttatttcttttggtttattcatttcagaatttctttaaagagtaaaaaactcttcgtgtgattagattttgtttcttttccctgattccattcatccagatcacgtttctcacgcatccgtggcgtttgagacggataaaagtgaaacttttctccccttcggcattccattatcatttcgttctccatctcctcttgtgtctcttcaggccgtcaaggagaggtaagctcattagtcttgtcatttaatcccatttctggttttacttctgttgtcatgttaggcatgtctgtgctgagaatagaaagacattttaaatgacttaaaaggaagtcactaggttatccctcatatagcctgttatgtgaagttgttaacttctcatttcaattttggggaatgtaactaccctcaagattgtttgagtagctggatatttgaattgttacaaatgtgcttcccacctcccccttctcccccagactgggcaaaagtttaaaaatcttttttccccctcatccttgataggaaaagtttccacatagcattagtcgtttcttaatcatttctcagtttgggctcagagttggagactcctcagaaatctttctaactactctgtgggcctgggattgaccatgaaagagaagactttgtgccagggctgctaaactgagttctactggatacatatttgctttccaagaaggataaatgtgacagattagcagtttcatggagaaattctatggcttaggatgatcacatgcagaaacattgcaggcgcagctggaattaaagaccttttctttagggctgaatcaaagtaggttagtaaatgatgtgcatcctttttatattataaaacttatgtgagccttatgtgaaatatgtagtttggttagggaagttgcaataaacagagtcttgttagtaagtcccggttccgttcagagactaacaggaacgtagagaactcgtgtactgaaatttttattcttggcagtaatgagacctttttcatgttagtttattggtatttgacctccagtgtttccagctttgtgcgtaaaactactgagaagattggcacccttcatacaagccctgatctgaaagtgagacaagaacctaggggtgatgagcagtcctgtgaagaggatgtgggtccagtcacttgcccaaaggaggaagacactgagtaagttgttgctgagaagtctgtgtaaattctagaggacatagttgtcagtttgaagagagccataaactacattttttttaaagaaggcacacaataactctcttcattgtagattgtgtagcttataaaaattgtaaatactgcaaagtaagtattggaaaattacatcaaccaatagcaagtctgttgagacaaatttttttttgtggccgtgctgtgcagcatgcaggatcgtaagttccttgatcagatatcaaacccatgtcccctgcagtggaagcaaagtcctaagagtcctaaccactggactgctaggaaagaattcctgagacagaattttaattgagcgcctcttctatctttcccctgaacaacttcccccacctccagatctcttcagatgtctagggtgttaacaaaggtgtattagaataggatgaccagggatcgaggccttgttctgattctgcttctgactagcacagtgatgttggtgagtaatgctctctggccataagacaagagctttggcattgatgatgttgtgtatcttccaatgatatgctggtggcttagtccttgtgttatggagttgcagcagagctcttggactggcacagtgtatcttatcttttctctgccttttctcatagttcaggtgatctgggcattggaagtacacaagctcagcatcaccaggaactgagatagacccatggagccagtgtgtattggacagacagatgagattaaagggtgttacctttagagtggcttagttatgaaaccatatatataaatgtcagaaaaaagtagatagtgctgtggcatttgtatttaaggcagccctcagtctgacctgagccgacctttccagcctcatttctagccatatccttctaagcacttggaattctagtcccgtcagaggactgggtgtggatacctcactgcttttcttcacgccgtttctcccacctgcagtattttctccccttgtttcctaaggcaaatactacctccttggggatcttgattgcctgtgtgctgtgctaagttgctcagttgggtctgactctttgtgactccatgggctatagcctgccaggatcctccatccatgggattctccaggcaagaatactggagtgggttgcatgcccttctccaggggatcctcctgacccagggattgaacccgtgtctcttacatcttctgcaggggcaggcgggttctttaccattcgccctgcctggaaagccctcttgattgcctagtcagagtaattattcctttttctgtgcccagagtacagtgcttattctgctctttagcatttattttgttctctttggtaatagagttattttttcatgcctttctttctgacttgagcttactcatcttaaagccatggaccatttttttttatacttgtatgtttgcttcatgtaacattaagtacaataggtaccatttagtgagcacttagaagtatttacccaaggaagttctaatcccctgtaacttttttcatacttttctagagaaaaagaagaaataattagttgccctccagaagaggacaagttccaagagctcacaatggcaacagcagaagcaatgtgagtatttgtgaatgaagttttatagtaagtaagaatgactttttgagatcataagtagtggttctgggacagtatggggcagaggtagcttcacttggcattggaattcaagaagtagtctaagttaatgttctctgtgttgtgtttatactaagatcatttttatttaaagagttgaaaaaaaatagtgaaaagtaacatttattcagataagtaatgttgtctgtgttaggcttatttaacatgaaacaatttgtttttgaaaaaccacataaaatgtaagtttcatacttgtctgtcttgtataggaccaagctacaggacccactggttttatttgaaccgaagtccctgagaatggttttacgagagtggctttcacagttagaaaagacatttgccatgaaggacttttcaggcatttcagatactggcagctcatccacggaatcaaaccaggatatgctattgcttgatgagtcaaaaaagggaatattagatgaagaatatgaaaaagaagaaagggactctttaggcaatgaagaaactgttgatcaaatagcatgtgaatctgtaaatagtctgagggagcccttggatgatgacattttccagatatgttctccttggagtatagcagacagtcttcagaaggatctggctgaattgacaacattgtgtttggaactgagtgtattcaattctgagatcgaaggtgccagtgggcgtggggaccaccctctgcaggagtgctctcttgaaatgctgacttgtcagttcctaaagaagtacttttttcttctggatttgaaaagagcaaaggagagcatcaagctgagttaccctaaaagtccttgtgtttgggatacttttattgaaggattgaaaggtaatagattgccttactaaagataaaaatttgtatagaggtccataacatgttgacatgcttaagtttaaagaaaaatatataagtagaaatcatctctgttctggtcaaccatccatttagttttctactcaatttaattttgttttctgttgagactgttcccttttttaagaaattgatctacaactcaatttagttttaaatagtttttgcagctattataagaaattggttttatttttctcacagtcattgggaaaatgagatagcagtgttggagaagttggatttaagcaaaatttcataaatgttgatatgtgaaaaccagaaaatccctaacataacttactgatagagagatcgtatgtcctgtttattaagtacttacatgttgctagttattaacgctaaacccttttctggcatcatttcatttcttccttccgacacttggagtggatggtggcattctctttagtaggtgaggaaagtcaggcacagagagatcatagtagctgagtaggctcaagtgctgtgatactacatagtaatgcagatagaatagtttatttcttgctaatatatccacccaggacagacgttccaaaagatggattggggataccagttctagaaaaaaaattaaagaatttggcattaatggtacatatgtactaggtatatatactatatagcttatatatgtaatatggataacacatgtaaaaaggctttttcaatagtaatagtcacttacatattggttatctgttcctttgtcttattgactatgctttgtctcccagtttgattttaaggttcttaaaagcagagattgtctctcttgtgttttttgtctctcctgtgatgctttacaaatgttttgggacttgcacacagtaggtagaggactagtgattgttgattaatgtgttcgtgaattaagttttttcagctgctatgagatgaagggaaaagggtgtgctttgtcttttagaaatggtgagttccagtcctacacatataaagatggaagaaggagaccttccaacaagattaaagttattggaggacttggttccttttgacagtcctttgttgattgtgtatgctgcccggtgagtggtcctgtatattgttcatgtgcattaaagcccaggcattttcttggtcttagtctctaaagttttcctctatcacatgttgagcagcttcctgttagtatatttattttcatttctaataaatatgtagataatgtaaccaggttatgttatcttactgaagttggagactaacgtgttttgtttttaaatgcagattgtacgagaaatttggagaatcagcccttcgatccttaatcaggttttacccatccattttgccttcagatgtcatgcaactttgtcatcataatcctgttcagtttttggcctatttagacagtctggtgaaatcaaggcccgaagatcaacggtgagaaggaaagaatatttgcagactctctctctttttttataaagactttcctttcctttgtggctcagctggtaaagaatccacctgcaatgtgggggatgtgggtttgatccctgggttgggaagatcccctggagaagggaacagctacccactccagcattctggcctggagaattccatggactgtatagtccatgggttcgcagagtcggacaggactgagtgactttgagtttctcttgatagagcattgtttctttcatataatcagttgaagcctgtttactgttgactgccacagaattgaggtacctgctgtagaagaggaggattttggcagtcatgtaccactctttcacagatcacagtacgcatcacacgtgtgcccgtaaccacacttctctgtcctgcccctctccctctcagagagtctcagatcaacagtgtgaagttaaactcctgcttcagggcctaggctaagactgataagcttccttgttttctctgccagtgagtggattttctgccacctttttgtgatgatatcccagctttctgggggtggctctcagttccagctctctcagcctctttgggctgaggcctcttttcctatctctccgtggcagtaaacgcacatgtttactgtgtgttttgattattgagaatggcaacttcccctctccccttttctgattggttcacatttgatatactagtatttttttctttctttctttttttgctctttggtgttttcctttttatcttgaagctcagctgttcatttaaaaagctactagattttcaccagcacttctatccgttttgtagcagaaggtttttcaagttgtttcgtccactatattgatcccttaataacattcttgtcacatctgcacattttatctttcctttctcaacgtgaatattggtaatttttctctccactttctcttaggccatccttccttgagtcccttctacaaccagagtctttaaggttggattggctgctgttggctgtgtcccatgatgctcccccaagcaccagcactatggatgatgaaggaaaccccaggtataaaggagtcatttctaagcttggctgctcctttggaatggagctagtttattcacatagagcattcagggcttgctttaggaacagctgtggaagagagttacccaagtcatgttagtaatcagactgagtgtactgcctagtagttctgaacatttgttttgaatcacagaccctttgagaatctgaagattcctgtcagaaaaatacacattcatagagaattttgcacatgatttcagagaattaaacttggcctctgaaactcttccatggaccaacattaagaacttggtgattaaacttgtgttagagggaaaagtgtgtgtgtatttgtttgtgtgttttcttcctagaaatttgccaaggaatttctagacaatacgtaatctaggaattttttttcttttttaaattgtgaaagtaagataatacctttataggagacttggaaaatacagaacaaagttacatatagttccactgtatgttacaattattttttagttggagtttcaatatcaaactcggaataattaatagaatgaatagaaaagtcagaaggatttagtagacctgaaaagcactatgaaccaattcaacatagttaagattcatacaattttcacacaaaagcagggtataaattctgttcagattctgaaagagtataaaccaggagacactggaacatatccagggacataaaacaaggtggaaaaatttcatggtctaaaggtattgaaatcatagagtctgttctcttaccactgtgaaattatgttagaaagcagtatcaaaagatatttgaaaataacccgtgtattttcaagtgcaatgttacatttatggagagagatttttgattcagccattggaaagccttaataaagttaaaagacagaaaagacatagatggtggttgcagaggagaagcatttaatgagaaattaatataaaaatgagaaattaatatcaaggatactttaaaagccccatatatttggaaattaagtgtccactttggaatgatgggtatagctaagaatctgtaacaaggaaaattaaaaaacatttgtaacagaacaaaaatgaaaagagaatttatcagaatttgttgcatgcagctgaagctgttcagtgcaaccaaatacaatatagaatcttgaataaggtatttaaaaaacccagaattcataaaaaaatacatattgatgcttgtaatatatcaaatatgttccttatgtttttttctaaagaaactttttaaaagttcccaaaatgcctgtcttacatgcctagaaaaaaggtctgaagatataaaatggctatctgtgaatgatagaatattgaattttcttttgatttttaaaatgtataattaaaaaaagtaaacaggtatttgtcataggaaagacagtgattttgatgttttgaaagtcaggtagaaatgtttgaaaaatataatgatggaaaaaatataattaaactctattcttacctattagctgacaaataagcatttttgtagagtttatttcctatctaatttactgatattttttcaattctcaggcctcattcccacttgttttcctggggttacagtcagctcatccttcatctgattaaacttcctgcagattttacaacaaaagagaaaatgactgacatctgtagatgtcatgggtaagtgagaactttcctagaagctgaagttaaggttagagtcgttttagttaataactttgtagttaagggactgaaggtatatgctttgtcttttttttttttttggctaaagtgctttttggttttaagtgctaataagcatctttttttgttttaaattgtgagcatattttattttgtgtgtacatgagactggtccttgcttgttcctctctccctcttctgcttagttggtcattccagttctcaggtatatttagttaagtaccaggctgtgtgatacaagttgtaattgatacagtttctgggaagggagagatcagaatgggctcagtagaacttctggtgaaggacttcaccagaggaggtaagacatggaggtaagccctaagaatggggagggtctgtatttaaaaatgagccaggtagagggcaggtcaggtgagacaaacagcaagatcaaggccatgaaaactgacatggctttttatctgcatcacgtattagtcagttatttatagcccaaaggtgttatctcatgttatctttggcatccccaggattacagtcttttggagagagggacattcatcttccttttccctgggtgcacagttcataaagtagtaggcacttgatgcatatttgttcattggtaatgaggggtgcttcccagaggttaaagcgtctgcctgcaatgcaggagacctgggtttgatccctgggtcgggaagatcccctggagaaggaaatggcaacccactccagtgttcttgcctggagaatcccatggacggaggagccttgggggctacagtccacggggttgcaaagagttggacacgacttcactttcactaatgaggggtgagactggtcaggtggtaggtcatgagatcatattagaccttgaaaggtggttaaaagaatttatgatcagtggagacccttttaaactttttggtacaaaaatggcatgacaaataaaggcttttggttcatacatgagaaagattggagacaagaaataaaggccagctaggaacctggtgcagtaattcaggtatgattgaattgattccagggcaacagaaggagcacggccggtgggacatgtcaaaggaacacacagtgggagctgtaggtactggtataggaagtgaggaaggggagagtgaaggagagctgccaaagtttgcatgtttgtggaagaaatatgctcgttttgtgttaaaccttaaagtttataaagtacatgagcttaaaaaagtctgatagttggggcttggccttgagtgcatgcttagttgctcagttgtgtctgactctttgtgaccctatggaccatggcccaccaggctcctctgtctatgggatttcccaggcaataatactggaatgggttgccattttctcccctgggggttcttcccaacccagggattaaacacaagtctcctgcattgcaggcagattctttagtgtctgagccaccagggaattagtatttatcactaactttaatttttgttttttcataagtgctctagtttctgagggaatgaaagtattctaaaaatattttatcacgctgtccaatatggtagtcactagtcacatgtggccattaagtccttgaaatacgtactggtcaactgaagaactggcttttaaattttatttaatttaaatgtaaatagggacttccctgtggcagtccagtggatgagactctatgcttccaaggtgcagggagcgtgggaactagttgggaaattaagatcccacatgcctcatggcacagccaaagataaatcaatgtaaatagccacacgtggctaatattactgtgttggacagcacaatgccatataaattcactgtcttttattcttctcaccaactttggtctctttaaagtttctggcctggatatcttattctctgtttggagctggagagaagaagagaggccttcaccaacattgtgtatctgaatgatatgagcctgatggaaggggacaatggtatgtaaattccaattggttactcttggttatagtattttagaagtcactacagactttccggtaaagaaatgtggtaaacatttcagtgatcatattctttattctagctacttgtcagattcgtggagtttttttgatccttgctatttggtatattgtgaaattgtaaccagaaataaactgcaggcaacttttctatttcatgagtgcctaatgtgtgaggcattctactagatgcttttccatctagtttaaatgaaataacaaacctgtgggatagttactattacttctattttacagaaagtgtaattgagactcagaaaaaggacagttagtttccccacagtcatacagctggttactgctggaactgatgttcaggccaggtccaaccatctctaaagctcatgctcaggtttttttctctgcatcatgttgcctttttacacagcccaaagttagagatcattaagatgaacttagagtagcagtcagattttcctaagcctttacaagtatttaggtacttttttttttaattttaattttcatcaattcagtacagataaaatgacaggaggccaggattttgacacattgaagtctgagagtttatcctacactcagagaggtggtcttggtctgatttgtagtgttgctttattcatctcaatgcagaggtacccacagcatgacatcaggatccttcatgtagcaacgtgacctactggctttttcgtttcagcgctgttggtatagaagaaggaaagttagaaccgagcaaagaaaccaggtgactggcaagggttagcttcagatgtcacaactatagcaataataactgaaaatatcacctaaaattcttcctacccagataaaagtactcttaatgtttagttaatataataataataatagctgttctcacccttggtatattaaatgaggatcttttcttgacatttctctctcctaactcattttatcactttaaagcttgttgatcttactgcccaatatatatctcataagtttttccaattaaaacttttttattgaggtaacattggtttatcacattttataagttttatgtgtacaatgcttttcacttttttgtagtttatggagtggccactgctaaagatttactttccatccgtcatcaggtttattccatttacccccgaccctgccctggctccaccccctccagtgcccactgctctggtctctgcagctgcatgtttggttttgtttggtttgttcatttatttgtttgtgtgtgtgtgtattccacctatgagtgaaatcctgtagtctttttatttcacttagcataatagcctcaaggtccacctatgttccgccaatggcaagattccttcttttttttaatggctgagaagtattccgtcgtctgtgtgtgaatcacgtcttctttatccattcatctattgaggggcacttaggttgattccacatcttggctattgtaaatagtgctgcagtgagcacaggggtgcatgtatcttttccagtttccatattctttggataaatattataagtgggattgctggatcagatggtagttctgttttcaggttttttgagagaccttcctgtttttgacagtggctgtgtcagtttacattcccaacagtatacagagttcctttttctctgcatccgtgccaatatttgctattcgtagacttcttgatgatagctattatgtatgaagtggtatcgcatatggttttgatttgcatttctctagtaatcagtgatgtgtaacatcttttcacatgcttttcacgtgtatgtcatctttggggaaatgtttatttagcacctgtggccaatttttcatctggttgtgtatttttgcttattaaccccttaccgttttaaatatcttctcccgtttggtagatcatcttttcattttaaggatggtttcttctgctgtgcagaagctttttagtttgatgtagtcctgtttgcttatttttgctagtttcccttgcctgaggagacctatctagaaagatattgctaagactgatgtcaaagagagctctgtctttgttttcttctagtttaatggttttgagtctatttaagtctttaatccatttggagttggttcttgtgtatggtgtgaggtagtggtctgctttttttgtgcctcatgcaaaaaaaagtccccaacagtgtccccagcaccatttatttaagacactaccctttctccgttcgatgtgccttgttcctttgttttgtgttaattgtccatacatgtatgggtttatttctggactctcagttttattccattgatctatgtatctgtttttctgccactaccatgcagttttaattactatggttttgtaatatagtttgaaatcaaggcgtgtgatatctccagctttgttcttttcattcaggattgttttggctatttggggtctttcatggttacgtataaatcttagaatattttgtcttatttctgtgaaaaaatgtttctgggatttcagtaaggattgcattgaatctatagcatgctttggaaatatggacattttaacagtattaattctttcagtccctgagcagacagtatctttccatttatttgtgcctccgtcagtttctttcaactttgtcttatacttttcagtgtacaggtttttcacctccttggttaagtcagttcagttcagttgctcagtcgtgtctgactctttgcatccccatgaatcgcggcacgccaggcctccctgtccatcactaactcccggagttcactcagactcacgtcagtcgagtcagtgatgccatccagccatctcatcctctgtcgtccccttctcctcctacccccaatccttcccagcatcagagtcttttccaatgagtcaactcttcacatgaggtggccaaagtactggagttttagctttagcatcattccttccaaagaaatcccagggctgatctccttcagaatggactggttggatctccttgcagtccaagggactctcaagagtcttcttcagcaccacagttcaaaagcatcaattctctggcgcttagccttcttcacagtccagctctcacatccatacatgaccacaggaaaaaccatagccttaactagacggaccttagtcggcaaagtaatgtctctgcttttgaatatactatctaggttggtcataacttttcttccaaggagtaagcgtcttttaatttcatggctgcagtcaccatctgcagtgattttggagccccccaaaataaagtctgacactgtttccactgtttccccatctatttcccaagaagtgatgggaccggatgccatgatcttcgttttctgaatgttgagctttaagccaactttttcactctccactttcactttcatcaagaggctttttagttcctcttcactttctgccataagggtggtgtcatctgcatatctgaggttattgctatttctcctgacagtcttgattccagcttgtgtttcttccagtccagcatttctcatgatgtactctgcatataagttaaataagcagggtgacaatacacagccttgacgtactccttttcctatttcgaaccagtctgttgttccatgtccagttctaactgctgcttcctgacctgcatacagatttctcaagaggcaggtcaggtggtctggtattcccatctctctcagaattctccacagtttattgtgatccacccagtcaaaggctttggcatagtcaataaagcagaaatagatgtttttctggaactcttttgctttttcgatgatccagtggatgttggcaatttgatctctggttcctctgccttttctaaaaccagcttgaacatcagggagttcacggttcacgtattgctgaagcctggcttggagaattttgagcattactttactagcatgtgagatgagtgcaattgtgtggtagtttgagcattctttggcattgcctttctttggaattggaatgaaaactgaccttttctggtcctgtggccactgctgagttttccaaatttgctggcatattgagtgcagcactttcacagcatcatctttcaggatttgaaacagctcaactggaattccatcacctccactagctttgttcgtagcgatgctttccgaggcccacttgacttcacattccaggatgtctgactgtgattagtgatcacatcatcatgattatctgggtcgtgaagatcttttttgtacagttcttctgtgtattcttgccacctcttcttaatatcttctgcttctgttaggtccagaccatttctgtcctttatcgagcccatctttgcatgaagtgttcccttggtatctctaattttcttgaagagatccctagtctttcccattctgttgttttcctctatttctttgcattgatcgctgaagaaggctttcttatctcttcttgctattctttggaacttcgcattcagatgcttatatctttccttttctcctttgcttttcgcttctcttcttttcacagctatttgtaaggcctccccagacagccattttgcttttttgcatttcttttctatggggatggtcttggtccctgtctcctgtacaatgtcacgaacctcattccatagttcatcaggcactctttgtctatcagatgtaggcccttaaatctattactcacttccactgtataatcataagggatttgatttaggtcatacctgaatggtctagcggttttccctactttcttcaagttgagtctgaatttggcaataaggagttcatgatctgagccacagtcagctcctggtcttgtttttgttgactgtatagagcttctccatctttcgctgcagagaatataatcaatctgattttggtgttgaccatctggtgatgtccatgtgtagagtcttctcttgtgttgttggaagagggtgtttgctatgaccagtgcattttcttggcaaaactctattagtctttgccctgcttcattctgcattccgaggccaaatttgcctgttactccaggtgtttcttgacttcctacttttgcattccagtcccctataatgaaaaggacatcttttttgggtgttagttctagaaggtcttgtaggtcttcataaaaccgttcaacttcagcttcttcagcattactggttggggcatagacttggataactgtgatattgaatggtttgccttggatacaaacagagatcactctgtcgtttttgagattgcatccaagtactgcattttggactctcttgttgaccatgatggctactccatttcttctgagggattcctgcctgcagtagtagatataatggtcatctgagttaaattcacccattccagtccattttagttcgctgattcctagcatgtcgatgttcactcttgccatctcttggttaagcctatttataaatattttattctttttgttttcattgtaaattgagttgttttcttaatttctttttctgctagctcattgttaatgtatagaaatgcaacaggttttttaaaaaaattttatttagctacttagtagtagctgtgctaggtcttcattgctgcatgggtttctctttgtgggtttctcttgttgtggagcacaggctctaagtgcccaggcttcagtagttggcagcatgtaggctcagtagttgcatctcccggactctggagcacagtaccggctcagtagttgtggtgcgtagacttagttgctctgtggcatgtgggatcttcctgacccaggaatcgaaccctcaactccttcattgacagatggattctttaccattgagccaccagggaagcccgtgcaacagattttttgaatgttgatttgtaccctgcaactttattcattttttatttctaatagttcttgtcttcacggttttctgtatataaaatcacgtcatccacaaatagtgagtttcacttcttcctttccaacttgcatgcctttgatttctttttcttgcctgattgctctaccagaagacttccagtactatgctgaataagaatggtaagagtgggcatccttatcttgttcctgattttagaggactagctttcagtttttcatcattgaaaatggtattagttgtggatttgtcatatatggcctttttatgttgcgttatgttctttctatacccactttattgaatttttttttatcataaatgggcattgaatcttgtcatatgctttttctgcatctattgaaatgatcttatggttttcgtccttgattttgttaatgtggtgttcatgtgaattgatttgtggacacaaccttccttgcatcccatgacatgtgtgtcccttgcattggaaatggagagtcttaatcactggatcactgaagaagtcctccttttttagatttttaaactctttgtaaagtattcctctgttcattttttcccctctgttcacttttattcctgagttcattgaactgcctctctgttttgctctttttttgtagctcttggactttcttcatgaaggctgttttgaattctcttatcagttagctcacaatattctgtaacttgaagtttggttactggaaaattgccattgtccttttgtgataaagtgttactatggttcttcatgatgcttgatgaaattgttctctactggcaagtaacctctctgcttgattcaaacacaatagattagagactagaggcctttcctttgtcttccagcagatggcgccgtagcacacattttgggtctcttgcctcagctgcttctgttcatgtttgaaagtccgcacttagtgcccaccacctctgactgccccgtggccttcattatcacttcttgtacctgcggggccatggatgccttacttctgccagtgttgctggcatagccgcctggcgcacctcctgctcagggtcccttgagtggcaggctccactgctgttgtggaggaggcgggagtaggaaggggtagccgtgtccagtgtcgtaagattcctgggctctgcggcttcgggggtgattggagcgtgtgcagcgcctcccccgctcctccagcctctctggggctggaggtctgggcgctgcgggccccgtctctattgtttcttggttctgccgcctctctgtgttcccgttcaccaccttcagtcgtgcatttatgtgggaaattctccagtgtctcggtgtgctggatgcaggcacctttgtggtgtgaatgtttatgtaggatgaatgggggggacaaaggtagcttttcgctccaccatgttactgaggctcagaatggttcttttaaagaaaagttgggttatgtggctctcctccttgaaactccttacacttgactcgaagtctagattcttatgctggtcccttatggcctggccctatcatcttattctcaatcctcaccaccacctttgagttccttgaaatcacctagtttcttcctgtgtcatcgtccacgtttccttgatcagaaacataagctctttcgctcctccttcccgacaccttccctgcacgtatgtcacatgcagatgggtcatatgcacacacttggtaaacttgtctcatcaaaaattaaaaaaaagaaaaaaaaagctatccaaaacttgctagtctctcagatggctctttgatcttttcctttatagcaagtacatagcacaatttataagcgtagatttgtttgcgggtttactaagttctttctcctttactagaccatgagctccacagcagtgcagggctcatcatgtctgtttcacgttcatattcagtgcctagcatggagtgtgccctgggttattactgcgtgagcaaatgaaagaatgtagaggctaatttcatggcttctccttgtcttgagctatttattcaacaaatattcagaaaacagctttgtgtcgggacggtgagattatgttcttttaatatttttatgttttggtatgagacatttttccgaatggtttctcctgtgtgcaggcagagtgctcagagcccacattgtttctgtgtgtttgagtaggttggatcccagaaactgtggaagagtggaagcttctcctgcatctggtgcagaacgcaagcacaaagccagccccccagcagtcaccagatgggaacttcagcgatgggccttcccctatcactgtggagaatgtggccctcctgctggctaaggccatgggcccagaccgggcctggtcactgctccaggaatgtggtttgaccctggagctgtcagagaggtttaccagaacctgcgatatcctgagaattgccgagaagaggcagaggtaattaatgtctgtctgtcctgcccttgtcctgccctgtccacaagcacttggggagtgtagaatcccacagattttcagaggggacaggactgtattgatcacatagtcccaacccctcacagatggggggacggagacttctctgttgacttaggtgattaagagaagaggctaaagtaatactttgttcatagttgtgaccaagacacttgtaggtcaatgtgactacccaaatatgatgtatactcaattcttggagaatattatttgtactgcatacctaatacctgctgtgcaggagaccagggtttgagccctgggtcgggaagatcccctggagaagggaaaggcaatccactccagttttcttgcctggagaatcccatgagtggaggagcctggcgggctacagtccacggggtcgcaaagagtcggacatgactgagacacacacacacccacctaatcatctcagttttttttttttttaatttttagtttaaaaaattgtggtaaaatacagataacatgaaatttactgtcaaccatttttaagtagttggttcagtagtgttaatatatttgtgtcattgtgcagttaatttccagaactttttcatcttagagaactgaaaatctgtccccacgattccccctcctccctctgccccctccctggcaagcactgttctttctgtctgggaccatagtgtgtgtctttttgtggctggcttatttcacttaacataatgtccttaactgtgttgcagcatttgtcagagtttcctttttttctgggactgagtaatatttcgttgtgtgtatataaccacattttgtttatccgctcatctcttgatagacacttgggttgcttctgcctcttgctattttgagtaatgctgctgtgaacatgaggatacaaatctctctttgagaccctgctttcagttcttttgggtgtatacccaggtgtggaattgctggatcagatggtacttctgtttttagttttttgagacactcctagactagtttccatggatcccgcaccattctgcatttccaccagtgacgcacgagggttcctgttactccacgcccccagcaacactatttattactattattttttgatagttagctatcctaatgggcatgaggtaatacctcattatggtttttatttgcattttcctagtgatgagtggtgttgaacacgttttcatatgctcgttggccatttgaatgtcatctttggaaaagtacctgttcaagttttttgtccatttttaaattgcattatttttttttgtcgtatgagttatttacatattgtggatattaacctctgagatatatgatttacaaatattttctcttattgtataggacaaggtgttgaattcataggatgccttttcactgttagttttgtcttttgatgcacagagtgtcagctttttgaatcctttacttctgaaaagaatgaacaatgacaactaaatttgcttgtttcttttctttgggatttcagagccttgatacaaagcatgctcgagaaatgtgatcggtttctctggtcccagcaggcctagtgaagagtatgcagcagggcgtcacgacatgttgagaaagactgagctgtgctcccgagcctcctgaacatacttgttcttgaaggaaaggccccaccggggatcccagcaccttgttgggagcaccttcatccctgtctgttacctctgcatttgtggctcaatttgtgacctcagtgtttttcaaccaaagttggattttgaaaggaatcagtccttgtttgccaaaacaaaatgctctggaaggaagcagaatgtgaatatccccagctgtgcagcccttatgctggacaatagaattattggttccttgttggtggactagggtaattcttttcctgtcatgactgctatgcagggagcaaaagtttctcaacctggtcatatgaagacatacaatgtagttgatagaaattgaattcctttcttatcttttctgggatacttgagaaattaccaaagtaagacctagtagaatgtaattaacacataaaataagt

SEQ ID NO: 71 - DNA, 3406 bp, Hippotragus equinus
  source 1..3406: mol_type = genomic DNA
gttccagcaccttagtgtgttcaccaagccagttcatcaaatgtccctgttcaggagtttttatagagcttaatctctagtcccattcccctcccaggaggctgaggatgggctgaagctttcaaccctttcaccacttagtctttctgctgaccagcccttatcctgatgctaggggtccccacttttagtagcagtataaatttatcttattagtataaatgcaggtttgatataaaggagtttgttataacaaagacacttctttcacgcataccactcaggaaattctacgagttttagaagctctgtgccaagacggaaacctaaggacaaaaaccaaacatgtttattataccattttatatatatgtacacacacacatatacatatatatataaactgctcggaagagaggtgtattgcacacacaagtcccactctggctcctccaactcctaggcacctttccctgatcactgtgtgctagagacaattttcagcctgtgtcagtcacatagagaccctgtccagatggtgcccaggcctccaggcctgggtggtctgatgcctggagggctgacacccgaggtggggtggggggtggagtgtctgggtcccatagaatgtcctcatataagcttagaactgggccagaggctcgtccttgagtcccagtctgcttcagcagggctctgagcaagcccacagtgagagggggctctgccccaggctcagggaatggggcagggggctccaactcatctgggaggtatgtccgcagtagaagcaggagttcagctggagctaggtctggtgggcacaggcggcaaaggagggggagatgagcgtcaagccggcgatgccgggcaaattcggccaacagcagtttgaagatctcacctcgaagcagggggctagaggggctgagggccaggccagcctctaaagcccgttcccactgttccttttgcaccagctgccccacagcttggagcacagctttgggccgcccactgcccaagagtaggtctagctccagtgcttcaggcctagtcccctcttcacctagtactgccagggctcggcgatagaggggcagccctgggcctcctgccccccagccaggccccccctgttgctgggccagctccacaaagggtggcagccattgtggctccagccggcagaggcactggcacaggagttcaaaggggggcagtatgccattgggtggttcttttccagctgctctaacccccagtaccttcttccacacatccgggggagcttgggacctcagatggccattgccatctggctggagctgcaggaccctgaggatggcaccccaggctgctgtagggagggcttggaaaatggtgttgagctgggccagctggtctcccatcaactcagtcctcagcagccgtgccacttcgtgctctgccaactcagtccagccagcctcctcctcatccccagccacaagctgggctttgagctgttctaagccccggtaatcccgaagctcggccctcagtgtggtcaacagtgctgatggggacacatggccctggaggatggatgccagggcctgaggtgctcggaatgtgctgttgtgtcgcagttcctctggggtgagctgggcaccccgcaggctccgtcgctggtagtacttgcaggcctcctcaaacaccatatcttcagctgaaggcagctcaaggctttgtggggttttccagcctacttgaaacagacccacagctgaaagtaaacgaagaccccctcgagcctccagctcttcctgatcttccatgccaggggtgggggtttccagcagatgtactcggtctgtactcaggatcttcttctccagcagctgcccactgcccatgtccagcagttccaatgtggaacccagcacacaggccagagtgccatgaaatgtgcccagtgctgcagaccctgccaggctagcaggtgcctcctgcagggtgccaacagtccgggagccaccgtggggctgtaccaggctcacagtgcccctgaagtcaagccacatcaggccctggggagttggggcccaggtatgtacagtcaatggctgcctgggggacagcagtccaggaaggcctcggagcagggtcctgaagtcccatgtgtcccctcttccaggattcaggcttttactgtgggagaggccaagacatggggcagccaccactaccttgcccttgcttgggctccagatgagtagaatatgacccaagccaggccaggtgttggcagtgggcacaaggaagaggtccttgcgggaggtcagcagcccgaaagcggggcagtggtgcagcagtatgtgtgtactgcccaggttggtgccggcctcaccgctgggctcgagggtcctgacgcacacacagtggctgaaagccacagcaggaggccctaactggccctcagcgccggcctgccgctcctcgcaccacaccaggcggcctcggggcgccgccacggccaccacacgggctccatctccaggacacagctcggtgctctgcagcagccgccagccgggccccacccccgagccccacacctcgactaggccactctcccacactaggactagcgccgatcgcgccggccacggcaggatgaaggcgtctagcggtgagggctggccaggcggccaggcactttccagctccgcaccgggtccacgcaccgcgaccagcagttgcggggctggtgaccccggaggtcgcagcaacaataggtggcggccgtctgggctgcagcgaactcggacggctgggtccccggctagcaactcccggagccgggccgcgccgctgaagttgctcagatctgagagcaggcgcagagtccccgcacgcttcatggtgttctccgcgccggagcacgcctaggtccgccgcactgtagggcaaagcccgtctctcagtcccgggttcccgcgggaagtcgaggatggggttgagacttccgtcccgggtcgactaggcgagccaaggccgggctaagactcagccccgcccagccccgcccagccccgcccctcacggctagctagagacctgcgcctgttttacgcccagcaggcaaaacaccgcccatcaaggggcgggggtgctacagggagataggaggagctaggtctggtggccgactgcctcaggccccaggaagccgggaagtggcccaaagaatccagattccagccctttcagcatccaactcccaacgcttcccttccctccaagccacgctttctcattccaatttattcatgaaatttttattgagcacctactaagtgcctggctctggggagacaaccccgaacaaaagagaaaacctcagcttcacggaatgacaatc

SEQ ID NO: 72 - DNA, 143660 bp, Hippotragus equinus
  source 1..143660: mol_type = genomic DNA
gctcaaagacagcaataatcaagtcctgaattctctccccttatccttccttttttggggggaggggcgggtgtgtgtgttatcttggcagaaaactttaaaaaatataatcttttagagcaaattttatgtaaacaattaactaatttaaattctactaggattttttgggggaataatagaaaataatagaaaacagaaatagatgttaagtttttctttagactccactatggaaaaaaaaacttcaaggatatgattttaatttactctgccaaacttcaaccttgatacaactctccagatcatcactaaattagaacaaaactttcctttcaggaccttgtgaggcagcagaattttgtggagatgtatagactgtatcattacttggatttgtttggtcatccctgtcttcaggtttgacctcctgaaactggcgaagtcagtaaacgtagcctggagttaaagtgctgtggagagtgcagagttctcatcactcatccggctgcgtagctgctgaggaaggaatagaacattggatgtttcaagcgctgctggtccttccgacaccaggcgatcacagtcccatcgctgttcgctgtgtacaaatggtggccatcacaggaaaatgtaaggctgttaaaaaaaaaagtcccatttctacgttgtgtctctgaaaattgtatcagcatattggtgatcatgtggaaattggtgtaagaagttaagagcctttactggagcagagagacagataaaacgaccacctacaagtggttttgactgtaataatatagtttaatggttctgctgccaagtttgtgatgctcattctaaccagctgatacagactaaaaccaagataaaaagattggcatattctgatccctctttgcatgttttcttttcctttcctatttagggttattacttaacaaatacatgggtatcggaaacttcaaaaaatataacagtactacattttctctatatagaaataaatgagaattattttatggaggtattttatttccctgaaagaggaaaagataaaaaatgtgttattaatatataatttcatttcattacactttacatttagtggactaaaaataaatttattttaatgcagtaaaatttgaatcacttactgcaattgagtttttaaagtcatatttgttaatggagcagagaggtaacaggttgtttatcagtcttgtctagcacactcctgtagctatcagtcaccatcatggtattttcaataatgaaaggaaaaaatatataacttccacagttcaagaggccttcccaggcatgatcccagcatgcccttctgtgaggctctgagctcctgacccagattttaagctccatgaacacaaacgctttgcctcctcctgccatggggtcccatacatcctggtgttcgataaatggccagttgtttataatgatcctccttatgttcctctttacttctatgtgctttactatctctccaacaaaaacagtcaaagagtatagtgtgaaacagggaagggtgggggaggttttaccttacaataggtttatttgatttaggaaacgtaatttcccgcacaggctttaagtcccaagtactccataacctagaggaagaaaaaaagtcatcatctaattacacaaactcaagtttcctttactaaaaatttaacctatgtgtttatttgttaaaaatcatctggtaaggaaacacaataaacaattaatatggttaattctaggcagtttgctcaggtgggtatgggattaagaatactttgtgtattttcatattgttaatctcaacaattaaaaaatgaagatcatggcattcagtcctatcacttcatggcaaatagatgagcaaacaatggaacagtgacacactttattttcttgggctccaaaatcactgcagatggtaactgcagccatgaaactgaaagatgattgctccttggaagaaaggctatgacgaacctagatagcatattaaaaagcaaagatgttactttgccaacaaaggcccatcttgtcaaagctatggttttccagtagtcacgtatgcatatcagagttggaccataaagaaagctgagtgctgaagaactgatgcttttgaactgtgatattgaagaagcctcttgagagtcccttggactgcaaggagatcaagccagtcagtcataaaggaaattagtcctgaatagtcactggaaggactgatgctgaagctgaagctccaatactttggccacctgatgcaaagaactgacactttggaaaagaccctgatgctgggaaagactgaaggtgggagaaggggatgacagctcatgagacggttggatggcatcaccaactcgatggacatgagtctgagtaagctccaggagttggtgatggacagggaagcctggcgtgctgtagtccacggggttgcaaagagtcagacacgactgagtgactgaactgaactgaaccatttatagttaaacaatataaaatttcaaaaatgtacaaattactatttagtaataaaaaggaaacaccagaagaacctatatcctaaggtaattttaaatctctaaatattaaatattattatgtttagatagtaaaaaaatattttttgaaactgctatgtccttatgagcaaaaggacacaaagaaatcaaactcctcttaccttacaattccattttctaatcccccagcaatcacattgatagatattccctcaggctggttagagaaagccacggaacaaatgatctctctgcagtggacgtgtccaacgaggtccccattcactgtccagagtctgaggtcactgcctccaccagctaaaacaccacaaaaacccacaggtcaccagggtgtgcgtgttgcagagcccccccacattgggccccagaggggaatccctgagggcctcgcttgtctgtttgatgaagttcataggcaactcatgactggagtgtgtaagtgaaattactgcataaggcacacagagttggcctatttatctagagatgatgactagtgaaaaaaataaaaataaaaaattaacctacaaggtagagcaacaatgcaaattaaccatgaatttctttgtagtcataatatcttagcatatatgctaaactgccaaatctaattctaaaagtacctataaagctaagtaacctccaaaaagagaagaaaatattctgtgaaactacagtatctttaagaagtgagttatgggacttctgaagaaaaaataagttacagtaaaagttgagttaaaaactaattcttaaaaagaaagctaattcttcagaatgtccaagagtaaatcttataaatcaatgtcttattaaatgaatttttcttttcaaagatcaggagtaatcaattttttgtagttttccaggagatggaagaggcagtaattgctagccatcctcaataaactggggctggtggtctggagcctatggtgatgtgtccagcctttctggagaaatgttctcatactgataaagagaagggttaagaggcatgataaagttgggatgacatagtatgtgttaccacactttatctctccattagaactaacattaaagtagagaatttatttctctcctttattaaggcagtgaaaggatttcatattttatagcaaagaaataagtattagaaatacttcttcacctacagaaatgctaaagaccatcaaataccacagaccaaaatgcctagtgtgttgcagtattattcacaacagccaaaaggtgggaacaacccagatgttcatcaagaggtgaatggataaacaaaatgtggtatatctaaacaatggaattcatttttattcagccagaaaaagtaatgaagttctgacaacaacatggataaatcttgaaaatgttatgctcagtcaagtaactgagggggtaggagaactacccactactctgaattttacaatattatattaactttatagtaccactggtgacaggaaaaggctatgaactctagttgaaatgcatgtaattttgatatagtggcagaatgattttttaaagtacagaaaccatctactataatatttatagtttaataaattttatatcttatcactataaaaaccacatcccataataagccctggaaaatcaggataaggaaagaatgagtttgccagtgtgtctttagctgcaatacagaaaaatttgagattatatatgtgtatatacacacatatacatattatatattgtatacatacatatatatttatcttaaattttgattttaaagttacttggatggttctcactaaagtcaagattttttgataggttaaatctgattaactttcttcccttcctagagtataagaataggagaatgaaaggtagtccaggtcactaaacatgaatttgtcctcttttaaaaagtcattacttttatcatgctctctaccaaatgctctttatgactcctcttgtatatgtatcgagaggcctcaaacaagttgagaaggcctttttgttcaaagtgggaagaaagttctacccattactctattatactgtgtatactgcctacggacacttgaaataccctgctagtgatctggtaaatataagcaaaagttacttaatttggtttcttgttcccatatgactagctgatataatatcatagatatatatcactactggcagcaggaaagtaattaactttacaaaattcagctccttcagggtcagttctaacttccaaatgttgccaaaacaagaaagtagagaactctagataagtcatcactatctttcccccccagattccctcttgatatgtgtgacacactaaaagcctccaatgtacaaatcaaggaagaatggttagcaaagtcatcaaccatctgtgcacacttttattaccaaagtcaactgtttaagatctttccctttagttatgctgactggggaataagaatgtgttcatgacattcattactttatgactgggggctaaagcctggcaaatattaatacttcacatctgaaatcttgaagcatgactgaagacattacttttcttgaatataagaatgatgagtgttttgtaaaatagaaaaaattcaaagagataaatatatatatatatatatatatatatttgaactttgacccacgaccctggcatagagctcctaaactcttgttaatttactgtcttttgtattagggagatgactcctggggaggtcctagacagattcaagtgggggctggccagcagagaaactgcccttacagcacctcccacctctggggaggggagaggggctacaggcaaaggtcagttcctaatggccaatgattgaatataccaggcgtacataatggaacctcagaaaaacccctaaacaacagggaggagactgatgagcacagtcatgggccaggagggtggtgccttctgacgccacgggaacagacctctggaccttttcttgtggctgttcactttgtaatgaactacagtagtaagtacagtgttttattgagttttgtgagttgtcagagagaattactgaaactggtgggggccctgagactcccaagtttgccaacttcaactagttagtgtcagaattgaattgcactgttggacacccatttggtgtcacagaaccggagaagagtttagtgtctggaaagaccacacatttggtgtcaggaaaaaacaatataaaaaatgcaagcaaaggataaaagaccacccactgcagatgtgtcaaagatacctgttctgagtggacaaaaagaaacagttttttgaagaatgctttcaattaatggaaatgcaaacagaaaacttatgagcttgccaactgttcttacctactggatatatcaagttttttaatacatatacatgaaactaaaactaaaagtcagacctttgattaggagatctatctttctcatgtaaatttggggcacattatacctccattgttattctgtaatactgtcttgcaggaactagaagacacatataatacaaagctgatcctctgctgatgccctggaggagggtatggcaacccactccagtattctcacctggagaatccccatagagaagcctggcagcctacagtccatggggtcgcaaaaagtcggacacaactgagcaactaagcacagcacaaacctaaattgatggactcaatcttctttattgcattttaatacacatacgacagaggatgagatggttggatggcatcaccgactcaatgtacataactttgagtaagttctgggagttggtgatggacagggaagccttgcatgctgctgtccttggggtcgcaagagtcagacaggactgagcaactgaactgaactgaatacacatacatggtattccctaagtattcaggtctggcagggaccagagggctgtaacggacggtttaacctatgatgatgtaacctatgatgatttaagctagctgagcacacgttagtgcaagcgctctgtgctttgggtctggggccagctcacctgagtcacacactgtagcaatgtcacctgtagtctcgctggcagagacagccgtgactgggcttttgtgtcccgccagactttgtacgtagcataatctgaaagaccaaagacatgaatttgtgtatgaacattaaatataattacattcttttatttatataattcttttggtcagtatatgtacctactatttataagggattcctgactctattcataactgatctattaattcaatcagattacaaaggtaaagtctgtatttcatgcttaaagttattataatgtaaagatattattttacattaataaaaatgcatctgtttctcacagtaagaactggaacattaaaaacagctattttagagttggaaatcttccgcacctgttcaaatcccatacgatgcaggttccatctctgctcacacttatcattatactatacggtttgcagacacataaactggttatctcttctgtgtgcccatacagatgtatctgagactccatttctatctctgaaggctaaaatttaaaaaataagtataagataaaagccgtgacaaaaggtattctagtactgttatctcaaaaacaaaacaacccaagtgactcaaacattcttctcaaacaaattttttcaacctagctcaactttttctaaagagtagaactagttaaacattaaaaaaagttttaattgaccgtaatctcatcaactgataagcttttcatttttgtctattcttttccagtctggccgaatatacatgtactttaatagctgtgattatctccatatgaatagttctctatttcatttcatacattctcccataagcatttctcatttttgacagtgtattcaaaatgatttttaagtgttatgatattctatacagttagtataccataatttacttgaacatcctttattgacagatatttaaaattgtttccaatgttttcaaaatgttagatgccataaataaataaattttatttttatttatctcataatttttaaatttatgtacgtaagttttgttcctcctctatatcactcctttagaataaatttccagaatcctcatagtggatcagtgaatattaataattttacagtattgatagtgtacttgcaaaggctttgcactgactcctgatgctaccaatggcaatgtattactcatcaatagttgtggactgattttcagaatcaaagcttgcaaactggtgttccaaggtccacattgttcacagatgccggatgtccacagggtataatatttgttttatactaggtttatactgtcataaagtatttcaatatttcaaagaatatagaaaagtagaaagtataaatacaatgaaaatctgtatactgaccactcagttaaactaatcctaacattttataatatcagcttattttttaaatatagaaaacattaaatattacatagtgtgtatactgttttacatcttatttcctctcccttctcagaagctattatcctgaattttgcatgtttcctgtgtatttagaatttatgtcctactatatgctactataacaataaacaacatattgggtttcatgtcgataaactttataaatatggtacttattgttctttaggcatccgatctattttgccttttttgatcaccattgtttttaaaacatacctatgttgactttattagctgcagctcatctgttttaagtgcttcatagtccagtgtcttattcacataacaatatatattttttacttaaagactcaaatgaccaggcaataccagtcttccttggaaccactggcctaagttgtgtggcagtggcttctgtttagctagggcatgtggccttcaactgaacacaatcacagcaacaagatggctctgaacaagggcatgagtcctgggtctgggccccttctggtttgcctctgggaccctccccacagggccaggagtctgtggggccacggaaatgtgccagcatccttgcagaccatgcttcagggtgcctgggactgaagaactgactgttcagaaaggcttaagccctttccttctctgcttggatttgtgtctcagtggtcattctaaatctttgaaaatttcccaagttttaaatggcaatcaaggttgcttttaattgcatttctcttattataactattaataagcttaactttttcacatattcattgtttatctgtaaattgtgtgcttggttttgtatatttgttactacattagaaaattatttgtagggattcctctattagtggaatagaatgcaagcaccttcctcgtttctcctggatgacctggatcaccatgccagtctagggatgccttattcaaagtttagtctcaaggatcctggaccgcccagggaattccaacccaggctgtatatccaggcaagagttggccccatctgattcatcctcactctccgggaccggccttttgggcgagaacctccctgggactgccccctccaacatcattttgctctgtcccttgttgctgttttctactcctcttataaggggctgtctcaaggtcagtgtcaatattctaggactgacagttaatccaagaatatctaactcaaggctagagctccctccttgcttgttaaaatatatatacatatgtatgtgtatttttttacttcatgactatgaataatatttatagggtaaacagaaaataggtaccctacagtgggtgttgaaattttagattttgcactttaaaatgattctaagagtcagtgttactagatgattccctgagggatcagaaaataatttccatgggtagaacagaaatcttctgctggcctacttcttcacaaaatgttcttgaatggtttgatactaccttggataaactgtatatttattctccctgccatcaatttagagaatagaaatacaggtgttcacttatataaagatgacatgggcacattaattagtgaaaaatgactcaaaatcagttattttaggatcagttatcacctttgaagacattcttctctaatatataaagggcttataggtaacagttccctataaccaatcaacgtattcatcattaggtatgtagaatgcatcttagcagactatcttgggagattcaacagaaacaatgctcaaagttagatgtgcttcgctagcttaggaaagtatttcataagattcccttgaaaatattttcaagcaacaattattttagttatagccttcatggcacttggaagcctgtcttttgctgtgttaagggcaacacaaacaagaacataaatacttttagaaccatggcattcagtgggtttgggcaacggaaactagtgaacatgaggtgcttcctgccaacctcacaggtacagggtcacatctgcaacttcatggacccccaaatgatgagatggtgcccaagaaaaagcgacaacaatacccacaaaatcccaggtaaccttcccttagatcaaccaatgataaaatcacacagctaagatacacttttggacatggtttaaatagttaactgtttatctcatgacttgattacctattaggagaaaaagaaaacccttatatataagctgaaaaatcaacttttgggaaagggtagaactgaggaaaggtatgcaacataagacttcacaagcctacaataacttcaaactaaaagaagcacacatcttgctgtattcaaatgataacagctacacctttgatctgctgcttcagagctatgctgtgtacaattactcctatattgacaacttaatcctttttttaaaaaaaaaaacccaatactgcatactgtgttagtgtacaattaaaaatttaaattgtagggagaatggaagtaaggaaaactaagaacaagactgttcaaagtgttgggaaaagaaataaaagatggaagatagtttttggatgacaaggaacaaatgatctgagcacacaagcagaggactactctgcagatcagaatgtatgtgtaggaaaaaggaaacagaaaggtgtgctcagcagcggaaaggcaatggcagcagtaaatatcagagacattaccaaactgacatctgatttaggccttggggagtaaaaagaaaatgagacactccaaaagtgaaggcacacccctctgcccagactccctagcactcttctcgttgtggcctatgtatgagaccctcacccctctctactctcctgccactcctcccagcagtcccactctgaactacaaagtatctgccactcccgaactaccatgcctttaattccaagtggtgagtgtactctgatgaaatactctttcctcttttctccacttagtaaaatgatcctttaagatccagctcaagtgtaatttttcaggctccttgacacctggttgggcccacttctggctcttttaccctgtgtgtcagtcttagagcacacaccccgctcttctgcaataatctgtaggagcccacctcctgctatagagtcctcgggatagctgccagcatcaccacagcaccttttaactggtacccttccttccagtctcatggccctttaaatatttttccttgcaggctctacaatgatagtcttaaaatgctgattggatcatatcacttctgcttcaaccattttaatgactcgttagactgagacagaaacaatattatggtcacatttataccctaaggaaggtggcaaagaaccttaacaggggtttaaaactgaataaacttgctcaaaaaagtaaggaacctagtgtcaccctatgctaggaaaacaggtttcacccagtagaacatgttttataaaataatggagaaaactgtaatttaaaaaaaaaaaggcacatagaatgttctagaacagaatgtttatcactgagttatcactctaaacttgcctctactcttcaatggcaccacagacagctgattcaataaagaaatgagagtaaattaagagaagtatggcataatgtcttcttcactagactgttttaataatttaactcacaaatcttaaaagattcagtgaacggctgaaaaaatttcttccagtaagtggtagaatagagactggctacttggatttttctgtcatttaattcactcagagtattaggaatgttaggagttctgcacttctaaattttacagaatcttgtgggataccctttaagcattcaggtcgatactgagaacagaaggaaccatcaaaatgtcacgaaaaagcagagcataactcaaaatactttctgtttctgtccgtatacagttattttaaaaattcttttatgatcctaataaaagagttagatattgaccttttacattatcagagcttctgtgaagaagagattaaagtacaaaaaatgtaagttgctcttatactaaataaattatactttatacagggtttcttcccctcactgacatgaaaatcccacaaatgtgcccaggacctaccgtgccgcttgtgaacctgtttgagtaagctgtgatgacaccacatttgctcccagtgaacagctggcagctgtcagggacccaagcacaactagtcacctaggaaaaggacaagtcaaagatgaacatgcttaaaaagcatgagaatgcttctacttttctgacatttattttaaaaatatatgctcatgaaattaagataaatattttacttgaaatgattagaatggtgcaagacatagtaagagagtattatgtaactttgagatgtctaaaagctgtaaaatgtgatataaactgtcatcttttggttctcttattgcattgtcgaaagaatgctgtcatcttttgagaaagtataaaagaagactagagacactgtttttttcagttgtcattgaacacagttgggaattcagaatttttcattttccagtgataacagaaaagaaaagaaaattgacaggagtatgtttcacagttaagagatcaatcagcagatgaggcaaagagagagcaggactctaatatgtaataatgacaataatgaaattgatcagataagcgaaatcacagagtgtgggtctttgcatgataatatcctggacaaattttctcaaactaaagaattaataagtgaatgacatattccaagaacaaaatgaaatatgatattctgatctaggtagtcatttgattggaagtactttatcacaccacatttgctcaaaatctggatcatcctgttttgctgaaaggacttgaggagagtgtgttttttcatctttaatgatgtttctctgcccaattttacatgacggaaataattttgcagtgtttaaattcttactaaaacttctaataaggttgtttttcactgtccttttattcttacttttgttagtttactagtaagccagatgacaaaagccagtgatgtgaccttttttcaggcatactgaagattaagcaaacaagtcattgctctcctttttttcactgccaaaaattccctacaagtagctgactccatttctttcttctttttcttttaaacacttctatttatttacttctggctgtgaggagtctttgttgctgcacgagatctctagttgtggagagaggaggctactctcaagctgcggtgcacacttctcattgcgggggcttctcttgtgcagagcacgggttctagatgggcagcagtttcagctcctgggctctagagcacaggttcagcaattgtggtgcacgggcttagttgctccaaggcatgggggatctttccagatcagaggctgaagccatgtctcctgcattggcaggcggattcttcgccactgagctacctgggaagcgttccgttgactccatttctaaggtgctcagtgaatggtgacaaacattaggatgtgtgagtacgcactgactccatttctaaggtgcttggggaatggtgacagatgttaggatgcgtgagtaggcaccaggtttatgtaggtaatggaagtcagaaagcagtaaaagaacttcctatggaaagacagtcaaagagagaaggtttagcatacaatttagtcctggaaaaagttgtggcagtactgtgtgtgtgtgtttgtgtgtgtatatcgtgttttatagtttacaatatactttcacaaacactggagacatttttacaacagttttatgagagagtagtgggagtatgactactcccgttttaagcaggaggaaagaaactcaagctgggaaaggttaagtcacttgcgaaagcctacatagtaagtaacagagctggacactaacatagatcacagggatggcagggctttagcaaggcccaaggctctttctaccatacggtgatgcctgaattctcggtccatttaaaaaagccaggtacagtagatgatgctctggttattgaaaatgacatataacaaaaggcaagttaacactgagaaaaaaatcaattgtgattttgttccaacactgctgtgagctgatgccgagtaggagattatgatacagtctcaacaagagatgggaagagcaggggtcccccactcctgggccacagaccagtagcagtccatggccacacagaagcaggtgactggctggcaagtgagcgaaacttcatctgtatttacatccgctccccatcactcatattactgcctgagctccacctcctgtcaggtcagtggcacttgattctcacaggaacacgaatgctactgtgagctacatatgcaagggatctacgttgtgggctccttaggagaatcatcctgaaaccatccccctattcccttctctgtggaacaagagtcttctgtgaaaccaatccctggtgccaaaaaggctggggactgctggggtagagaacaaactttggggatatagtcagtacagcagcagttaggaaggctgtcagcactgtaaacaaggcatatgtctagcgtcatcagcttctcgactaactacaggatattaaatactagctgtcatcagtctgactcccttctaaagcattatgtttaattattattataaagtacttcataaaaatgtttacctgatattgctgtgaactttgtataaagtttattggaggctcgctttgtttactcttcaaccttaaaatgttatcagcatatccccagctcaggatggctgaccactgaatgtcagtactgttcatgcttctcacacctcaagaaagagaaatgaaagtattagttgccactgaacagttatcattggacagcccactgaaatggcaggttaaagattattctggcctttaaggcctgaagttcacatagcagaacatggtcattccagtgcaaaatcatctttatagccataagatggacctatttatgttagtttcatttctttaaggctaacaggattctaaggttggaactgtattctttttcacctgtgttattttagtagggatttatttgacttagaaataaaatttctattaagaaatttttataaaacacaatgataactatttatgttctgtgatgctttttcttctaataataaatatgaactaggtaacgtttaaataactttctagatacgccatactgaaaaatcaatatggagaactactaatgctaaagagggaccattgctggagcagaagcaatcctgagaagaataatttaatcctgcaactgcaaggattttgtatgggggaagttcatataatgaggttctgttcttctcttgttctactctcaacataatactacatccttttgggataaaggtctggacattctgacatccttttccagtgtttctcataatctacggcttgttggcacactgactagggcaaatgcagcataaaagctgcaggtagctggtgctgcctgtacaactaagaagctttgagttccttaaggagaatgtgagtacctcacttaatatatagctgtatctataatatatagaatgtgagtactcagcataatatatagcataaaatatagcacaatataacataatataaagcaataaaacaaataaatatttgtttaatgaatcaagagcacattaaaaatgtagttcacagattcctttttgctttgttgagtataattccaaatgtggatatcagttttgcaatacagaaattaggatagccttgctacatatatactcctctctagataagcctcaggacttcccagattttactatgaatcctggcatgtggtaagaactcaataactgtcccagatttctcattccagcaacacaagatgcaccatggtttttttaaaagaaaaataaacttcttctttacttattagaatagtagatcttaaataagtgtttgcaagaaaatgacttttgcagcatgtgcagatttagactcaagccccagagattctaatttggtgtgtcttcagtggtatactcagtaaaccaactgagtatacttgggaaaaaagcacctcagacaattttgaggcattgttagttctcaagtaattggcctgtactgagctaaagatcattaaaccatggcagtttagttgctacactgtattacacatgtgtaactagagggcagttatttaatataacagtgctcgacacacatgacctcccatctgccagctgccctctcagtcactaggaaatgcccctgtggatggttctgcactgagtatggcagtgaatgctcagagtccctggctccagagtgttcatagtctgatggacatttatttattaagcacaccagagtcaggtgttaaccattccttatgttatttcatttaataattatagtgaattaccctgtgaagtaagtccttttatcattcccatttcatagattaaaagccaggactcgagaagcataagtaattttctcaaaactacacaaaaatacacaggtattaggcagcagaaccggggtgcaaattcaggcactgtgccatgtgagctcatggccataacttgtatgataccacttcctggacacacctagattctgtcaaatcccacttacattctatgaggaaataaagtgtaatttgaatgaacacagctatcacttgtgactgtagggcacaaataaggtaggttagctattatattggacatatttaagtcccaccatgctaagtaataataacagcccctttctctctgatcaacagagataaacttcaatccactctaattaatttcttaaagccaaattattcacacatttcgatcctctaagtgttattagtagtaaactacttgtgacgcatctcatagctgactgcaacatgctagtgagaataaactactgatattacaatgataattaaacagatttaccttcccctcttagttcactaaactttgataaaatggtatgtggcttcttttattactggcaactataaaggtaaccattcatctcatgacagaagggagagtgagctttttaaaagaactgtggtccagccagcacactaaattccttgaagtggctgatgctggggcacgggtgctccagtggtgggcggggccgtgaggactggaggagcacagcgcacagaaccaacaccaagaggcgtcaggcccacactctggtttccaggcaaattctgcatacccctgacaggcacagatgggtgccctcagtcattcattttagtgcttaaagcccaggcctaggaagtagggagagttctttcacattaagtaaaatgattaatttggaagggctgaggaactgcttgaatggaaaatgtcactagttttccagtgtataggtgacatttagaaatatcaagagggcctctactgacagcattttcccatgtgttgcttttagtgagtcagtgcagagaggtgagaaaaagattgctttccagacatatgtatttttaaaacctattttcaaggctatcatgatttcctcattttgttttactttcatgattgtctcttctgaggtactagaactgttggtcaagtaagtcattattctgggattcaagaacctcaaagtatatatttctataaaattgataatgttttcatcttgtgagacatttatttattcttgtctccttcaattcttcctctcatttcaaatgacactgcctttagttctcatttttttcacgtagtatgttttaattcctactttgcattaaatgaacacaaatttgagtctggtttttcaccaaggactcagaaaactcagaaatgaaacaaaatagcacatagatgaggggaaacattcaaatctcttgaaacatagacctaggatgattttcatgttttattttaccttgttctttgctatatgtcatcagaagacagaaattttgggacaaaccacatattgctctagtgggcagagcctggagacaaccaaatctttctccgtggggctggctgaagcagaccacaggaactggagcacttggggaaccaacatactccccccatttcaagccttttatccatgacaaaggactctaaaaccaagaaaagtaaaaagtacatttaaaaaatggtagtaaatatagaatcactcacggaaatatgtgttcctggtggttagatacagtgataaacaagacagatgaggaacacatatttccaaaggtggtgcaaatgctatgaacaaagtctaaggagggggagaggactgagaaagagagttgctagttagatgaggggctgggaaagagtctctgaggcaagcagacacctgagtgaaataaaagcacaccagggctctatccagggacagggcaggccaagtgaagggaacaggcagtgtgaaagtcctgaggtgggaaggaggcagttcagcatctgttcctattacaaacagacatcctgctcaggtcctgcatatgcaccaactttaattagctaatgagcaataagtatagtggcaaatgaaatggtatttattacttttcaggactgtactgttaaattattttgacatgttaaaataatagattctagttaaaaataatgaccctggtactgataatgactaaaatgatttgtaaggcttcaaaatcatgagttacactgacaagtacacataaaaccagaaacacagctttcaactatggaaaacaacatgggtgatctgggttcagcaaaacaatactgtctatcgtactgatcttttacaatttcaatcttactagttatgtaagttctgcttgcatttaacatgcaaacatatgcaaatttgatatacatgagctatgagcataaagagtttacatttagtgttctacatctggtgtatttaagtaactttataataagaaacagttgtcaaaacaaggtctctaaaaaccatttcctcttaaagtggatcacagatgactgcaatctgagatctctgctttatcttacaacctctttcccttttcattttctatgattcccttctgcaaacctctttaacactttacaactcacaggctcccaccttaagctgctttaataatgaagaatttagctgaggattagaatccattttactcttaaggcttgcttgctttatttttctatttcagaatataaattaatacttaattcctactttaagaggcagtatttcttatcatgacaatctagaggggccaaaaaatcctgtgatattttccccttaattgtaaactcaaacattgacacttctggtcactacttctggtggaagctgacaaccaggaccatgctaggcatgcttgcactggttccttccctctcatttgcaatgcctgttatgtcactgcctggtggggctttctccataatagccctcaggaaggtcacaatctgacctgagctcccagagcacactcttcatgtcactaacgcagcatcttctacacacacaactagtaatgcgggcatctgtatttaccgcctggtgcacaccttcaggctgggaccatggtactcaattcccggcctctaaagcttgggagaaggtctgatgtctcaggagttgagccatattttcctgaattctattaaaatccaaatgacataccggataggtaatttccttgacctgttctctggtttccctgaaagcaaactgcactaacaaccccacggcggcaggaagctccccttcgatgttgagcttggagccaggtctgctcgcgtgggctgattggaacagctgacgaggggtctggccataggtttttatcatggtttctagtgctcgtctttgaactggatcttcaactgcagagacatccattccaaaatatgtctgaagagaaaaagagaatgaaaggaatgtaaaaagcaagacttggtgatagtaccaaaggggaaacaacttgttttattctccaggcaatggacaatggaaaggatttcctttctcaaatttcaaatggaaaggatttttaaatgtttttgaacagggtgataatcattaatagtctcaaagagatcagaataggaatcatcaatgcttttgaatggatgaaacaaaaataatgtatcttgactagtgttagttaggtaattttataaaattaatttctaatttaagagaatatcatgtaagacgtcatttatttgcacagcaaaaggaaaccatcaataaaatgaagacagcctactgaaggagagaaattgtttacaaatcatgtactgataaagggttaatatccaaaacatataaacaactcaacagcaaagatctaattaaaaaggggcagacgacctgaatacttttctgaaaaagacatacagatagccaagaggtacatgaaaatattctcagcatcactaatcatcaggaaaatgcaaatcaaaaccacaatgaagtatcatctcacacttgttagaatggatagtataaaaaagacagagacaataaatgttggcaaggatgtggagaaaaggaagcctctgtgcactgctggtgggagtgtaaattgatgcagccagtatggaaaacggtatggaggtgcctcaaaaaattaaaaattgaactatcatatgatcagcatttccacttctgggcatttgaaagtgaaagtgaaagttgctcagttgtgtccgactctttgcaacaccatggactatacagtccatagaattctccaggccagaatattggagtgggtagcctttcccttctccaggggatcttcccaacccaggggttgaacccaggtctcccacactgcaggcagattctttaccagctgagccacaaaggaagccctctgggcatttacacaacattaatttgaaaagatgtatgtacccctatgttcattacagccttatttataacagccaagatatggaagcaacttaagcatgtacacatggaatggataaagaagaggtagtaaatatatgcaactaaatattattcagtcataaaaaagaatgaaatcttgttccaacatggatggaacttaaaggcattatgctaagtgatataagtcagacagtcagttcagtcgctcagcagtgtctgattctttgcgatcccatgaattgcagcacgccaggcctccctgtacatcaccaaggaaaataccaaacaagtatgatttcatttatatgtggaatctaaacaaaagaccaagctcataggactggtagttaccaaaggtgtgggttgggcaaaatgagtaaagggggcccacaaggtacaaatttccagttatacaacaaataagtcatggagatgtaatgtgcagcatgataactacaattaacaacactgtactgcacatttgaaaagttgctaagagagtaaatcttaaaagtcttgatcacaagaaaaaaatttttgtaactaagtagggggtggatgttaactagacttattgtggtgataatttcacaaataactgaatcagtatggttcagttaactggaaattaatataatgtatgtcaattatacttcaaattgaaaaaaaaaaacaaaatgaggtttttctttggtcttgtcttttagtaagaactcattaaaaaaaataaatttttcaattaagttgatccaaaatagcttctgcaggcaattagtaagtggatccattttttctgtggctgtctgtcagatattggtcagaaaactgagtcaacatcatttcaggtggtccacaaaatcaaaagagataacagaattcaaggatatgacaacatggagtctgaagaaaaccagaggatcctgccccactccaactttctcaattcataaggatgagaactcgaagttcaaagccacatgtgtctgcctgaaattgtgtgatattcggatgcccttttgttctttgtgtgaatatgctcaaagaaagagttggattcctctcaagacacaatggctggcgtcacaggatgactttgtgttgctaactgatatcacatcccccgcatcttgaagatgtctacaaatatcaattattgagatatgttttcttacatacagagacattagtaaggaacctagatttttgtatgtctatgtctcttctcttgtctgggttgaagaatcaagagtctaaacaccagtaacactgaaacccaagcaaagtctttgtggtttccatcttgtaagctcaagggcaacacaaccgtccttggagaggattcttttaattccaattccctctctgtgtgtttgcttttgaggtttccacatatactgctgaacctgacaagaacctggcagtgagaagactgtaatatgatgtatattctttcagcctccccagacaactcggtgaggttgtcagtggaggaggaaggacagcttcacctcccaggcaaggggcagaagactggctgagaaacagtcaatatattctatctttaaccacaacaccgcagaaaggtcagcacacagtattcctgggactggtgtcctccacgcggtcacccttcttaggacatgaagctaaagagaaaggtgggttagggcagtaataagtctagaaagggagtaaaaattcaggatttgccatgccactgtccttttctttcccacctaatgttggtagatatatctttcaaaaaagacttcatctgtaatactacattgttgaaaaagtcacttgtccaaaacgatatataggaaaaggcaaaaatgaaactgagatacaatgctgccaggtagcttaagatagtattatttaggttctatagaaaactaaaagagaatctctaagagtagcagtgagaactgcaacctcttcgatgtaaagggtgttattacacttttgttcttagtgttagagtcagacggagagtgaggtgcatttttttaaagtgaggtgcatatttttaaagctgggtacagatctgtcatgtttgtgtatcctgcttgtataatttaactttcagtatttaatcaggaagcaaattccattttcatatctacaaataacatttctgtaaatgccaaaataaagtttcaaaggttcttcagaatcttcgacatctcctccccttgcccaccacactcccaccaccacaagcgctccaacagctgttatagatgcttatctaagcaggctcattcttcacggttgtttaatttaatagactcaaaaattcaagagatcggaataaccttatagccagagctcttaaaatttactttaaaatagtacttctttaccttctgtgtatcagtttctagtgaacctcgtatactagtgaatgatgaattaagatcaaaatgcatttttacattccttttttttatacttaattggatggcaggcattaccctgtaggcattttcttatttatgaggttggtattactgttcacattttatgaatctgcacaaaagtatagagaggttaaggtgacactgcaggtcatacagcaagtagcagagtcacagaatgaggatgtgaactcaatcctggattcagagactgtgcacttaaatgctacccttccttttgtcccacgaattgagttttattaaatttctaagacagggcatcactggtgggccagtggttaggactccgtgcctccaatgcagggggcaagggttccatccctggttggggagctaagatgccacatgccatgaggtgtggcaagaaaaataaattgtatataaaatttctagaacaatggtacaaactctatcctttataaagtctcaaagaattaatgaaaaaatctagtaagatgagaattaaatggtatatttcagcatgtatatacttttaatgtgaattttaaatgagagtaattgaaaatttgtgccagtattataggcacagagtatactaaggttcatgtccaaattcttaattgcttttaatttgtattggagtataattgcttttcaaggttatgttagtttctgctgtacaacaaaatgaacttaattgcttctatttttatttggctgtgctgggtcttagttgcagcatatgggatctagctctctgtccagggatcaaacccaagccccctgcattgggagcgcagagtcttagccactggaccaccagggaagctcttaactgcttttaaagttacattttagatcaaatatgaagcttaaaaattatacttcagtctttaaaacctttaaagcttacatatatacttctacagaggtatattttacacacaataataaaacactacagatttttaaattatcatctgatggaaccatcatgaaaatcaaggtacagagcatttctatcacccagaaagttccctgatgtcctttaggcagtcaataccctactccctggaggcaaccactgttctgatttctaccactaggagatcaatcttccttgttctagaatttcaggtaaatggaatggattcatacagggtgcatcaggtttctttcagtcagcataaaacgtttcctctttattgttgagtagtattccattattcaatacctggaattgttagtcttttatttagagtcattctcaatgatataaagtggtaactcactgtggctctaatgtgcatttccctgatgactaaagatatcattgttgcttagttgctaagtcatgtctgcctcttttgcgacccgatggacggtagcccgccaggctcctctgtccgtgggagttcccaggcaagaacactggggttggttgccattcccttctccaggggtcttcctgacccgggggtcaaacccgcatctcttgcactggcaggcggatcctttattgctgagccacaggaaagccctggcgactaaagacgccagctttttttcatttgcttactggacacccatatatcttccctccctgtgtgactcttattcacctttgcatccccagagcctggggaaataaaagcttcctgactaggataggttaaaaaataaaaaaatgtagactatttaacaacattgaaaaatatacattaaagtgtaacaatttggcttctgggaatttaactcaaagacgtaaagtggtacataaagaaataattgaaaaaaaaaatttaaaaaaagaaataattggaggaatattaattttagtagtagaagaacactaacaaaatatccaagaataggggactagttaaataaattaccagatatccatactttggaataataagtagcattaatattattatataaatgggggtttccctggtggctcagtggtaaagaatccgcctgccaatgcaggagacaagggtttgatccctgatccaggaagatcccacatgctgcagagcaactaagcctgtgcaccacaactgccgaagcctgcatgctctagagcccgtgctctgcaacaagagaagccatggcagtgagaagcctgcgcacagcagctggagagtagcccccgctctccatgactagagaaaggcctgcacggcagcgaagacccagcactgccataaagaaataaatgaaattattttttaaaagatgctatgctaagtcacttcagtcgtgtccaactctgtgcgaccccatagacggcagcccaccaagctcccccgtccctgggattctccaggcaagaacactggagtgggttgccatttccttctccaatgcatgaaggtgaaaagtaaaagtgaagttgctcagtcgtgtccgaccctcagcgaccccatggactgcagcctaccaggatcctccatccatgggattttccgggcaagagtactggtgtggggtgccattgccttctccgttttaaaagataatagtacagaaataaaatcattatataaatgaagtgatatgtgtaggaagaagaaagtggttttgatttttttaaatataaatttatttattttaattggaggttaattactttacaatattgtattggttttgccatactatttatctttagatgatgatatcaaagttgatcttaaaatttcttccttttgtagtctgtatcttagatattattctaacaaggcacagatattgtttgtacaataaggaaaggggacgccatttaaaaacagaacgtgaaaagagttacacagcaggcctgaactgctctccttgggaaggtgtgtctggaaggcttgtccttggccttgtctgggaacatggatttcagaagagtttctaccttttttacctgataaaagtggttcactgcacccaagctggacaatgtggtgtatcctgaacgaacacctggtttccttctgaaggcccagaacttctggatgtatgagagagggtgcctacatgaccagtcctcaataaaaaccctggcactgcagccctaattctgtcagttcgttgctggaggaatggagtgagttctctgtgactcactgggttaagtctcttggaagctggtgcctggtttcctccagctctgccccacgtatcttttccctttgctgcctttgctttgtacccttcactgtaagtacaactgtatgctgagttcttgagtcctcatccaacctgggagtagtcttagggaatctctgacagatagtatctaagttattcttaaagaggcgaaacataaacctgaaaaaatcttgggcaagttcagtgtctttgtcaattattctctttgataacttgagtattgtaaagaaacagtctaatttttaaatgttcaggttctaccttatataaatgcacagttttaaaagagtcacttacagcaggatgaaaaacattgatggcttggacagaggccttccctttttgtttatacccgaataccaagtcaatccactgacagatgttctgggacacgtagtcagactctagagcctgtcgatggatgaggataaaaagacggggatcgttacgtgcccaaggagggaggttgacgtgattaacccgctcaccgttctgacgcacaccaaaatcgaaacctaaaagagaagattaatatcaatgtttatctccagatcatgcttcctttggcccactgagcagacctgaagagttcacagaaacagctattgtgtgttataaccaggaaaaggagcatccagaggatagtaacactgttgctcacctgctgacttactactcacagagctgcatggattaacactatctatcctaactgaatctgaaatctttcaaatttactcgtccaccacttcatgtcatattgaaaagcagcagaaaatcactgcctgctaattctaatatttcacttatcaaatcttcaaatgcaccaagtgtgaaaacatctcaactgtaatcttgattaaaataaagtgaaggtttttgtataagtatttcagaattattggtgttaacacataataaatttaaggctacttgtgtggtaaatgttagcattctgcaatttaaaaaactcaacaaagtatatacattccaagaatgaacttactctatttatttcatggtaaatctataggtctgttttgatttcatctccactaagcattcccatagacaacaaaattatactaacatattaaaagggttgttctgtgatgtaaataaggtgttatctaattgtctcattagactgctagtgtaaacaaaaatctcagaagtgtttctttaaaaaaattgtcctgggggagtaggagggagcctagagagggaagggatatatgtatgtatacataaaactgattcatgttgtacagcagacactagcacaacattgtaaagcaattatattccagtttagaaaactaaattaaaaaaaaaattatcctaaaggaaatgttacctttgaacagaaattttttgcgctactttttatggaaagaaaatctgatcatcatagcagaacacaaattttaaaaagcctcttaaaagctgattatgctccatatgaaagtaagttgctgtctgactgctttctgatcttgtgaaaacaactggaaggatcttcactaattttggaagtacctggaaatgatatatgatatgatatgaaatataaaccaagagcttatataaaattaacaaggggtgagggtgagggtcacctcaaaaagcccagcagtcatctgacagctgcagggtgacagtgtcaaatggactggctgagcacctccagactctgtgtggcagcttcaagggaggcagcagagattcactgattgaactgattgaacagtagtgatgaggcatgtaagggttgagcaggagaggggtgagcagcagggggctcgatgaactcaaatcgtttctaactttctggggctctggacatgtcagaagggtagacacttcacccagagcaggtacctggaggtacaatgaaaggcctataggaacactcataggaaatcgcaggatgtatgctatggcaagttatcttttccaaaaatggctataataacacttgctgctgtgcatgcttttctagaatctcactactcccctattaagtggcaaagtctatggctccttccttttgaatgtgggcaggccctcatgactacctcccaagcagaatgcactcgaaggccatgctgtggcctccaaggctaggctggaaaaggccatgcagcctctgctcatctctctcgggacactcgtgttaagagcccggagttgccaactaggatgtccgaggctgcatgctgcaagaagtccacaacagtccatgtggagaaaccacacggaaaactacagacactaaagaaggagcagcccgccagcctgatgctgctctgtttccctgatgttcctgctgcagccaatctgaatgtaactgcacaagagaccctgagccaaaaccacaaaaaccacctggctgagctgctcctgaatttctcacctgcaaaaactatcatgggtgacacatttaatgttttgagtcactaagtactggagttacctgttatacagctatagataatgggaacatacatataagaaaccacggacagggagacaagcagcagactgactgaggcaggaaccacaaggcaggtaccccaaattgagggtgttgatatttcactgaggcatttcttacttgggcaacactatgaaacatgctctaagtaattagcagcacaggtttattaatgattatctaaataactccagagaagccagttaatacagtaaaaaattctcaagtaattggccaacactttaacttctctaaagatataattctcaatttcacatattcctaaatgtcacataaaaatatgaaattaagtaatgaaagaaaagacaccttataaaggattaactgatcttacattaaagaacaggtatgattagctgagattgttggtcactggcatcacagaaaatctgattttattttctagtgtcgcttttcattattcagtaactctagtcagagtgttttacttctaacttagtcattactcataaaatcattgacatttggttaatttagattgttctttaataaattcatgacttttaaaaataatcagcatattacaaattttataattggagaagaaaataaagcaatttctgtaacaaaattaaaatatacatgtttacaaatgcttttaatagttaatatttaaaatcctcaagctcatttggaaataaaattacatatctagtaagtaaagccatttctcttatttggggactcaaattttagaacttacaaaagtatttttatttttggaaaattataaagtaagtacaaactctaagaaatttaaattagaaatgatttattgctgtaccttcacggttaactaagaattctggaagatagaaaaactctgggataagttctttcacatcagtcatggactcaaaagatgagaggcgccaagttgtatttgtagaatgaaaagttctgtctggaatgtcaaaactttgatctaaaaataaatacaaataacacacttaagacacaaagacttgattccatttgaaacttgtaataattaatttactttcaatacttcaaaaatattaaaatgattttatttgtccataatgtaaaagaggttatttgtgttcctgaaaataaatattactctatataatttgagactgtattatcgttaaactgtattacgctttcacgtgtaactagataaatttttatcacttgtttaattgattaatattaagtatctgtctgcccaagaagaatgaaagttccataaaaacagatacctgggatatcaaccataccaagcacattctaggaactagataattatttattgaatgaataaatatggaaggaaaattaaaatttaagtaggtaaaaatagtacgtaaaaatagtttttaccccatcaagaaacagaattattcctttacctctaatcagtaagactatttttcttctctctttctggggtgacaggggcactgcttttaaatgttctaactcttagctaaataagtaaaattccctatgaatgaaaataaactaatagttactcttttgttaagctttccttgtgtagactattgacaatcaaggactgagtttcaattctgtcttttctgtcaacagttaatagactttctagcctagaatatgaaatggtatctaaactccagctcttgagaacatcagcagtgtggattcttcttaggcaccacgtttaccatctaatactcccctcaacctgttggaatttgaacatttcttttcacctggagactgttagagactaatttcagcatcaagcaaggcacaatttttttaaaaatatgcttaatcttccccaagcctgacctacttagccaagcaatgttttctatcacttttactactttctcctctcttcagctgaatcagttagaattggctgggcactaaataaaatctggagcttccctggtggctcagatgataaagcatctgcctgcaatgtgggagacccagattcgatccctgggttgggaagatctcctggagaaggaaatggcaacccactccagtattcttgcctggaaaatcccacagatggagaatggtaggctacagtccatggggtcacaaagagtcagacacgactgagtgatttcactttcactttctaaataaaatctgggatgaaataaggtttgtaaatttttttgttgttttttctcagaaattagggagggccacttaaaaaaatactaactcgctcaggataaaaagttattaatctaaatggaatccagaaaaattaaaggcaattctgtgaggctacggtggaatcacaatacagagcgcctacagaactgtggaaacggagaaacacactgaagcttctgtttgaatttttaaattctctgtagtttcttaactttttaaataagtaatactatactataatctagaacatgtatgaactcaagtggcagttgttaacttagcacttttgttccccaggggacatttttggttctcatggctggtgagggatgccacgggcatctagtaggtcaaggccagggatgctgctaagtgacccacagtgcacaggacagtctccattacagagaactatgtagctcagaacgactacagcgccaaagtgagaaaccctggtcgcagagtcggacacgactgaagcgacttagcagcagcagcaaaaataaattaaaatgccatcacaaatcattttaaattaatcagaagaacagaatggggactgagctagtccctgttgtctttttaaaaaatcactcttaaatacacagtgaggataatctagcataatagttgattgagagttttatattaagagattcttggacgacatgaaaaaaaatgaagggcaataacagttctgttatatactgccgttgtcccaaaccacttctgaaatattctttcatttttattattattttggccgtaccacctgacttgcaggatcttagccccctgaccagggattaaatctgtgccctcagcagtgaaagtgtggagtcctaaccactaggactgccagggaattcctgaaatatccttttttattctgactgctactttttaataacagcattcacaaatcagaacacatccagaaagatgagcagaacagtgacaggtttggaaaccagagcaaacatcgcttaaataagtacaaaactatcttatttatttctgcattccttgcagcaggccttgtatatgggaggctcttaactaaggataattagcctagggataaacaagagtgagaggaggaggaggccagggtagtaatattcaaatatttggacagctgtcatatgcaacatttgttttgtgtactgacacacagaagagggacaaatacaagaaagcccctttcacagaccaagtggtctacagaacacaaaatctttcctccaagaggttgcatgcatatgagtgtaaatatatagagaagttcaagaagagtccagtaattgaatggataatgattccacaaaggattctgttccaggaggaacaactacagggctagtaccactgactcactagaaactgacaggatttctcactagaaatcattgttctcactagaaacctacttgcattcaaagcaataaattcacctgtatcgaagccatcttcaggtgtgtgggctgccactgaagattattccctaggtagttactagggtgaaggtggcagtgcaggtctcctaacagccacttactgataacaacttaaaactcccctttaggggccaaagataacaggttatctgaagtcattaagttgaacattttcaaaagtgaattcataactttaaaagggagggtaaagttcttcctatgtgaatgacatcttaacttttaaaaagtgaactgcatttttataaatgtaggaaagttcaatttgaggctgaaatctgagacattatcgagatgatttggcttactgcaagtttctcttttaaaaacttaaatttattggactgcacatgggattttcgatcttcattgcggcatgcagaatcttttagttgaggcatgtgggatctagttagttccctgaccagggatcgaacccaggcctcctgctttaggagggcagagtctcagccactggaccaccagggaagtcccagcaggtatcttacggagacttttgttcagagagtaagcagaattcctttccctacagtttgattagttctaacacactctcaggatgtcagcaggctggtcccccgctgcccagtctggcctcaaggcggtcagcagccgtgctcaccttggtacgctaggaacatcttcgtgaagggcggcatcctgaccaggaagtgcagcacggtgccgctgttggagtaatgcgagccgtagtggtagggctgcaccgggggcacggggtcgtcgtcccgggcgcccctgcggtactcctcctccaggtactgcggacacgggccgggcggcgacagtcagctccgcgtgcagctgcacaggccaccctcagcttctggccatccttctctactgcccttcaggtaccatcctccatagcttgccctcagccttctggagcttctgggggcctcctccttggcgtcccagggagggctggccactcgagaagcatctcaccatctgcacgtttaccctcttagtccctcatagaaaacccacctgttctgcatggtagttctcagccctctggttccccactaatggctcataatgtttaaactgatcaacaaataagaactgccactttcaccagagatgtcttcattttaagagggtttcaagacgtaatgctatgttctttagagaaatgcttctctcacagaggaaatgcaagagaaatgtaaaaactgtatcacattattgaaattctttaccattttatagctgttttgcagtagacttacacagaaataaaaaagaatttggtgatctttcaactactcttatcttcccatcataaagtaagaagctcaaccaaagtattaatatctgtcactattctcatctcctatagtttctgtctctaataaagtcaggtgacagtgagttttctggagtcattgctttttgatttccatagcactgccccatttttagctacacaagaatcaagcagtgacagctgtaagattcctggagggatctttctgaaattttgacataagataacatggtgaatatgagaaaactgcttcaactgctcctatctttatactgtgtgaagaatacaacatatgcctaatgagtttttgtgaatttccaacaggattccattaacattaatttcacagaaatggataattaacttctattttaaactttaaaatccagtattttttgttaacaaacctgtgtacaatttgctgagatgaaaaacaaggggttatggtaaattacaaatatattgatattattatatataacactagggaatataaacaggtccccggacatttttgtgatttttataaggaatatagttatttcatacatttgaatgtaacaatggattatgagcttccaatttacacaacaataagtgtatttattttgggggggaagtgttttcagagaattgaagacagaaaagaatatttaaaatcacataatgatttccagttgcctgtcagttgcacacggaagtgggaaacagaaaaatcaatactatacattgaaaattaggtaaaacacaagtccccaaaccaaaaatccagttttaacttatcaaaatacacaaggaacaactgaacctaccttgtatgtgtccacataacggtcttctttttctttatactgcacagctatgggcttggagagatttctataaaggaagagatgatggaaagcattggaagtatgttaatactgtcaggagcaagttgcctcagatgtttacaagtaaataagtgatcaacaagatacttggcccttggtttagtgcttacacatgctgcttcgccactaacagtcaccgttcacaattataattccataaactgtgaagacagaatttttctaaacagatgcatatcggtattatgaatttttgacttacaagtaacaagaagagcttctccctcctctccctggttcctctacttcctcaaatcgtagctgatgctgcccatggcagatgagtccctggaagtttctgtccccatttcctgaccctacacccagttaggcaatgaagagtgaagggcagtttggccaggagtatgatcatgaggagatgttatgtaactattaggttagtgaaaactgaaaaaaacaacacatgctcacagtgactacgttgagatttggagtgcaagtatgaaataaacattttatctaattcatggatagtgagtgacgctatgtgtctggtggagagaatgtatgtaagcatgtgtatgtctgtgctggtgtttatactgtatcaggaaggcaagaaaactggatgaatctccacttttaaaagctacagagtcaagcagcatgtctgtgtggcccatgaaagagcaagagaacagaagtcaacaaagatggacatgctccgctggctgaggtgccctctggtctggcaccgggatggagccacttggaggttcaacatctggcatgacaactagataaacatgaagatttgctcacatttcagtatgccaaaccaggtctgctgagccagggtggatatatctattttggaggaaaattatttcatagggatattaaaattagcaattagcaaacacattaatttcatttttgaaactttcataatcctaaaaactttgttaaaaagtaaaaacagttttatatcaatagaatagataaaaagtcacaactcaatatagaagaaatcatgatcctggcatgcaactttttctaaacagtataaatagttctttgtgaacacaagtaatgttgtggatggaaaatcagaagttattgatgaggcaaatagaataaaccaaaaatcaaccacaatatatcactacagcatatctggaaaggtatatgttttcctccttatttctatatgtatatcactttaaaataaaaagaaccccccataatatatatttctacagtaccatttttaatgactacaatatagaacaatttactcaaactgagcgttgtacatttaggttgattctaaatttcagttactttaaaaaatgatgtgaggactatcttatgggtaaatatttgcttgaagtgccaggcactgttattagcaatgaactggctcctgcactcatgaagctcacttccaggcataacccttctggtcaagcacatttcctaaagtatttcctaagaaaatactctaagaaaatatttcctaagaaaaaagtcctagaagttaaattgctgaaacagagtatgcaatttctaaagagttctttggttatatacagtcaaactgtctttccgaaagactgcatctctttatatcagtagtgtataaatttaaatgtacattagcagagtacaaaaatgtctaaaagagaaataatgtaccatctgctctttttaaattgacaaatacattaaactgaatctgatttcttgaagttataattaaaatattctaatatagtaagtagtatatttgcagtcaactttttttttaaactaagagaagtgtaactgacatataacgctatattggtttcaggtatccaacataatgattcaatatctgtatattcaaaattacaaaatgatcatcccagtaagtctagtaaacatctgccaccatatatacttacaaaatttttgtgctgtgttagagaacttttaagatttactctcttggcatattattaactatagtcaccatgctctacatcacatccccataacttatttcataacaagaagtttgtactatttgactcccttcacccattttgccacaactcctcccacccccaccccttaatgcttctggcaaccaccaatctgttctctgtatcaatgagcttagctttttgttttgtgtgttttgttttcacttttagagttcatatacaagtgagatcatacttcagttcagttgctcagtcacgtctgactctttgtgaccccatggaccacagcacgccaggcctccctgcccatcaccaactcctggagtttatccaaactcatatccattgagtcggtgatgccatccaaccatctcatcctctgttgtccccttctcctcctgcctccaatctttcccagcatcagggtctcttcaaatgagtcagttctttgcatcaggtggctaaagtattggagtttcagcttcaatatcgtccttccaatgaacactcaggactgacttccctcagggatggactggttggatctccgtgcagtccaagggactctcaagagtcttctccaacaccacagtttaaaagcatcaattcttcagcgctcagctttctttatagtccaactttcccatccacatgactaccggaaaaaccatagccttgactagatggacctttgttaacaaaataatgtctctgctttttaatatgcttaggttggtaataactttccttccaagtagtaagcgtctcttaatttcatggctacagtcaccatctgcagtgattttggagccccccaaaataaagtctctcactgtttccccatctatttgccacgaaatgatgggaccagatgccatgaccttagttttctgaatgttgagctttaagccactttttcactctcttctttcactttcatcaagaagctctttagctctttgctttctgccataaggatggtgtcatctgcatatctgaggttattgatatttctcccagcaatcttgatttcagattgtgcttcatccagcccagcgtttctcatgatgtactctgcgtatgagttaaataagcagggtgacaatatacagccttgatgcactccttcccctatttggaaccagtctgttgttccatgtccagttctaaccgttgcttcctgacctgcatacagatttctcaagaggcaggtcaagtcaggtggcaggtctggcattcccatctctcaaagaattttccaaagtttgtggtgatccacacagtcaaaggctttggcatggtcaataaagcagaaatagatgtttttctggaactctcttgctttttcgataattcaacggatgttggcaatttgatctctggttcctctgccttttctaaaaccagcttgattatctagaagttcacgattcacatactgttgaagcctggcttggagaattttgagcattactttgctagtgtgtgagatgagtgcaattgtgcagtagtttgagcattctttggcactgcctttctttgggattggaatgaaaactgaccttttccagtcctgtggccactgctgagtttccagatttgttggcatattgagtgcaatactatcacagcatcatcttttaggatttgaaatagctcaactggaattccatcacctccactagctttgttcgtagtgatgcttcataaggctcacttgacttggcattccaggatgtctggctctaggtgagtgtaatcataccatcgtgattatccaggtcgtgaagatcttttttgtatagttcttctgtgtattcttgcaacctcttcttaatatcttctgattctggtaggtccataccgtttctgttctttatcgagcccatctttgcatgaaatgttcccttggtatctctaattttcttgaagagatctctagtctttcccatcctattgttttcctctatttctttgcactgatcactgaggaaggctttcttatctctccttgctattctttggaactctgcattcaaatgggtatatctttccttttctccttacttatctgtatggtatttgtctttgtctgactttttcacttagcataacaccctcaggggccattcatgttgtcacaagattccattcttttctttttttaacactaaatagtattcttgcatgtgtgtatgtgtctgtgtggcattttctttttctgctcattcactgatgaacacttaggttgtctctgtatcttggccactataaataatgctgcagtaaacatgagggtgcaggtatcttttagagttagtgttttaattttctctggattaaatatccagaagtagaatggctggatcataggatagttttaatatttgaggagcctccataatgttttccacagtggttgcaccaatttacattcccaggaacagtgtacagtttctctcttctccacgtccttgccacgagttgctatttcttgactttttgataatagtcagagaatgttatttaaaactaaagaaacagaatattcccgcatcacctatggctatttggttactctaaaatgcaactctttcaggaaaggcaggataaaagcttaattcttttccttagctgtcaaatctcaaaagtagagaattgttgccccatccaacagcaaccaataagtttagttttgctttgttttaggggcctttgaacagggaggcctggcgtgctgcgattcatggggtcacaaagagtcagacacaactgagcgactgaactgaactgaactgaaagagtatcattattaacttcagtattttccttttacttaaatgtgtttcaatcagttatggtctttatactttttgatgctctgattgtcctatctttggcagtgagagccacttcaagttggctcctaagtcctttatttttttataattatagtaaaaaaacacacatcactgaacttaccatcgtagccaccctccagtacctagctcaatagtgttaactaatttacactgttgtgcaatagatctttaaagctttttcactttgtaaaactgaaactccacacctactgaccaacaactccctatgtccccatccgccctcttccgccagcccccaacaaacaccatttaactctctgactaccctaaacaacctaagtaagtggaatcacatggtgtttgttttcttgtggctgacttattccatttagcacaatatccccaaggttcttccatgtgacaggacttccctccttcttaatgttaaataatgttccatattacatatgtaccaaatttgccacaactattcatccacagatagacacctgggctgcctccacctcttggctactgtgaataaagctgcaatgaacacgggtatgcaaatatggctcccactcttttgacaagactgtattaattttcttgctctctgacacaacaaaatgtcccaggctcatcttatgtgctttcttctaataaatgtacaagaaatgagaaaataggaaatcactatttggtaacccccagtgaaatcacagactcaagaaataatcatcaatgaaacaaacaagttcaatggggggctgaagccacagatccccctaagcatccttaacagtgggatatcacatgcctcctgatatggggcaagaaaaagttcacatcactacccctagagagtttttgcttaaaaaaaagttgaacctgagtctaagcaagcctttagaagtaatttccagtacctaggaaatacagcagctagaggaaaaagctaaatgctaatgtggaacgggggacattcgacaagataaatgacccttttttccttaaacaagccaatgttaggaataaagagaaaaatacatacataaaaataagggctgttctaagatttatgtctttagagacaaagcaaccaaaggtgatactgagcctgattcaagcaaatcaactatataaaaagacatctttgatataatcaggggacatttaaaaataggctggatattagatgataccatgaaattgtttttattttctttgatatgataatggcactgaagttatgtaacaaaatgttttacttttttcttaagagatgtatactatagaacatacaagtgacataaatgtgtgtgatttgtcttaaggaaaaaaagatgatgcaagtttggcaaaaattttcataattattgagttggggtgatgatcatatgggagtttattacacattcattctgttttttgcatgtttgaaaattttcacaagaagaactttaatgacataaattcagcatgttgacaaagccaataggtgatgatgtcttcagttacctgtagactgatgggtcgctgaggtcaagggtctcactaacatagtctgccagtatgaacgggaacactggatactgcatgagatcattgaaagatcggccggcatgtttgtttaagtgagtcagatactcaaaattagtaatttgcccagtataccacaaatttgtcagagcggtgatattgccatattccagaagattagggaggttattggttagtatactgtggtatacatcatcgcgaacctagaacagaaggagaaaaaaaacagcccagattttatttttagtcttgacactttcctccaaagaatccatgatatcataggcatgttactaatctcaagtccttcaagaaaacactttttgcccaagaacactgactagtggggaattaaaattcaaatctaggtcttcctctaaaggttgtgctatatatatttatttattgaagtacaatattatattagcatcaggtgtacaacatagtgattcaatatttttataaattatactccatttaaatcttataaaatattgactatagtccttgtgctgtacagtatatccttatagtttattttctacatagtagtttgtacttggtaatctctgcctgttctctccccactcataccactagtttgttctcctcatatttgaatctgtttctgttttgttacattcatttacttttggctcttaaccactatgttttgcagctggagaaatcagtaagaaactaagaagtctatacagaaaaatcacttacatacagaccctaagggaaaaaaatgtcaataaaagaaaatgaagtgtcttcatctatataaatgaaacacgctgtagtagaaagagcacggttttctgaattagacagaccaggtcttttttcttgcttaaaccttttgtgctgtagttcccatactgtaatatggggatgctgctgctgctaagtcgcttcagtcgtgtccaactctgtgcaaccccatcgacgatctcctaccaggctcctctgtccctgggattctccaggcaagaacactggagtgggttgccatttccttctccaatgcatgaaagtgaaaagcaaaagtgaagtcgctcagtcgtgtccgacttttagcgacctcatggactgcagcccaccaggctcctccgtccatgggattttccaggcaagagtattagagtggggtgccattgtcttctccaaatatggggatagtaagatttatttcatgagaatgaaataaaatatcctacataaaaacaggatacctcattttcactactgatggaaaactaatatgtgaactctttttttaagagattcagaaaagttctgtcacagaaaaagggtgttctgatttcttctaaagcaattaaatgataattggtaataaatggaaaaaaaatagaggaaccaggcctttctaaaaacaaatttgaattacccctcttaaatgtgtatatgcttcaggcataggaagatgagccaaagatgcggatgattagagatgagactaaaagtgaatgagaagaatgagcttagttatggaacaggcataagatcacagggtatttaagaacctaaacctggaggtctgtttcacaacaatgtgaatatacttaacactactaaactgtatgcatgaaaatggttaagatggcaacttctatgctatttttttaatcagaataaaaaattttttaaaaagttcaaagcaaaaataaaaacctaaacctacagcctaaatctgaaggttgccagatgctgaagctaaggttggtgggagagaatttatgacagtttgcatactaaactctgcaaggaaaaggaaacatttattcattcaacaagtatcgattgtgcacctatataccatgctacagctgtagcacttaacaaaacggtctttacattctgttgggcagacactgttggatgctatgaagttctctagagaaaagaggaaagtcaaggagacaaagggattcctgggggtaggagtgagaaagggttgctgttttaaatacataatcagggaagtctctctgataagaggtcatttgatcagggaacctgaaaaaagtaagggcgtgagtcatgtagatttctaagaggaaaagcattccaggcagcattttagggagctgtaagtgcagaggctttcacgaatcagtgtgcctgctatagtcaaggaaaaggaagtctccacagatggactagagacagtgaaggatagaacagtagaagataaggtcagaaagaataaggaagtgctaggttattcaacactgtaaggtcccggcttttaatggagtgacaaagacagtggtcagagggctctgaggagaggaatggcacaatctgacccattttaactgctgtgttgagagcagtctgaaagaagagggagtgcggaagcagggaggccagtgaggaggctagtgcaatgatttatgcaagagctgacagtgccttagaccaggatggcagcagtggaaacactcagattctgggtatactttgaggggcgaaccaactgaatttactgaaaagagcagatgattaagaggagtcagaataagtaggatgacagaataagaggagtcaaggataaccccaagatttttgaactggccaagcagaaagggtggagttgccatttatggagctggggaaaactggagattttagggggaaaattagaagttcagttttgtccatgttaaatttgagatgccaattagactttaatgcagaagtccagtgaggaaggtttcccccccactttctttaaagaaagaataatcagctgtgtcaaatgctgctgctaagtcaagtaagatggagactaagaaacacaactgtggggtttagcaacattcaggtcactggtgatgctgaccagaggtcatagtggggtggtgaggaagaagtctgactggagcattccaaaagagaatctgaggagaggaactggaggcagcaagcacacacaatttcttccaagaggttttctatcaagacaagcagacacacagtagctgaagcaatgtggtagtcaagaaagggtttgtcaaaaatgaaacctactatcaaggttaaactacttcaggttggttatacattcatttatttacttattacagatacagtcactctggggaataaaaatttaatacagttttggaggacaaaaatagtaaaagatttactttaatcagtactaagaaatagggtaattttcatttgacttcagaaatagttaacgtttaaataagttaaaacttcatttagtcagtatgagtgtaactaaactgattccattatctttttgaaaaagtatatcaatataggcaaatttaccttggtgttatcaaatgctaacaggagtgttctgccatttgttaaaaatatttctacagcattatccctcaactgccaccaacgcttgtgaacttctttaatttcttcatatgtccaggaaaacgatgctggttccaattctccttgaaggctctaaagtcaaaggaaataacatgaaagcatttgctctacatgaaacagaatcattttaattttacattttaaaacactatcaaaatgcaatataaagccttccttctgtggcaaagtggcagataagactctctaaaaatcctcctgctactaaacacttcaaaatgctggataaaatctaaaaaaaaaactgagttaataaacttcatttaaactttattaataggctgtattttccagagaggttttctgtgtataaaactgagcagatagtatggagttcccacatatggcttgtctgcgctcagtttcgctacagtgaacattttgtactcatgtagtacatgtgttacaaatgatgagccacttttgaacagattattcttaactaaagcccacagtttaatcttggtgttgtataggtcaaatgggttttgacaaatgtttaatgacatgtgtccaccattacagtatcatacagaatagtctcgctgctatgaaattcccttctgctccacccagcaccgctgacttttttgttgcctctactgttttcctttttctggaaagtcatatggttggaatcataaagtatgtagacttttcagactgatttcttttagtaagcaaatattattttaaatgtatagctgagcatgcaagaaaggaagggaaaatgatatctctaggagtcaaaaataaagaggaatttgaaaaacagcagtaaggaggaagtgacactttggtctgctctgtgtgtatcttactatgtcccaactaatttttagaaatggaggcaggaaatatattacaaggaaagcaaaatgttttaatgaaaagataatattctcattcttaaaaccaaattcttccctgtttagcttcaacactcaacatactttcaatttaacaaacattaattaagcatctataggcaaggtgcttgtaagtgctttgcatgaaataaatctatacatgataaaaagggggcacaggatatttgcacatgctttggaaaggcaagacagcaaatgtcacacaggaaataagcacaaatgctacaaaagtacagagaaaagaaggatccttcaatttattaaaaagcaagggtctttttagagcttccatttgggtggaaaaggtcatcttttggacccacccaggaaaaaagctgattcatgtatcaactattaaactcttttgttctaaaaagatacatctttaaaaataacataactgtacttttgctagctgggataaatactgtagtaatgctatgtaagtcacgaaataatgcctattcaattttgggggattatatgaaacactttaatgattttttaacatgacttactttacaataatattttatgttttcactccctaatttctttgaatcaaatatgtattaaccagtaaatcatacataatcttatttaaatgcatccttatgaattcctggctttagaacttttgaaacaaagagccttatttttcctgttacaggactctcaaagcagtattttaatggcatgtaaatgaattcaaacaaataaaaagtttattgtaccaaaatgtgacttgagtcttttttgttattttcaattaatataagtatttccagaagaataaaaattatgactactaagctatgtgaacattcagattacttaagttgttaaatcagacaatatttttctttctttttgaaggcaaatgtatgtgacaataaacagggagtggcaagaattctgatgctacagaggatagtagtgagaacgaatggacataaactgaaataatatgaatgcttcagaatctgacccacaatacttgctgctatgaggctcagaacatgagtcagaggggatggcatggtctttttaaaattatcttaaaaactggaattcagacaaatttacacagagtgtgacaagaaatgaattaacagttctacctgctttctggctgtattaaacttatacatgtgggaatttgtctagattcatataaatgcaaatttaaaccgctactcacagaactctcaactgtatcagaagcgttatcttccacaaaatacattccacatttacctgcagaaaataattggctgtgagtttaaaaacgtctgtgcactattatcttatatagttaaaagcacctctagagtcaattggaccgaacttgaatcccagaacccagaaggagttcttaatactcagtaagtatggttcagaggttaaagcgtctgcctgcaatgctggagacctgggttcaatccctgggtcgggaagatcccctggagaaggaaatggcaacccactccaatattcttgcccggagaatcccatggatggaggagcctggtgggctacagcccacagggtcacaaagagttggacacgactgagtgacttcactttcactttcatttttgaatagcatccatgagatcctgggcaagctgcctaaccccactgtgctttagtttccttataaaaagaatcgggtagggagaagactctatttcatagagtcactgtgggaattatatagaatatatgtaaaatgtttattaacagtgtctggtgcttagtgctaaaaaagtgttggctgtttattaccagtattcttcttaggttactagcatattacttttattttgtacacattaactgaattcaagttataaactaaattttctagcaaaagaggaatccttaatcattttactgacttaaacactcaatagggcagaaaagtaatgtgttagtcgctcagtcatgtttgactctttgcgaccccattggctgtagcgcgccaagcttctctgtccatggatttctccaggcaagaatacttgagtgggtagccattcccttctccagaggatcttcctaattcagggaccgaacccacatctcctgcgttgcaggcagattctgtactgtctgagccctgatggagccctaattttcctgcttgataggctgttgttaatgcacatccctccatcacatatccaaacagtgggaacttcctggagctctgcactggatgctggtcaccctgagccctggcatggacagctcaaaaaagggcaccatctccatcctagtgactgtggggctcagccctggcaagcttgaaactctgcatgttagggctttgaggctatataactttagcctactgcagtgactctccaatttgagggtgtgtcagaatcactgctggagaaggaaatggcaacccactccagtgttcttgcctggagaatcccagggacaggggagcctggtgggctgaggtctatggggttgcacagagtcagacacgactgaagcgacttagcagcagcagcagcagcagaatcactgcaaggtatataaaaatgtaatgtctgggccccatccacagagtttcagattcagtggctctgggcaggggcctgagaattcgttttgcttagatgttcctatgtgatctggatgcccctgatttgagaacaattggcccacagcatacaaatcagttctttaaggaaatagagactatgtggtttaacgctattccttcatgtcttgaggaaaaaatgtaactatccacggatagttttggcccttctctcacaagtacagtgaagaatataaattaagaataatctcaaggtggatatatttcatgtgtatagggatatccattaaaacagtaggcatataaacatactaatgattctttactttagaattaaaaattgatacataataaaagaaacaaatttaaaaatgcatacccatgaacaaagttaactttataaaaagtaaaatgccgttcatatgcttttcaaaaaataagactgtcatttcttcacattcatgagtcatatgcgttatgacagtgttaagggaaaataacctatacaatattagagacagtttacctcatttaatggcagtctgttaaaacaatgttttaaattatctaagaataaaataggcacagtgaatatgtataaaaatcttcaaaatgtaacttacctaataacaattcaccagctgtctctctagatggtgcaacgctgatacaccttcgattgactctgtcaaaacatatttaaaattactacgattaaatgttttgaacaacttcagagaataaaagctttattttatctagtagaagatttcagcagagcaggcaagagtttcaaaagcacagaatgtcttgttagagtccacatgaagatattatctcatttctgacattataatagcagagaaaataacagaaacttttagaaaaggtgaataatccctacaccctacgcagaatacaaggactcagttatttaaaagagacttcaatatttcatattttccaggaaataagcaaacattggctcgtgcctctgaacaaacccaggaaagaaatggagcattataggagaaaagggggattcagagtcagaaaaattcttctattctttagtctagtcacttaatcttgactctcagttttttaactataaaatgggcctgataacaacctccactacaaccaagtgacagtcctatcagtagttaccatactgacccacagtcctcaacaatgctatgacacgttagatgtgacttatcttcctcacataacagactaagactgaagtccaatgaaaactccctatcaaaactgtctgatctctttggattttggccattcaactttgccctctcttgagccatgttcaggtcttttctttctttttttttttttttttcaggtcttttcttaaaccactgcattatctaaaataaacatcacataagcactgcaatagactactgaagtctctaacacattcaacaaaagagaagtttcttatggattcaaatttaccttatagactcacttgcagccttgtcttttacagtagaagagaaagaagaatgagttttgtcttcaaataggtaagagagtggtggtttgaccacatctgttgaggaaaagagattacatcatctttgtgtaatgaccaccgttatctactatttatatgttgagtcaagaagtcactattaccttctgatttctgtcgatccctaagcagatacttatttggaatagttaagtaacatctctgtaaacgtctcctctctcgatttggcccttctgttggatccaactgccatgaagttggatagtagatggggtcataccagactgctctacaggtagaaagaaaaggttcaagtggcaatttgaagtacttataacttaaaaaaaatatgtaaaaatttaacacgtaatcaaaactgatccactcaattgaaaaatcccaactattgatataactagacagggatatgcatacacatggctttccaggtggctcagtggtaaagaatctgcctgccaatgcaggagactcaggcgacgcaagtttgatccctgggtcaggtagacaccctggaggaagaaatgggaacccacgccagtattcttgcctggagaaacccatggacagaggagcctggaaggctgcagtccatggggttgcaaagagttggacacaactgagcgaccgagcacaaacacactgcatacacacagtacacaagaataacaacaaaaaaagtatccctctgctctggagtccagtctccttgtctcaaggcaagcaagaaactgctactagttttttgtacctattaaatttttaaaaagatacagcatgactactatatatgctttgtgatatattagacttagcatggtcaactaaagaaaaaaaatcaatttccaaataaatttttttcatttcccattttgcctattatctaatgtaataaacaaaattattcatttttctagtaattacatttctaaaaatgttttaaaataaattaacatttgaaatgaaaggaaatagtttatagaaatagataagagaagtaaattatccttaatcctactaccccaaacataccaaaatattgttagtgattttcattttttaaaattacagttataactcatatacacacatattttcttatatacacattcctatatcctgccttctttattaccattttaagtggctaatattatattgagtgaaaagatcctactgtatttattactattgttatatacttagttgtttccaattcattcactaacataaaaaatgcagagatgaaaatctttgtttattgattttgcatattttgaatattttccttaggacagaatcactaaaatagaataactggaactagaaataaattgcttatagggttcctgatatattatgtcaaagtataccatgctaccaaacctctgatcaagagctaggatacattattcctactgtggagatgagttcctaaaaaaactttttattttaacataaaaggtaaaatacagtatctaaagattttgaaaaactaaattagcctctagcaatattcaatttttcccatctgcttattaattctacttgtcttatgtgaagaatatattcatgtcttttgctcaaactttggggattttaatttttattttcaaactttatgaaattttaaaataataaaaatactaactttgaaatacatgctgaaaataaattttgttgtggctatgcttgttaaatacactggagaaaaattaaagttcaaagccattcatttcttctttgtagcttcttcaattgtgtttgatcttaggaagttatctatcagagttgataaatactctattttcttctgctttgtaaactttttaagtttaatttattcattcacctggaatttgctttagtacatagctcctcaaagtcataatactaatcagttatgttaaccaaattcagagaataatattttaatttccctcttttcactatttgtgatgcatctttttaactgtgttactcaagtcttaactagaaaaagaagtatttcccaactgtcttgtttcagtgatttccctattcttttgcaaagactgtatgttaaaaagaaagccaataaacagatattactctctggaagagctaatgtctctctctctcattattttttctccctcccaagaattaaaaaattctcataggcatattctttaagaggaaataaattacaaatgattaaacaaaaatatttaagctaatgagatagtattatgaatctttattctagagtgaaaataacatcaatataaaacatttgtgcaagaccactgaaagccctcccacattgcccacctgtcatgcgtcagttgttgaataagctcctgccagtgtctgctggcactcagatccactttgtacattcctctgatatgctggatcaccttttttctctcaattccttgggaaagagacactgcctgggtgatatctgcagctattttagatatatcctttgattttgaatccaaacgctgaaagagactaaacagacaagaagcctgtaagttaagcatatgtataggaacattaaatgtatatcaaaacatggtacattaaaactaaaagcatatgcaaaatataatggggctcctaaaagacataacttttagcacacatgaaatcctacctttgctgattattattaactgttttctgccagttggctttattcacaccttcttcagtttcatatttcctttgttcctaaaagatttagataataatatactatataaaacttattatttatcatttaacactggcacagaacccagcaaactaaatttaaaaacaagtaaacaaaggaaaaaaaattgtctcctggagaccagaatattaaaataatcagctacttaaataatgttctaattcccctttgtttccacacactttgggtcacagaaattagggtggaatagttaactagggctgccaaacccaatgggtttgcatagctgcttgcttccttattttgctttttcactaaagaactgagaacttgaggctgatgattcaacttgcttgtcactattaaaaacctttttcttccctgaaagctagtggtaatgaatatggatgaccacagagaataaaatgctccttaaaataagattatttgttttctcataaaaaagcaatataaagtataagaaaattatcatttgaaattcaccatcagtggtactctatagtaaaaaaatctctcaatcattctttagttacagtcaatgggatctcctaagaaagccatttcttttggtttcactgactcacctctttgatcactctaataaggtctgattttgttgaggcactgggagggatgcacttatgaccacataattttaaagcattcataagcagttctgctgtgtctagttcttcttcagtcaattcatctttgtgattatgtatcaactctgacaaatacaaaactaatttggctccatgctttaaaaaaaaaagtaacaatttttttaattaaaaaaaatttaagtcataaagaatttgtatttttacatttaaattctttaacagtaaattaaattttattgctgcatttatttggctgaatctggtttaaataaatcagctaaaaagacattttggggacaactgaagaaattctcaaatgattatgcactgagtatatgatgacattagagtatatgcttggagaaggcaatggcaccccactccagtactctcgcctggaaactcccatggatggaggagcctggaaggctgcagtccatggggtcgctgagggttggacacgactgagcgacttcactttcacttttcactttcatgcattggagaaggaaatggcaacccactccagtgttcttggctggagagtcccagggatgggggagcctggtgggctgccatctatggggtcacacagagtcggacacgactgaagcgacttagcagcagcagcagcagcagcagagtatatgctaattttgttaagtacaatgttgttatggtgacataaaaaagtcttttgaaaacaggttgtgatttatataatttgctttaaaatacctcaggaaaaaaaattatgataaatatgataaaaatactaacaatagttagacctatgagatggtcatatggtattcattaagtattcactagtctatttttcttagtatgtttgaaaatttttattgttaaaggtaaaaaaaagggaagaaaaagaggaaaaaaagaagaaaggaggaatagaagtaataaaggaaagaaggaaaaaagcacacaagcttttggggaaagaattttagagagggtttgctaaaggaatacagaaaataagcttgggatgaaggaaaataattcttagttcttctcatagaaatactgaactggaagggaaactttcctttaaatcttaagctaagagtctctttaatttctgcttgggagaataaacactggagaaaataccagaacaaaaaagtatctttggatccatttgtaagcattcactattccctggggagaacaaaaggtgaaaaactccaaaaccagttaagatgtcagcattcagtatgtgaatatttgggagaagggttggtttaggtcagtcttttatgaacaggccctacagacaaaatgaaaatgttacttaagaaaatgaaaatggtccttcctagtgtacaactaaaacaaactctgattcacgatttcttaagtggatctttttttttttttgagcacacatgcacacttttattatctatgctgggattccaaaagacatggctaccatttttgctttagacgattatttgactttggaaacatgtgaaattttatttttagataagctttgtttataccaattttatgggcctccctggcagctcagacggtaaagatttgcctgcaatgtgggagactagggttcaatccctgggttgagaagatcccctggagaacagaatggcaacccactccagtattcttgcccggagaattcaacggacagaggagcctggggatctatagtacatggagtcacaaagatttggacacgactgagtgactgatatgcacacacgccagttttagtgctttttatttattgtgcagatcaaagcttttttccgttaagtggctctttcatgccagagatattacacctgattgttaagtgtacactatatattatttagacattaactttgccaacaagttaaacatgcataattttattttttaacaatttgcattcatacaaatatcactgtatttggctttacgatatttttaactgtgaatagtcaacaaatggatttggaaactattacattttaggtgatatttaaattcacatgctgaatcacatcatgtcgtttcccaaaagcataagatgaacatatgcaatggtgaaaatagcaaagctcattttaatgcaacattttaaattagtcaggagacagctgttagctgaccaaaagagaaaaaggaacagatgctctgcaagtaaaaggcctgaagagttggcaaataaagaggaatggtaaaggactagaatattttcatatgtgcatcttaaaggtaataatcttgatagaactctaaaaatatttgtttagtattcggtgacattttaaaatcatcttgaaaaactatcagaaatgttttttttttttcattctgaatgtccaaagaaacatgattttcctagacattgaagctgtttctaatagctcattttaacatcttctgatcaatcatttattgactgtagtttctgggactagaaaagttgtttttggagacacacacacatagaaatcttatttcctgctctcaggaaactgatttaaggaattgaatttaaacacaaattcttagaaaataatacaatgtataaaaataaaattttcgatgaagtttcaagaaggaagagttctgaatagactaaaagaaggaatgaagattttgaaggtggtaccatatgatgtgggtgcatggctaaatggacacaacaggcatacagacagacaaaggggaggagagagcgcgttgcgtgctgtggacaacatgaagaaagcagctatcagaaggacaacaagggatatgaagatgttatgagagaaaagatgaggagccacagactggctggagaattaaccaggttcaattgaagagaagcttggagctttaaaaatcaggcagactacagatggaatacagcttgtaggcagttataaaaaaggcataagaagagctctctatactgctgcagaaccactgcaggatatattgttagctgaagaaagtagagtgagaagcgtgtgtatcgttcattaccttttttcctataaagaagtgagagagagaatacatacgcatgcccacatgtgtgtgtatcacaaatttgcttatatctccaaaacaaataaaaaccaaataaggatggtaagctacagggaaagggaaagaatgagggaaggctacagagataaacactagaaactcttcaactgtgctgtatttcacaattttgattttgaaaccaggttgacattttacagatggctcagatggtaaagaatctacctgcaatgtgagagatctgggtttgatccccgggttgggatgatgccctggagaagggaacggcaatccactctagtattcttgcctggaaaaccccatggacagaagagcctggcaggctacagtccatggggttgcaatgagttggacacggactgagcaactaacactttcacacgtttatcagctttgcccactaaaaacgctgagaagaaatgacaatccagtagaaatgaacatacctagtccttagatttgtagtttctaaatactattatttcattaaaaggaaatgggcttcttggggaaaaagtttggttgcaggtctagggaaggaaatatacaagatgagcctgggacattctttgctccagaatggaaggaagttaataaagctgtgctgtgctcagtcgctcagtcgtgtccgactctttgagaccccatacactgtagcctgccaggctcctctgtccatggaattttccagacaggaatactgcagtgggttgccatttcctactctaggggatcaaacctgcatctcctgcctcacttgcactggcaggtggattctttactactgtgccacctgggaagcctcaagttaatcatattaacctgttaaaaaggccatgttaaaagtatacaacaacttgaatctacagacgtgttcatttgaacctgaaagagaaaaataactgcaaagatttgaaactacttataaaatttataaaacaatatctgagttcatgacaacatcttaaatataaaaacaaatacaaaaattagagtttgctagggcaccaagttattattctaaaaacaaacagatgaaagaaacaagcctttatcttgcctttcctacagagactatattttagggtagccaaacagctactaagggaatattcttccctatagaagaatcagagctaacagacgatggtggaatgagaaacacagagaaatcactattttgaaactcctaatgaaaaagtggatcctggcaactatcattaatggttactaaaataattaaggactgagggtgaactttataatggatgaatcaggctgctaccatctcaaaaaagcagagcaaccagatgttttctgcctgttgccatgatataatggaaaatgaagtatttttaaaaaaaacaaaataggaaataaaaaaactggaatctagtcaagcctctagatctagaaccacaaagatacaactaaacaaatccagaatgtgggagagtctatagaacaaatgactcagtttcatcaacaaataatgacagttaaaaaaaaaagattggggacagtaattacaaggattaaaaaaatgtagcacacatcaaacaaatattgtgcgggccttgtttgaatccagaatcaagagaattatccaaaaaattaaaagaaaattgggaaaatttaaacattgggtattagatgataataagtaagtgagccaactcactggagaagactctgatgctgcaaagatggagggcaggagaagagggcgacagatgatgagatggttggatggcatcaccaactcaatggacatgaattggagcaaactctgggagatagtggaggatagggaagcctggtgtagtgcagtccatggggtcacagagagttggacacgacttagcgactgaacaagaagaagaaggaattactgttactatcacagagagggatatgttaaaataaagtcctattagcagagatttagactgaagtatttacaggtaaaataatctgatacctgactttatttcaaagtactacaaagaaaaattaaagtcaggttatggtcatgtggggttcttttttgatttcttccaacttttaagtttatttgaatgttgctataataaatcttccatctgaaccatgagggctttgctagtggaatctgggtcgggaagatcccctggagaaggaaatggctactcactccagtattcttgcctggaaaaatcccatggacagaggagcctggcgggctacagcccttggattccacagagccagacacaactgaagtgatttagcaggaaggataataaatgttaaaaaattaccagatagagtaatttggtcttgaggtggagaggaggctattgtagtgatccaagcattaggggtgaaagcctaaagttgggggtggagcgtgggcagaatatagggaaagacaggactaaataaatgactggccttggtgatacaatagattcaagagaaaacaaagtcaaccacagttgcaatgtttcaagctgaaagcagtaaggataccaccaacagaaacggaaaagtggagaagtgaagctggtagaagagaacttgaaacatcatggttggattcagagggatggcagcttagctgagaataaagcaacgaaagaacagctctttgactatgtcttaattttgcctgttcttgggcttcatatgaatggaatgataaaatgcctgctctttggtgtttggctgtccctttcaatgacaccatgattttgagcttcatccatattgatagtagtcagttcatttgtattgctatataacagtctaatgcataaatataccacagtttagttatacattctcccactgacagatacttgggttatttcccgtttttggctattagtaaaaaggctgtcatagacattctcctactagtctttttatggacatatgctttaatttctcttaggtaaatatctaaaaatggaattttagcatcacaggctaaccagtatatttaatttcataagaaactgctaaacagaatggttacaccacttaaatcctccatctactgcttgctaagtgatacaatttatagattgcaaaacaacttgagtattttgattttaccattccagatgatcaacaaatattttaacttattgtaaatatttttgaaatatgttatatgcactattacttgggccattcagtatagatgtttcatggataatataatgctttaaaaagcctccaaactgttcttaaagaaaacacttcaagatttagtaacatactatgaaggatcttataagaactcgggtatagaacttaaacactggaaaaaggaagggggattaaacagattaaacaaattgactctggtaagtggcatctgaaaaaagacctcagaaaatatttgtttagttagaaaactatattcatggtatttggcatgaaaatacagtttagattcagttcttgatttgtatagttttataatagctgttactcatgaagtattggggtacttacttgcagggatgggctaagacagtctcgcagtatttcctgatgatttggttcacgaactatttcaaaaatttgctttctctcttgtgaagggtgggctggagacaacatatgcacgagcagtctcccaagttgcattcggaaggtttccttacaagaccacaagattttagcccactgctgtttggaactactggttttacctgaagccttaaatcaaaacaggaatgaattaggatcaaatatcttaagcaataatataataaccctaacacagccctaaaaaatcatggaacatgttttattctagaattttcaaacagctgaaattaggaagatatacacatccacacaaacagggttttaaaagagatggatgtgcatcaatatttatagtggcattgttcaaaacagcctaaaggtagaaacaattcaaatacccattgatggatgaatagataaacaagtgcaatatataccaacagaacagtggtttatcagggactgggggagagactaatggggagttactgtttaacgaacacagagtttcagcttccgataacggaaaaattcctagggatggacagtggtaatggttgcacaacaatgtgaatggacttaatatcactgatttgtacatttaaaattgttaaaatagcaaaatttatgttatgtatgagtgagtgatctcgttcggtcgtgttcgactcttcaagaccccatggactgtaggaacctaccaggctcctctgtccatgggattttccaggccagagtactggagtgggttgccatttccttctccagaggctcttcccaacccagggatcaaacccgggtctcccgaattgtaggcagacactttactgtcagaaccatcagggaagtcttattttaccacaatttaaaagggagagataaagaagctaaagtcctaagacacttaaaaaaatagccagggtttggaaattttaaatggccaaaaaaaaaaaaaaaggaaccattaaagaacaacagtaaataagcctacctggattttacaatataaaagagaaggattcataatagaggcttgaattagtactaaaatattgaatattttagtaatattttagctgttgttgtttagttgctaagttgtgtttgactcttttaagaccccatggaccaggtgacgctggtaaagaacctgcctgccaatgcaggagatgtaagggacccaggtttgatccctgacttggcaagatcccttggagaagggcatggaaacccactccagtagtcctgcctggagaatcccatggacagagaagcctggcgagctacagtccataagatcgcagagtcagacataactgaagcaacttagcatgcatatatagactgtaacccattaactttctctgtccatgggattttccaggcaagaatactagagtgggttgccatttcctgctccaaaggatcttcctgacccagggatcgaacccttgcctcctgtactggaaggcaaattctttaccactgagacaccagggaagactgaaatattgagtaaaactgtcacaaattaagaattgtatataaattgaccatcaatatcccttaacaaataaccaaataagctgtgcttttgaaggtggtcccataagggttaacctaatcttgatcaaatatcctttatctggtttaaaaattggaatcagtacattttagagtttattctgttttggaaatggctctccagttactcctagtcctaagggctctttgtgaatgactcagttctaagtggaacctgcagacaaccaaatctagttatactggcagaatcatgatttatgagttctgctagaattagattagcctttgctatctatgagtgtactgaccaatttttcccctatgttcaactataaatgaccacaaaaacctaagtgagttgatgataaatggagcctgatgcttctcagtattctctacataattttgaagatattagacctgtttaagccaacatctgcacttcataattatccataataacaactctagagtaagcagctataaataaagtcctttaaaacaggttattagtttaagctctcatagtaatcatcaaattcctattcttttctgatgctgattttatttaataaattataatattagaaaatagcttttgggttatagacttaaaaaccaatgctgcatgaagtaagtagttctgaaaaaggcaaattagcagtacattttacttcattattaaaattcaagttgtctgagtttcagaaaagtctgtgaaagtgtaagaatatgattttgaaaatgtgtaatacagacacttctactcctgagagagaaggggacgacagaggatgagatggatggcatcatcaactcaacggacatgagtctgagcaagctccgggagttggtgatggatagggaagcctggcgtgatgcagtccatggggtcacagagttgtacatgactaagcaactgaactgaactgaatacagacacataaaacctctactccttctttgtgaatgaacatttcccaagtaactaatttactcacactagatactttgaatccttctaccagatacatgaacatttctttctgaaatggattgaaaacagaaggctgttcatgatgaatattttcttcagaaatttcagtctgggaagctgaggtcctgctttgagttgtactttctggagtactcaaaatgtcaataatatctggattaaattctttgaattaaaagaagaataaaaaattaggcaaatcactaatactgagccattataaatgatagtggcaaaaatattctatgtaattactaattccattgtcacaatataaacacgtaatagctgcatttgacgtaaaaaatacaatatactaaagaaagtgaattcacctaaaacaatgcagaaatttaagcatacatgagtcatgtaatcctaaattaaagctttattttactaatgaagatgaattaaactacaaaattattaaagtcatgaaggttcttgtacaatagaccatgtgatatttacattagatagatgtgaagacctgtttaacaagacatgctatcccattaaatgctgtgcatgtgataacagttgtttcacagtttactctagaggctggttgtcccaaatataaattagaaaagttaaaaaaaaaaatgggtgtcacttgaaattttttagaattttggcttatttgtattgtttttgagtatatttctttgcatagcttttttagtgttttttataggcattaaagttcatacataaacatataaatcattagctcctgtagaagtgcaccttgaaaccacaaagttatagcccaacattatgtatcagaagggctaaaacggaaaactgaaacttctaatgctggtgaagacatgcagaaaactggatcactcatacattgctggtaggaatataaaattatactgccactctagaaaagtctggcagctccttagcaaggacaaaacacacaactatcgttccacctagaaactgcactcttggctatttatcccagaaaagcaaagacctgagttcacacaaaaactttcacacacatctttatagcagctagctctgtttgtaatagccccaaactggaaagcacccagattgtctttcaacaggtaaatgattaaactgtacacccatactatggaatattacttaccaaaaacaaaaagggaacagattattgatacatgtaacatccaggatgactctccagagaattatgctgagtgaaaaaagtcaatcttacacatactgtacagttatatgctgtatgattccatttatttaacattcttgaaatgatgaaaatacagaaatggagaactgattgatagttgccagcgattaatgaaggggtgggtgtgggataaaagtggatgtggctctaaaaggcaacatattcttattcttatagtgatggaggtgttctttttcttgagtgtagtgatgtcaatatctgggtattgatactgaactatagttttacaagatccatggcggggggaaactgggtaaagggcacacaggatctctctgtagtatttcctaacaattgcatgtgaatctatgaccatttcaaagaaaagtataaaaaatatattggaggtactatactattttaaatttcaatggtcagtctaggccagcatttaacatattaaaaaagtagaattttattcaaggatactgggtccaaataaattcttttactagtatggatactaaaaaatttttaatgctgttaaaaaatctgaaatttagtcagttctctttatcgtctgagccaccagggaagcccctctcttaaattatgctcatttcaatatctgagcaagaacacatttattctctagtcctaccttgataaacaatcctgttaactgcaaaaacggtgagcctctgcaacctctgtgcaagctctgtttcagtcgcctggacagggttctcttggctcattctccgttgcatcatcacatgaagttcatcacttgctactgaacgcattttcatcagcagagagtcagtttgagcaaggagaaattttcgaggacctttaagtatataaattaaaacatcaagtgctggagttaacaaggatcaaagaaatcatttctgctataacttttttattatcagacaatgaaaagaactttatttaattcaaaggtaatttatacaaggaaagagagtgattaagagaaagtgatttttccctctttgaagaagtgcaacagtacactctgatttcaaagtcctaaataacaatgctatagcttgtgacatagcttagtaggatagatatcctttggaagaattttagccctctgaaaaactcaatcagaagggtgtatatattcaaacattttcaaataccgtttcacttcttcgtattccaaaataatcaatagatttttttaaagcatatcatgtttagcaagaacattactatttttgggtaattaacattgctgaaatggcaacgcactccagtactcttgcctggaaaatcccatggacggaggagcctggtaggctgcagtccatgcggtctcaaagagtcagacacgactgagcgacttcactttcacttttcactttcatgcattggagaaggaaatggcaacccactccagtgttcttgcctggagaatcccagggacggggagcctggtgggctgccgtctatggggccgcacagagtcggacgtgactgaagtgacttagcagcagcagtaacattgctgaattttataaattatttttgagacgtgtatatagtgacatagtagaaatcagtcaaatacagtgaagaactcagaaaggagagtgttatttcagtaatttattattaaaatgatttgaaacatgcatcacatgtgattcagtcctacaaaaagcatttcctgagaaaggtttcctcaggctgaagaggcaggggtggcttcctgcaccattactgcacctgctccaagaggcaccccgcagggagtggatccaggagaaaagcaggtaactgagtcttgatttagcggactgaagaagggcatcggaagatgaccataggaaccaaaatgacatcttggtaggtgaggaataatggaatccttcattggaattgaacctttttttaaattatgaaagtatatatcaaagtccacaaatagcctctataaacattacttacaataggatttaatgactcatcctgcaagatattgaaatattttactagcattttagattgtccagtattttaggtaatcagtatttttatcagttaatacagcttggtgtgtagagtcacctttgagacaaaaatggagcaaataaaaagagaaattcatatctgggatatattcaaggataacattatcagattacgttagtttaagcaagtcatcctaatctctgatacaacagacctggaagaagtgggtgtgaaaggacacaaagagatgggtgtggggcctccatctagcagtttctaattctaggccttggtggatctgtgacacgaggaagctggactggatgactttcaaggtcttttaccaaattaaaaatttttaggatactataagcctcatatatgtggctggaatgtgaagtcaagtgggccttaggaagcatcactacgaacaagctagtggaggtgatagaattccagttgagctatgaaagatgatgctgtgaaagtactgcactcaatatgccagcaaatctggaaaactcagcagtggccacaggactggaaaaggtcagttttcattccagtccctaagaaaggtaatgcgaaagaatgctcgaactactgcacaactgcactcatctcacacgctagtaaagtaacacttaaaattctccaagccatgcttcagcaatatgtgaaccgtacatttccagatgttcaagctgatgttagaaaaggcagaggaatcagagatcaaattgccaacatctgctggatcatccaaaaagcaagagagttccagaaaaacatctatttttgcttcattgactatgccaaagcctttgactgtgtggatcacaataaactgtgggaaattctgaaagggatgggaataccagaccatctgacctgcctcttgagaaagctatatgcaggtaaggaagcaacagtaagaactggacatggaacaacagactggttccaaataggaaaaggagtatgtcaaggctgtatattgttcccctgcttatttaacttctatgcagagtacatcatgagaaacgctgggctggaggaagcatatgctggcatcaagattgctgggagaaatatcaataacctcagacttgcagatgacaccaccctcatggcagaaagtgaagaagaactaaagagcctcttgatgaaagtgaaagaggagagcaaaaaagttggcttaaagctcaacattcagaaaactaagatcatggcatctggtcccatcacttcctgggaaatagatggggaaagagtggaaacagtgtcagactttattttggggggctccaaaatcactgcgaatgcaatcatgcagccatgaaattaaaagacgcttactccttggaaggaaagttatgaccaacctagacagcacattaaaaagcagagacattactttgccaacaaaggtccatctagtcaaggctatggtttttctagtagtcatgtatggatgtgagagttgggactgtgaagaaagctgagcactgaagaattgatgcttttgaactgtggtgttggagaagactctttagagtcccttggactgcaaggaaatccaaccagtccatcctaaaggagatcagtcctaggtgttcactggagggactgatgttgacgctgaaactccaatactttggccaccttatgtggggtactgactcatttgaaaagagcctgatgctggaaaagattgagggcaggaggaaaaggggacgacagaggatgagatggttggacagcatcaccaacacaatggacaggaaggcctggcatgctgcggttggttcatggggtcgcaaacagtcggacactactgagcgactgaactgaactgaacgttaagataaaatcaaaactccttaacatggcccataagaactggtccacaccatcctgcagcatctcacctggtggcaccatctcatcaaggactacactccagctacatggctgtctttcagttctctgaacaagcttagctttatgctacctcggcacctgcacatcagctgttcattctgcctataatactctaattcctttctcatcccttgtattgaaatcttacttcctcagagacttccctaaccctacatgtaaatcaggttgccctgctctgtatggtctcttatttctatcctctgtatttctcaaccattttatggtagaaaggtaggatctgtgtctttcttaatccttgcatctttaacatttaacacagtgtttggcacatggtaggagctcaagggataactgaatgagaacagcactgaagagaaagctagagaataatttcctcttggaggaaaaccttctcaaacactacagtttaacttctgaaacaaagcaatgttttttaaaatgtgagtgatataagaatataggagagtcaaactactttctatgtataattagtaaaatattatttaaatactcaccagcaacgctctttcgcttttgaaacattgtatgatggggagcagaaggcgactgaagtgaatctgtaaggttttcagagtcatgatttgcagtggtccttataaattccatagcagcctggagaactctaaactgtagagcaacagccatatctaaaaacagaagataccagaatgttttcaagctatgtgattgtaattgagttgacttttatattaatactaatgcaatatcgaaagtgttaataatgttttattagacataaatttcaaaattttgatcatgggttcttgatggtagtaaacattttttaactgtctttaaaagcaactttaaagcaaatttctaaaggatcactataaaaaattcagtggaaaaatactagctcacaaatgtatttcatttcatgtaattgtcttaaaagaataggctttttaatacagaaggcataagtttaaccaaaagtttaaaatgtgaaattctcacatttttatgccccatattcactttcatattcgctaccaaagaaaattaaagggtattattagtcaacataagccttttaattttacttggcaagaaaaatcagcagtttcttttaatgatatgttgccagctactaattacattagggtgtcacttgtaatttttgccacttaaaaaggcttgtttttaaagccagtaaacaaagttaagggtgaacatttagtagaacagtttcctctcctctaacccactctctctatagaagccagagaaagagatgaggttctgataacagttttggctattatacaactgctccccccaatccataaaaattaaatcttactttgggtcctcctgtttttgctattttgaagatatccaagcagtacaataagatcttcaataactctaaaatactgtgagcctgaggaactgcaagcatgaattgtaactgctatgaaaagttgctgtatatcacaagcaagtaatctgtattcattcaaaggaatgctaaagaaaaagaataaataatttaaggcaaaaagaattggtttaaattcctgttctgttagcatgcactcattcatgcattcatttgatatttatccatgcatactctatggcaggtcatatgaactacaggctagggacagataaaaagatagactttgactcgtgtcaaaattcagcttgcagaggaccagacaagtgaacaggtaactataaccagtaaatggtgtaagtgtaacaacagagactaacacaagatactgtgggcatgcaccactaggttcccagcccccaggggttctatgggtatgaagaggtatattctgaggctcctcaaagatggtgactctgaataaattaattgacctctctgaatcccacttatataagtatggccattttacgggttaaaagagacaaagatttgaacatgtattagttacttgcacgtgtgctcagttgctttggtcgtgtccgactctttgctaccctatgaactacagcccgccaggctcctctgcccatggaattctccaagcaaggatactggagggggttgccacgccctcctccagggcatcttcctgactcagggattgaacctacatctcctacatctcctgcactgcaggcagattctttaccactgagccactggggaagcccacactaatcacttataagtacctaataaatatgaattagttacttctgtccctcaatttttaaccttgatcatccacctcagtgtgtgatattaagcttccccactccacgttttcaaaatcaagcaagagttagaaatgataacttttgaggccaatcaatagagtagcatgtagggacattctgtaagcacaatttatttaaaacaacagcagtaacaaacagctgttagaaggagcctgctggtacactttccaagttctaccaatttcatgtactgtactgtaatcaagactagatgttttgaggaaatacgttgtatttctcatctgcccaagacacagaccctaaataagacaggtgtccagtgaaaactgaactaagccgactatgaatcctctcttgtaccaagagagtctccctggcctagtgagtctcccaggcctagagaatcaccgaggataggctctgccttctctgcaaaagtatattaatatttaatgctttaacatgcagtaagatggtgcttctgaagatttgtaacattaatattatgctaataaaaatgttattctgtatatcctaaatgaggacaccaaaggcacaaaacccaaataaaaatacaacctcctaacatatttttctaaattattaatcaatctggtgggcaaccatttgccaatgtacttctgactgaggagacatatgtatacttccggctgattcagttgatatatgacagaaaccaacacaacgttgtaaagcaattattttccaattaaaaataaataaatttaaaaaaaggaaattcagtatggtagttaacagtgggagaaaacagtagtaggaaaagtgggagagtatgttgactgtaaagcagagacttttgaagtgagaagattcagcctcaagttctctatttactagctatatgatccgcaacaagttattatatctctcaaattctcaaatttcctattccagagggggataatactttctataagaccatagtggaaccttggtaaatatatctgaggacaggtagattggttcaggggcttcctaggtggctcacgtggtgagaatctgactgccagtgcaggagatgcacgttcgatccctgggtcaggaaggttcctcagagaaggaaatggcaacccactccaggattcttgcccgggaaatcccatggacagacaggccacagagtcggacaggactgaagtgactgggcacacacacaaatttgttccttgttttcaggttctaaatacctaaatgtaggtcatataaatatctttaaaaaaaaaagaaacaaactttattgaaaacgatagaaaatataccctctcaaatctaatctaatcagatctgaaggaaagaaattctttgaaaatattatggaatatcagatgctttaaggtaacctgttactgaagttttttcccttccaaagttgttaatcagaggtagtttaaaaaaatgatttaaacttacatcttttctaatccattcagggttgctactgtattacataacacgtagagtagaccattatccaacaacatatctgctaccttagaacaagaatttaatatttggagaagaagtaagagagcattatgcaagagcacattgtcgtataaggaggtctctattagtcccagtataggaatgacagaccacttctggaaaagtcccatgttgctcacagcttccaaatcaaatctataataaatgatacacaagagcatgttagaagcaactaaccatgaaataaggaaaaaatgattgcaaaattggccattttgttgatctgattttgagttcttgtatactatttgcctctgtgatggaggttatggtttttccagtggtcatgtatggatgtgagagttggactataaagaaagctgagcactgaagaattgatgcttttgaactgtggtgctggagaagactcttgagagtcccttggactgcaaggagatccaaccagtccattctaaaggagatcagtcctgggtgttctttggaaggaatgatactaaagctgaaactccagtattttggccacctcatgtgaagagctgactcatttcaaaagagcctgatgttgggaaagattgagggcaggaggagaaggggacgacagaggatgagatggttggatggcatcaccaacacaatggacatgggtttgggtgaactccaggagttggtgatggacagggaggcctggcgtgctgcggttcatggggtcacaaagagtcggacacgactgagcgactgaactgaactgaactgaactgatggagggaagttattgacgtgttttacacctcattttccttatctgtcaaatgtgtgcgatgacatctgctctactttcttctcaaggctgttgggagaatcaaatgagatgatgcagaatttctttgaaaaagccaaaagcttatgcaaatgaaaagcaatactgtcaatgctacaattagtaggtcaattccttgatgtttgaactggcctacttgcaaacaagtatcagacacttaacaaaaagatacatttctctctactttatcagacatagaaataacagcttaacatttctgccaaacttttggcttgggagataaatgttctttaagttttgcatttattcattaatccatgagcattacaccagggtcaaagctcaggagtcggtatgccggtttactcttctctcagataaccagcatccctgaggggagttaggagcttgtctatggatcccgcatgtaatctgctgctgagactatgggggccaccttcttctcaggttaactctgtatgccaaaacttaaatatcactttcttttatttgatgcagcatttctttcttttcagtgcctagctagtgaatgaaatgcaaaggaagaagttatagaaagaataccacatggaaaataaaaaactggttcacctggaaaatgacttctagcagattttttctaaaagtgatagaataattttaagagtcagtttaataaattttacatttaagacaaaagatccccaattctggtgaagggaagaatccacttactcttcatcaaggccaatacgtcgcccaaagaacatttcaatgaagcattctaataattcctgagttccccgatgaagatataactggttggctagtaaagaaaacccacgattcttcagaaatttatctttttgttccttggatgctctattaaaatatgcatctaatagctaaggaaaaaaattaagacaatttagataatatattaaaattttatataacactacaaatcacacagtgtactatacctgtagttgtaagttgtttaacttcacgtgtatagaacatacaaagctcaaaaaagagggccacctcttcagcaaaacaaacaaacctaaaactttctctgtgactactatagaatgctaatgatgctctctgtcctggaggtcttgggtagccttagttgaatataagtagaacatttgtgcctaattctgaaaaaagaaagattagtcaacactgtacaatgctttctctcaaagaacaaaaatatatatcctaaacctctatttttctagactttctgacattttatttattctaagcataggcctaaatttttactctttcccagtgtcttaaatgtaacatatatataatcaaagtaattatttttccttccaaactcacttctttcatggttctggtattggagcacagaagcaccatcctcctagactctaaggctgatctcactttgggcttctctcatcctgactgcccacgtgtgattagcacggtctctctcctctattccagggaacgtttctcaagtctgtcagtcctctgacttcccacctccccagatcagggactcaatatctctcccctggatcacagtgcgagcctgtgaacacagtgctcccaactctttcccctgcgatcactccctcacagtggtgataagactattctttcctaaaacacacatctctttactgccctacttaaaaatctttctaagtttatagcataatacaaaatacaccttttgcatgaatcctgcccttgttcacccatcagaattatttgtttttcctatgctcccattcttctttattaagactaccactgaagcatccatcacagaagttcttacattttacttagttgtgtatatgtctctctcccacactggtctataaactcttgaatgcaggggcttattcccttttatatcccacagagcaactagcccagtgttttacacatgagatggaagctatgtaaatactgggttgaactgagactgcctacacaatgtcccacatcaaattaaaacagtgggattctttgaagacccttttaaaggcttgtttcctaatggtaaccattcatatcaaacctttattcactcaataatgtacttaggaccttttatataacaaacacaagatgcctaccctcatggagcttatatttcagagtgggagagtaataaaaactacataaacaaattaaaaaggtaattataagatataaccaggatgttattataaaacaaatgaggagtagggctagacagaagatgattagggaaagtctctctgagaaggtgacatctgaacttaaacctgaagttaagtgtctaacatttgacgataatatactcaggagagacctccaatgatctatgtgttccttgtaagtagcagatttaaaaatcacactgatacaaagccatatatggaggaaggcttaaaattggatgataatacatataaaaattgggataagcagtaataaattatatcagctcatgatgcttaagaataaaataagatttcaggtctatttgaatacatgtattcaaactttaaagtacacatatatttattcttccaaattaaagcaacatatttagtatctgcccttactttaataacttcttgttgtacagcaggtgatgggtggttggcgaggactaaaagcgtatctgcttgaatgagcccgtccatcacatcttccagcataacatcaggcaggatgagaagaactccacttaggagttcatacaacccacagcatataggtaccaagcagtcttcggttacactaaaacagagacccacaaagggtcataaacacaatatcaggggaaaaaagtagtgcatcatgactacctcacgaacagtgatgagcagtagtaattttcacatgtgaaacataagttcataaggtttaaaaatgtttcctgatttaactgtgattaacagatttgccatcaccttttaatcaccagcagtttttagatatatagtctactaaacactagtctgctctacctctgtgatttccaagtgccacctgtgctgtttaaactatttaaacattcagttgctcggctgcactggccacacttcacgtgagcatgcgtcttctgagtggaccccaccagcgaccattcccatcactgtggaaagtctcactgatggtgctgatttggggaacaataataaactgtacaaccttcctaaactgaagagcttttctctaataatcatatggaattaaattaaccataagataatcatttcttctagaactatttatggtttagcctttagttaaatatggaattatcacttagtattacagtaaggagaaaggcatctttgtttgttgttaacatacacgttgtactatgttacagaataaagaggtcacagaataaagagatttctacaagtacagaaattcttcaaagaacagtttaaaaaaagggaggaagtggttgtcatacaaaaacacatgtacctgtgagcacctgtagttcggctgtggtgtggctcataaccgacaggaagagcgaagttttcccagtcgttggagttcctgtcaacaagacttggccaccggccgacagccgcagagccgttctgagaggggaaagctagccccaggctggcaatggtgctgtggctgcgctggaacgaggccagtcccttcaggtaaagaggtcggcgtgggcaggactcgtccccaggactgtcgtcgtctgatctgggctctgctccgaagtctttctgatctatgttgaccgccggaagttccaagactccttttggggcatcactgacagaggcttgggccgaaagggcagcttccgtttcacaaaccatttttgcagactcacagctactgacgaaggcatcttgtttggttttttctagtgtctcggaactcctcagagggctccatttctctggctgggaagcaacgccatcatctacaaaactctgtaacttgtcaatactacaacccaaacttccagtcagtttccatggctttatgtgaggtgaagaagtaggaaatgctgggaggcttctagaacgcagcatactggcagctacctgctttggaacagcactggatgacctgtttcctggtaagagtggacaaggaaacagcactgaaaagtcagctcagtgggatcacttctcttttgtaccatcagtcccaaccacagtaataacccatttatccagtgatgttagtgaacacatacaggataatgactgtagtgactaatgcttaaaatctgtgttaaaactatttttgtttcaactacttttaattaaaaatttcccaaaatacctatctcttgtttccttaataaaatacaatattgactgagtgattcaaagttattggggtgaatggtcctaatgaagtgaaattaagtgaattaagtgaaaatccatttacctcaggctaacagtcactaggatgcagtttgttttagattttcttttttgaagtggacgttttttaaaaaatcttttttgaatttgtttacaaaatgtttctgtcatgtttttctcttttgttggccacaaagcatgcaggatcttagctccttgaccaaggattgaacttgcatcccctgcattgaaaggtgaagtccccagggaagtcccgaggatgcagtttaacacagtggaaagaatgttggctttttgatgagacagttctgttaatcaggtggccctaggtaaataatttaattatatgagtgttcatttcttcaaaggtaaaataagcacataataaatatgtgctgaataaacagcagtgatagccatacttggtgttattattaccaggctaaatgtccctagactgttctctcactcctcatttctgcagtcactttttgctgctattattaagaaataataatattcctcttcttgccacagctctccatttttctgctcctcatattctacacagaaggagatcagaaaaatcactctcatccttagtgtatgggatataaatgaatgctcctgaaggtgtggtctgtgggccaggagcacgggtatcagcaccgctgcgtgactgctggaaatgtacattctcatgctccaccccagacctactgaatcagaatgtagaaggcaggggccaggggtctgtgctttaacaagctttccaggtgatttttttcagcatctaaaacttgaaaagtgctgatatacagtaaataaggactgaatgaactgtttagagctcaggctctgtggcaatagaatagctccatagttcagaagttcttcctagttatttctggattttggctggaggaataaggctgccaaaagggtctgttcaaatgacctggaaaaaatgagggcatgattgtactagaaaaagtttcagaatgatgctcaacgattttaaaaatgacacatcctataaaattccaaataaaactaattaaaacacagccttaaaatattataatacaaggccataagatgtgctagggaataaccgaaactctttgggagagaaagaaaattggagcttaatacccagataccttcacctgctatccatgtctctatcttactggcctatttaataatttgtatcagagctggaggtgggacctagtctttcattggctaatgaaatctatgctgaaaggagaaaagaggcagagaaaacttggggatgatgaaaaagaaaccagaaagataaggaagttgtcatagggagtgggagactggaatttcagaggtgggacgtgttctttgatgatgttcaagatggacacaagcagactggaaggtaaagtagagggaaggtccccagggtcaaggatctcagtgaggctgcggtatggatggccactcacatggtaagtgaagttgtccagaatgagttcagatggaaaggagacagtaagccaaacaaagtttttgaagaaaatgagaaaataaatcagaagcttaatgaaagactgataaacggggacaaagaattccagaatataagagcatgagcctcatctatctcccaagctctcctgagaattacttgctatactgactgtgagttactaatattagaaagcagtaaatggaatccttaaatatattctgtaaagtttagctttccatttatttagttcatcaggttgtgcaaataggcatctatattcagaactaaataggaaagggctacactttcagtatcacttttgtttgtttgtttaccttcaggtggtgaagcagtaaaatctgatgggcttattatcataaatccagggctagtaacagactttcctccactgctagaatgcctcaagtacatgattgactgcactttttcctgaaagatcttgccatctagaatcaaaataaattttgagaaaattttttaaatggataaaacaaaaatataacgttaaaagcaagtcattaaatacaaatatctacaaaaatattcaaagtcaaaaaaatggtatcagttcagttcagtcactcagtcatgtctgactctttgcaaccccatgaattgcagcacaccaggcctccctgaccatcaccatctcccggagttcactcagactcacgtccatcgagtccgtgatgccatccagccatctcatcctcggtcgtccccttctcctcctgcccccaatctctcccagcatcacagtcttttccaatgagtcaactcttcgcatgaggtggccaaagtactggagtttcagctttagcatcattccttccaaagaaatcccagggctgatctccttcagaatggactggttggatctccttgcagtccaagggactctcaagaatcttctgcaccaccacagttcaaacgcatcaattctttggtgctcagccttcttcacagtccaattctcacatacatacatgaccagaggaaaaaccatagccttgactagatggaccttagtcggcaaagtaatgtctctgcttttgaatatactatctcggttggtcataacttttcttccaaggagtaagcgtcttttaatttcatggctgcagtcaccatctgcagtgatttttaagccccaaaaaataaagtctgacactgtttctactgtttccccatctatttcccatgaagtgatgggaccagatgccatgatcttcgttttctgaatgttgagctttaagccaactttttcactctccactttcactttcatcaagaggctttttagctcctcttcactttctgccgtaagggtggtatcatctgcatatctgaggttattgatatttctcccggcaatcttgattccagcttgtgtttcttccagcccagcgtttctcatgatgtactctgcatatactttatactaatgcacattttgatatgtgaggatactctacaatttcttagattcttttgttaactaacattagctacattaacttctattttctttgaattctgactgtactcatagttatttctatagtttaacagctaactgttcattttttatatgctaacatgatctttccaaggatcacgttcatctcttcattacttgagggaaggtctatgtcttctgtttttacacagccccagtatgactccaaaaattaatacatccagcttaatcttcctttctgagcttcatacttctaaattcaactgctcgatttcttaaatgcaacacaaatgcaacaaatctaaatgtgagtcacctttctgccctaaattcactcctgcgttgttctctggttcccatggtagaagtacccgtttcccatgcaggatctgggagccacccttgacctttcctttcctttacccatgtcaagtcagtctccaggttctactgactttgtttctggaactcttctcatccctagcacagtgctataatgcaggcttttatcatccttcacctggattatcatcacagacttctaaatgatatctgggatggacatctggccaccctcaaatcctcatagctaccagcattctctccattaaatggtaagctctgcttaaaaccttccagggctctctgttgcctccttaccactctagataaagtccaagtttctcatctagagcaatctccatgagctgtctccatgcccctctaccagccttcttccttaatgtcagcaacaccaagccatttgctttgcctggaaggcccttcccttcaactcctagtcaactcaactcagagcaggtatctcctccttcaggaaatagccccttgcaatgcattgctatgctttgcacatgttatacttacctgtttatgcctctcttccctttactagactgtaagaccacacacatttaactcatctttgcaactaccctgtgctaccagaatcttgacattactttattcactagatgtttgctgaacctaatacaaagtcatgctgtataatttcatttggctttttactgtagctgtatcattttattcactatcacatggcttaaaatggctgtttacaatcagtttccctctctaaatttactatttagctttctcacatgtatactctggcttgctttcttaccacatcacattttccgagttctttaaaaaatctgattccattttttaaaaaaatactgagattactctttcttgttccatcctttaaatagtattaccaataattctatccttagcttcctttttccttctttctcccaacacttttcttcagtggtctcatctgttccctgagcttcaactcacttctatgcacattgttcctctatgctgaattttattgtaataacttatactggttggctcaaaacaaacacaacaaaacaaaatccttcaattactcctgagaagaacacaggttcaagttctctgctcttatattcaaggactcatttaatatgattttgtgtgtggttgaatacatgatgatcccaaactacatttatgatattatttctctactcctttacaaatctcctatattaggtaaaattcactattctttattttctctattttgccttgctttaagtcactctcttcacctgatagtaattctctaatctattaatacctatcaaaattcttcaatgcccatggcagattattaatctattaaatctctctccacatctgaagatgaaaccctaactctcctgaaatcaaatcagttcttcttttgtatctatgaggtacttgccagatattatttattgtaattatttcagcacatacatttaccctcacctcttggtttttaagttctctgaaggcagagactatgtctagttcactgtatggccttctgtcctgtcccaattccagcgtgtaactgagcagtttctagcacagagttcattcaatgaatatgaagcaaacatgatcaaatgggaagaaaaaaacgaaagtggaaatagccaagatctaaaaaaaatgattatacctacctatgtgcaaagaaaaatagaagtttgtggggttgtgacaaacataagtattagtaggaggatgaaccgctaacaggaaattgaagataatcgtcaataattccaaatctggaggagatccaaggacttctgctgtaattttcacaaatgatttacaaacctctcggggcatggatataagctgcccctctttgtgttcctggaaaaaaaaacaactctccttaatttaaaaagaactgtcaacttaactaatatttctcatttaagcaagataattttgtttaagatagaactgtgttggtttcctgctctagactagatatttaccataaaactgagttgctatttctctattcaagcaatcttgttattaagatgtattaaaaccatggccccatataaatgttagctactactagtactattatcactactgcttctgctactactgatttggttcaaacgagaaaatttctgatagacaaaactggttacatgaatagagtgtgttccagtctacaaagttattactcgcagcagctcagagaggttttatccttcatttctacaatatgaaggcctgaagtgattgtatatctaacttaaaccacatagaaaacatctcagtagtgcagcataagtcacactcagacctttgatctccttctactgcaccatctactgccttgaataatcagacctggcagaatgctacataattaccaaaaataaagacagatataaataaattacttatatattccaactctacctccccagtgcatagcagctggcttctagatcaaggctagatctttcctctctgtccaaatacacagtatacctctacatccactcttcttcatatattcttttgaactgctgaatcagaaaacttaaaatctagatattaactttaacacaggttagtttgactacctcagatatacggagagaacaggagtctacaaaagtcagtcaagatctcacaatggccaagtcaagtcaagaacacagatctcccaacttgcaattcagtgttatttctgccacaaccatctttttttttttctaaatcgtacccctgtgacttcccagggctcctggttaccacttcaatcactcattcttgagttcagcccagtctaagcttcttcaactttgccctctccaatgactccttacaaatagtcactggtatcctgctgctgctgctgctgctgctaagtcgcttcagtcgtgtccgactctgtgcgaccccatacacggcagcccaccaggctcccccgtccctgggatcctacctcattaaaaaaaagaaacaaaaaacccttaaattgacctattgtgaagcttttgttaagtctgtttctctttccttttgctgttggacttcctaataatcatgtattctcactacctccaatgatccaccacacatgcttaaagttcccagaaatctgggtcttgccttcttcactctgatgaaatattgtaagctattaagaatttccaagctgacggcattctctctgtccacattttctgggaactttctacctcatttggctctacagaccacccctgtctgggcaggttctcctctctctgcccattttctttacctctttcacagaaaaaaatctcattggaagttccacagaatttcagtccatggtactgagttattaaacaaaaatcactgcagaaaatacctccagaagtaaagttacataaggagtacctgcaaaacctggcaggtcagtagaaagtgatgaactactcgagctttcaataactgcttaatattaaacatctgctgctggtggtctgctctgatgaggacttctagggctgccagcagagcttcccaaacaccgtgctgagaaaacaaacatatgcacagggttactgaaaaacatggctcatgctttttagaagacacacaatacatcagtttaacactgtgtaaacactcacaatttgtcaaagactaaatctgcctgaaaaagcaaatctaaagatttattccaagattattattttttttgacaataggtcatttctaaaaatttatgttcaatgcaatgctgcattaggggctttaggacactaacctttctgtggcattaaatgatgcacagtattttcaaaagatgaattatcttggggaacttatttaccatttactacagagaaacacattatccatataaattgtttgcaaataatttattttcaaagagcattattaaaaacatatagacttcaatgctaatttgtatactcagcatttaatcaaatacttttagaaaaaaaatttactaaactgaaaatatttactgacagtgtagaaattctgaattttggattaacttacttttaagtccaaattatagaatcctccacacaattactaaacatgcagtttaaaactataattagcatcctcttaaggtactttaaaatgcttctcccatagtattcacaataataatgaaaaagaaatcttacatagataatcactactgaaaataatcttcacctcattttattacttcaaataatctttcaataaagctatcaacaaaaagcaaaattaacaggtttgggttgtaggtttgctgtttttcctgccattacatgatggaaatgaataatgaaaaggccaaggaattgatagacttaatcatactattctaaccaaggcctctctcttaataggacaggatcaagatgccctgaaagaaaaaggcatatgaaaatttgaagacaaagcagctcaaatatgaaaacctgattcaggcctgaaaaataatactaaaatagaatagtgcctaagcaaaccaacaaccagacaaccaacaaacaaaaaccagaacaactcagctaaaaaagcaattagaaaattaaaaaataaaagaaagaaaattttatctcaaatccatagaagtatccatgcatatcagttttgaatttgaccaaaaaatgctttgcttgttagtcaaacttttttaatgctcaaattagcatcgtcttttgaaatactaaaatagctgtcgattttcagttaagattccaactcataatccacaattgagaggtttctttactacatgtttacagtcattccacctttggtccagtttgtttgcatctactatcactatgtgcgttagctttctctccttgcaacatcatgtgtatttttatacatacgtaaatttgttgttattgattagttgctaagtgctgtccaactctttgtgaccccgtggactgtagcccatcaggcccctctgtccagaggatttcacaggcaaaaatactggagtgggttgtcatttccttctccaggggatattgctgatgcaggggttggacctgtgtctcctgcactggcaggcagactttttactgctgagccaacagagaagttcacaaatgtatacatattatatgtgaatgtacatggagatgtgcattctgaaattctgaaagagaatttattcagaatgagaagtcacaatgaaataaaagttttaaaaactgacaaataccataaaatctagaaaaagctagctgcttgacacagctccataatacttcctgctgtgttttgtaggagcatattcttggactgcttcttcatataacaataattcggtaatataattttatacagggagaacagaataatctgtctctcctctaacatatttggtcaaaatttatttttgttaatgatagattagaaaagttttctttagcttcataactcgttattgatagtaagtctggggtgactgttgccaaatttggaagtaaccaaatatttttaaattgtaaaggtatacacattgaattggtcttcagttacatttgatgataatggtgttacactctaaataactctagacaatctacagtctacattagaactgaggaggctctacgaaccaaaccatgaagactatactttagctagggcagaaggaaaaagccccacattcactttccttgctgggtccttgtgaagaccacacaatccatcatccagttgttaagacttcctagatctaagatcaaagcatgctccttagcttgtgcctaccatgaagccaagacttcacagccttgctccacaaacggatacagctctgacttctggacaacatggctcccctactcagaagtgtgtctgtttccctctccttgactcaactccacacacttttagtaggatttcctttcagagtttatggtaaatgcaagtctccaattgattcaagttttccagcctgaatactgctactacctgcagtcaaagttttgatcctgattctctagatcaacattatctatggctgtctaaaaccttgcacagaaattaatctctagatctccatttacaattaatactacactgaagcagtaaatttgttttgtttttgagaagactgattagatgaatatttaaaagtacatgtttctctgtgcagcaaagaaaacagtcaacagagtgaaaaggcaatatacaaaataggagaaaacacttacaaaccatatatgagatgagatgagggattagtatgtaaaatatatgactcttacaactcattaacagaaaatcaaataactcaattaaaaaatagtcatatgacctgaatggacatctctctaaagaacatatacaaagggtcaataagtatatgaaaagatgctcttcatcaaccaatcatcagggaaatgcaaatcaaaactacaagttattattattacctcatatcctacagaatagacactatcaaaaaataacaattgttggtaagcaggtaaagaacttggatcctttgcacattgctggtaggactgtaaaatggtgcctctcttacagaaaatagtatggtacagtaattctatttttaaaaaattagaattactatatgacttagcaatcctatttttgcatatatctaaaataactgaaaacaggatctcagagggatctctgcacattcacgttcacggcagcataattcacaatagccaaaatgtggaagcaacctaagtgtccatgacagatgaacaaataaagaacatgtggaaaacacatacaatggaacagtgtaagaaagaaaacagtcttgtcatatgttataacacagataacctttgaggacataatgctaagtcaaataagccaatcataaaaaggcaaacactgaatgattccacttggattaaatatctaatacaatcaaaccaaagaaacagaatgtggaatggtggctgccagggacttgggggaagggaaacagggagctgttgtctactgagtcgagcagtcaaaccaaatgaaaaggttctagagatatgccacatgacaaagcgtatatggttggtgctgcacatgtaaaaattgctaagagggtaaattcataacaaatgctttttaaccacataaagtacatgcctccgctttattccatatcttccagtctagcaatagttcctctaacagtttaacatcctggattatagcattagactctacatccaacttaaattctccattctcattgatatgaataatatcttcaccacagcaaccttcaagaagggtctacggaaaaacagcattaatacaagatgcatcaataatcaatccaaaaattcaacagaaagatgaagctttcttagcacttagcactcataacattaaattcaaaagaaaactactgaatagctcagcatttcacaaggtatctttaccttgttttgtaaaacaattcaagtaataagaaaacccccaaatttcaaatatttataaatgactatttagtttcaaatacggagtaaaataaactacatcctatttttaaaattcaatgaatctgttgagttttaaactttttctaagaagtattcatgccacaagtgtatggatcttgctcattttaagagttggagtctgggggcatgggaacaggcattggtcttttgccttaatactagaaccctcggaaagaaatactttcacaacattaccaagtgcttttaattagaaagatatttaaatatgtgattacagttggatcaaaataaaaagctaatacagctttaagatcctaactctatagcagcattgcctccgaagaactgcacagcactaggtgtctggagaactgggttcacccccatacccgtgggtgctgaagcaagcagcagtctgtgtatgagtcactatcaccagtctacagaatgaggggccagcccaggaggtatcactggcttatcaagatctaaaaaccttaattttttcttatatttttctaaaatgttttagaggaaatgaaaatgtaattatttaaatgacaaaaaacccagaagagccttcatttgattaaatacatattatcgagtttccttaattttcttcaggaataaatgaaacacgaaactctattactaagagacttaatgaagaggtaagtatcactgcatacgaaaccctgagaataagttttatgagaacgtaccttcaaaatgtgaaagccaacaatgcatttttgttttatcaacacctgatgaatcatggaaagtccattacagttttctaactcatgtattctctgttggttgtatttaattaatgagagtataactctcaatgctaacgcttgagtttcttcacagctactgagttccacaacctaaaacaaagtagataaattttttctaatttgtcgagattaaaaatttaacatgtggggttatctttcattacataataccaacctatcagtctcatttgaaagttttattttttattgctgacactgtttataattacttaagaattttaaacaaataaaaccaataagttccatgctcttatgtctcaaatatgctataaattaactaaaataacattgataaccttagaagtcagtggcattttattggtgatctgaagtgtcagcaaaatgcttcatatttttgatgcttagtcaacaaacaggctctatgttctatgctatggaagataaaatgatagatagactgcttagactgtaaataggcagactacctacctcctgtggggcctgatgataggacaaaacataagacagaataaaaactaacgattgtgacttgtacttcaattcccccaatgctttctgacaactactatatgtaagaaacaaacatcctattatgatttgaaaaagcaaagaagagtgagacaatatgaatgcatgagagcataaaaactatttctgacgcccccctgctcaggatgggaagcctatgtgaagatcactgggagagagagcaaaaccacaggaagcagggatcaacaggtgtccaggtgtgggacgcagtcagaagagagatgaagactggattcatagtacatttaggaggctgcaggttgcctatctggctagatgcagcagattaagctcaaaaggtaggctatacctgtaagggttttaaggaaactgaattttacttttgtaggggaggaaggatataataataactaacattgatatgtctcttagcacaaaaagtaatcaaaggtgcccccactaaagaaaaaaaaaagggagacatatgacaatggtgcagaagttacacttaagcataaaatttggaagtgaaaaagatcagggttgctttaattaaacaaggatttggaccacaaggaagtataaatgattcgtactgaagcgagaccatttgtaccctctatttggattttagcagtccttgaaacagtcatgtacaccactgtctactccacctcaggaaaaagattgttccagcccatagatggctaaacacaacagataaataaacgtaattctctaaaacagtatccatggcgttgagtcaaactttttgactttctccttctctttcaaaaaatttcaatcccaaataagttatttttgtacttgttgacctttatttttccccaagcatctggaagtttcaagggaaaaacaagtttcacaattcttcacatttcttttctacttttattatagcatttttttttctcattggcaatattaaatcttatacacttaatacttaatggttcgaattacatttctggatacagaaaactctgacatcttcataaattatttacttatttacttaactgcaccacatggcatgcaggattcttagttccctgaccagggatcgaacccatgcccttggcattgggagtggagtctcaaccacaagaagtctaaggaagtcccaaatctccataaattaaaaagaaattttaacaaaaaaattactgtggcagaaactttgatgacattctaaacaatgtgtgcttttttaatcttgtaagtttaatacaattgatacatagcattactgttaatcaaaaaggaatcctaaaagttatcaataaaaaagaagtagtttatctttaaataaaattacaatcagtgattcttaccctagcaaagagaaagacaaatataccagttccaccaatctcatgcaaaatgccttgaagggttttacattcagtgggctggagattctttagatgatgaggttctagtaagatactgtgaacttcttttgagctgaagggtctttgagagagttgggttttcatttgacctttaagtctaataactggctcatagatggtatactgagcaggacagtaagttgtatatacaactgaaagactttcctgaaacacaaataatttccttcaataactaaacagtttaaaaagtacattatcaactagcaaatggattatttcaaagtgaaaagacaaggaaaaaatctttttctttgttttaataaagacagtcactgcacacaacaaagatggacatgaaaagcaagacagctctccacaaagaaaaagatccatttcatttaggagtggtcaatacatgtaaaccatatgaaggctgagaaaaattccagctttgatcttttgagaataaacatgaaattatacctatcaccaataacaaatccctaccatactcatgtcctatgaactgttctatgcatttataaatagtaatcaatccttacaaccctatgagatggaactctgggtcaacgtattcaaatgtattttggtactgaatttgctcatgggctgcctactcatttaaatatgactctataaactagagcattctttccactagaataaaactccaaactatcagcatacctaacaaactgagtatttctcccaagcaaagggtagttttgattaggttctagctctctgtcaaatattctatcaattactttaaaaattatggtaaactttaaaaacaaaatgtactctgagatgctctcaatgaaggccgctacagaagatcacacttatggaaaatcgtgtagcagctgggggctttgggcttcgatcattttcaacccactgtgattcgagtatagtttcattagacatcatctagcacatctgcataccaaccaaactgatgacacagtctattgtatatgattatgctgggtaaaacaaaatcataaatctacagtagttttcattaaaaatctgataaaatgcctgattatctgaaacaagtcccatctgataccaacaccttgctaggagggcaccatgtctgtctgacctcttactcataaccccaaaacaccaagctaaaaaagtcaggcttaaaaaaaatatgctttcaaaaaagatttttcacataaaacctgtataatttttacttgcgataatttctgttgaattttatgaattataacctctatttttttcaggcaaaataaaaggttaagaatacatattttttgtgaaaaaaggattagccaaaaaccggagagctaaaattatctgaacaaacatccattgtatgagctccttggtcttcctaaagcagagatactcagtgtgtgggccccaaccagcagcagcaacatcacctcagaagttgttaaaaatgcaaactcttgggccacacttcaggtctactgaagcgatctatgtttcggcaagtccgctgggtgattctggctggatactacccatgcaccgtagaacatttacaatctctggcccccgttcaataacagtggacagccaaaatgcccctaagctccatttctgaatactccttacggagaaaaagattgtgggtctaacaccagatctttagttaaattctatatccattttaccacagatacttaataccactcaagacttacatgttttagactatgaaggatcagtttcctagttgctataatgaaaagtatccatcacaagctcctaaactgtgtattagtataacactatattagaataatgtataaaatgcaatcaagagtctcatataagcagaattagcaataatttgaaagcaaaattcctagttgctattgatattaaagaataaagtaataacctccaattaaaataaacttatattaaaaaaagaaagaaaaaaaagaatattctaaaatctgaatatgtataaagttaatacaaataaaaattagcacttatttttaagtatggaaaggaaatataataagcaatttttaaggctaacatgtattatatttttattatatcataaaagtttttcttgaatgattaacaacaggtataacctaaactactacttagtatagaaatatagttccaaggaaaagcagatgaaaatttgaaacctgaaaacaaattttgaggaagtcaaagtattttaattaaaatgaaaaacatttgtaagtaaagaaaatgttgagaaacagaaaagaaaaactctaaaaatcaaatcacagctaattcaccttcaataaacatacataacagttactaaaaagttaaaacctataaaatgaaaacttacaattaaaagaccaatgtccacatctttgttggtcataaaaagttctctgatttgttcacattgcaaaatttctttattaatgtacttggagtagtcattcacaggcttgccatatttacatggcattatggacgtatggttgggtccacaagcatatagataaaatgcctcttgcgagccaatcttagcccctgaatagcaaaaaaaaaaaaaaaaagttccttatttaaaatacgccagaatttttcataaaaacaagaaatcagaggagtttttttgctagattctttagttgttcactgtatctttcaaaattaaagcctcaattttcaaattggtataatgagcaagaaatctatagcaactctagatgtaaaatgaattaatatacatatatatgtatatatataaaacattatctgtaaaactcttggtaaaataaagtaataatatttatatttgctccttaagctaaaaataggggattttttggttttgtcttttttttttttgcaaatggaaattttatctcagtgaattccttttaaaaacaacatatggattggtatcattagtccttcatccatccatctatctattcaataaacactgtctagatgctattatgtgccaggttgagtaatacatttttaaaaatcatgtatttcttcttcacctaaaatttggtatttttatgtaatatactaaaattataagtaagagagacagccagtctaactgcacctgctataatgcattttccaggattataaagtgatttaataaaggcttctctttggcaggcgggtgggggaggatatgagctttgcattaaatatatgtatcaattgtctaagaaccacttatcttgaaatctaggaaatacagtgcttattaagtacaagtgaaggaacagggataaacactttatccaggacaattaacttagtttaatacttgttaactgaaggaaaaatctgaaaatgctctgaaggggaaaaatataccattgaagaggagtaaatttcccaggccccattttccagccaattgcaaacattcttcttgggatgataaacaatggccgatcatgcaaaatgttttattgctgtcagatgacaaactcgtttttcttggaagcataaaatccaaagtaacatcaggcttcctacattaaaaacaaagttaaatcaattacttcagggatttttagagtgttaatgtttaataacacaaaattcttgaacaagttttttggctcagtattggataattggtaatgggagagggagaaggactgattctcttgtctcttggtccaaggtgctggtggtccacaatcccccagaggagaggaagggacagagatgcctgatgatccacaccaggccatgggaagtactaccggacatttgtggcaagtttcctttgccacttgacttctgcatattcgccttcccggtttaaaatacaaatctaccacctctccctgattttaccagaaagtctcccatctcagtacacaattcctaaaacctcatgccctcttcaaaaactaatcaggaagagtatcacttcttcaggttttgctctgacaaggcactgaaatgccactgcttttttgcattttctgtgttttcagcagtaaatattgcagagcctttgattaatctcttgcttttcttcacggataaaagttataggaatcctcacaaaaggcaaagtaggaaaaggtaaatgaatgctttctcctagagacacacacgatgggagaacttcatcttcttgtttaaattgcagagtgccaagctcttccctcattctagactgttttaaactctcttaagataatgaaggtagcctgtaaagacaaagtctgtgaataagacaaagcacttagaataagctaataatgagaaattctattttggtatatatttattttaaaaatttcccttaaggctttctatttcatacttaatagctatttagctatttaaataggaatattattaacaaaggaaagatgtgagctaagctttttactgaagttcaattgacatacaacattatagtgagataacttctattactgtgcaggcatctctttcttgaaccaactaaatggctgtaactgaaacagtactgccacctagtggcattatgacttaattcagttcttaagggtaaagaaaacctgtaaaaccaatgcaagaggagttcaacaaacactaaaataattcatactatctactatgtgccatatattcctaccagatttgtgttctgttcatcaaataaaaattagtagaaagcattaacaattttttttcagtgtcgttacatcttgaaatgtattacttgtagaaataattgtattagttctgagagtgatatagtgccaaatttaaaccaaaggaataatatatttcttatattccttggtcacttgctcaatgctatattactagataaaatcattaacttacaccaaatggtaaattcaaagtaatgttcaaacaagtgggtgagtaaaaattgagtgctaggattttaacttcagaaccggccacggagaacatctagacactcattctgaacatatgtaacaattagtttatgattcctgtgtctgtcagcctgcctgactcaccaaaaggctgtagggttagtaaagcatgtatgtggatggtcagttgtgtccaactttttgtgaccccatggactgttgcctgctgggctcctctgtccatgggattctccaggcaagaatactggagtgggttgccatttcctcctccaggggatcttcttcctgcataccctgcactggcaggcagattctttacaccgagtcacctgggaagcccattaaagagagcagagggttttaaagcagggctctatccaggcttagagtccaggttgagtttgagccaccctcctcactgcaagcagcattttgggtttctgctgcctcacatggaggggcagaggcatctcttactttgttgtgctgctagaaggactaaatgaggtcatctgtgcaaagtgcttactacactgcctggtaggtgctgagagttccagaaatgaggagcgtgtgcagcagactctcacagtcccatccccaatcccaaccaatttaactcaaggttctggaaacatatactgatatgccacagctcccttcaggcttaggcagttgtgaagacagaacttctcagagaatattttctttggattatagaaattgagattcaatgacatattttcatgtactttttaaaatgaataaactgtttcctttggcagacactgcggactggctaccccaaagctgttcacaagcctcttctcccagccttcctgaggctgcaaggctgtaagcagtcgactcctgcagcctccacagcagagctggcaggcacacaggcttcccttctttctcacaggccctttcctctgcctggctcactcttcctccctcttgttcatgcaaaactccatctccttccttcagatctcagcttaaataatctgtttctagctaggtcttccctgatgcccttctcttaagcaggaaaccaggtattttctgtctcgggacccatttgttatcttcacagtacttgtcatgatttatacacactcgtttaattgtgtaccttgctgtctgcttcttcactgaactatgagcccccaaaaggcagggaacatgtctgtcttgtttaccaagctcccaggcttaatattgcacgtgctcagcacatagcaattcctcattaaatactggatgaacaaatgaatgaaaaaatcaattactttgtgctaagggtatatgttatctctatgatctaatctactctgagagactttagagagaactggacgataaagtatataaagcaccttgcaaaaggtctagccgcctcatcccggattcaaagctgctgtcacacagcatcaccatgcccattcatttttctttctcatcattcaacttagatattccttccaaccagctcagtcctctcctgtgttatactagtttccagttctgtattccctttcatgctatttcattcaacaaaatactttccaactcttataaatccaagtaccttacaactctctttgagttaaactttatattaagatatttcacaagatatttcttattattttgactcacagttctcctggtttgtaaaaatcaaatagtactataaccaaacctatcacctggtatatttctaggtttctatcttaatctatcacctgatatactagcttatatttttttctagtcattctaatttcttttgaaactctgatttaattttggtattagttttattagccacttaatttaaataattccttatggatttatcttgtaatatatgggcttgatgcactaaatttataaatgtctaaatgttcagatttgtacatggtcccccaaatccaaatattaatcttaaatggtttcttctaaggcaaattaattttgtatgtaagtgataaaaagaaaaacagaaaaatatctcacttgacagattcctattaaaatatagtaaatttcatctatagtccttttgtaatttgtttcagaagctggaacagaataattaaaattacaactgagattattaagtatttactaaaagtgtttcatacctctgtccagagatccatatggagagtttcccatggatattctttttcccttggggctgctgtaagtaagtgagtactaaatgttgccatttgcttgggaggaaaatattctcctgtgattcaacctgtgctagtaacacaacttttgtatcatcgtttgaatccatgcagacactgaacaaaaagagtaaaggtacaggctgaaacatgaaatatctgatatcagtttttaacatgtatagttaagtataactctagatatttaagtaaaatttaaaaaccagttctagtattaaaccaacttgaaaagtcaggaggtctttgttttatatcataatctgcttgattattttattatactaaacctcatttcatgaacttaaaaatagatttggctcatttgctagtattaacaatttgggcaataatcttcaggattcaatttgcaaaaaaaaaaattattattactatttatatactcattgcccttttagtgcaatgtttgcttcatacagaaattaatacatatacataaatatctaaatgctagtatgtatcattggtctaacctactctgagggattactaacagaattaagatataatttacataaactacctagtaacctttataacatttacagaacatagatccctaagtaacatattttacttaaattttaataaacattattgtagttcagttgctaagcggtgcgcgactctttgtgaccccatggactgcagcttgccaggcctccctgtccttcaccatctttgggagtttgctcaaactcatgtccattgagtcggtgatgccatccaaccatcctgtcctctgttatccccttctccttctgccttcaatctttcccagcatcagggtcttttccaatgagttggctttttgcatcaggtggctgaagtaaagtattggagcgtcagcttcagcaacagtccttctgatgaatattcaggactgatttcctttaggactaactcgtttgatctccctgcagttgaagggactctcaagagtcttctccaataccatagttcgaaagcatcaattcttcagcgctcagccaccttctttatgatccaacttttacatatttataaaaatagtataacactgttcatactcactcaatacaaataaaagacttgtatctatactagttaacaaaggaggcaagaaaaaaggataagacagcaatgagaacctaagtctatgagataatggctattaaatatataatctgcatgaaaaacagttgcctgttaacaacatcgtaagatcactgcaatcggatagaatacctccatagataagccttaagtaagtatttggtccaagatacactgagaattaacatagtgaactttagagtttaattacagattttatatattattacaaagattatattaattgtttgaatctaccttctttttttaaaattaagagttttctattttgtcacaatgatctttatagcagatttcacattaatgtcttttacataaattatttaaatacctaagctactcatggggggaagggttgaggataattattaccgaaaaataaaagtgccggtgtggggatcagcccacacttggatcatcagtgctttggatcccaatgagatcatatgaatacaaccttcttctatgagcctttcaccaggattcacatatgctgcaccttccagtctgttgttctctatgaaaaaaagatgttcggatgatttgtcaagcatctgacaaaaactgagtggaaaagtaatgtaaattgaattttgccacctaagaattgataactctaaacaatgtacatgtgatattactgatgaaggtgctatctaatgtacatggagagttttctgtattaggtcattttgctctgctctttcgatgtacaatttataaagaaaactctattaactatccaacacattaaattatctgctaagatttcttaaaagttcaatttcctaggccaacccataaaaatacctaagtatgctatgctaataacttggaaatatgtctgtggaaaagtagattcagagctccaactgtagataccaggtgacatttcccacccttcactcttgacagtgtcattaaggttttcttttctatctataggtcagtggaagatgctgttcctagaaaccaaatactggggaaggcctagtgtcctgaagcagaggctccagtggggtgtgtaaactctgtggaatgaagagctattgagactagcacctcccgatcatgataaccccccaaacctctggctcagtcatttcattcattccacagaccataagaattagcccactttcctaccaccataaactgctttttaacaacaagttctttctacctagcagtttcatagtcacaagagtgatccaataggctgtagaaagaactggaatgaaatttattctcactttggaggttggctgatacggttacacattttgtgacaggaactagaagagaggcactgaggaaagatacagcataagaaggagagcttgaactacaagagagaaaggagatgaaatggaggtggaatgacaggagacacggaacaggtaagagaaggatggaaaagcggctacagggttccacgccttccttttcaaatatcaggagccaccctaacccagcgatgggaccacgacagaggcatgaaatcgggttggtgatcccaaagcagttgcgtgtgtggtggtccacctgcctccttcctcacactccctctcccaccccacactaagcaaaagtacagaagaaaatggtgtttaaggctgtccgaccattcaggctttggtacgtcattccatgaagaacgtgtgggcagtaagtcagagtatcactgtgttcctagtgctcaactaaaactgccttctgaaaagtcttagtacacagataatgctgttgtcatacctgttccatcaaaactactgtccaataaaatcagtgacttgtttcttttccttgtcttcttccctttttctgtggtactctcagcttcgaggatacactccacattaaaccacagggaaatgctgaagccttctgacaggtgtggctgtccgagcaaaggcaagtggactggggctatgtgccaagaggaaagcagctgctggggaaaactctcactctcgccctctttcttacaacgtgacactcgtgctcttctcaacagccccatggccttactgttgagaatcccggggcacttttgtgatgaaacaccattgcttaaatttggagtatacagtaaagggaaggttagatactgtgaaggactcatagtaatgtcactttcaacaattttcagaatacccagaagaagaatttcctaaaggaaaagaaaaccaaacaaaactttacagccatgttacaaggtatataataatcttgaaaatcaggttataaacaaaaatacaaacataaacatacgtatatcagcatttatatttaaataacttcttacctactatatcattaaaattttcatttttgtgtgttacgatattggctcagatggtaaagcatctacctacaatgcaggagacccaggttcaatacctgggttgggaagatcctctggagaaggaaatggcaacccactccagcactcttgcctgaaaaatcccatggacggaggagcatggtaggctacagttcgtggggtcgcaaagagtcagacacaactgagcaacttcacttttacttttcaaaatatgaaacagatttgtcttaaaacatataccctcttgtggttaatttgttttagatttagaagattttaaaaaggttcaaaattaaaaacttccgagctggttttaagtgttagaaattaagtacaatgattgtattgagaatcatgtctaccaaagaaaggtgtttatttccaggtgcactacagttacttctctcaattatttttaaatgacggatagaaccagagaccttgcaaattctttaggtttctgaatggtatttatggtatgactgacttcctaaaattgagtgctcagttactttccaccttattttacatgccttttccccaatcaaagaaaaaattttcatcttttttagatctatttataattacaagtttcaggttaaactgaaacacagaatgtacaaaagagatgagaggaaacaagtatttaattaaagagaaaagcaacaactaaagagactagtaaaaaaatagaaaagattaacccaggacaatgtcctacccattcataaaacaacatctaatgtcgaatactatgataaatgaactcagaaaaatagaatacaaacatcccataaatatatagtcagttctcaattgtctgcactagtggtttttaacctcatgttccacagagctccttgagggtctataaggctcaagtaaggtggtgaaacaggcagggctcaggaacattctccaatcctacttcaaagaaagtagctccaaggccttctgttttaatgcttaagcgttgagtcaagatttcattataaagatgggcttctcagcgaagaagagtctaaaaatcactaagttgcaccaacggacaatgaagagtgaataataattttctaaaaaaaatgataaccttcaaaatggttatcattactcataattatctttagtaattaaaattattcagcatttcttaagcatacagacttggggtggaatcaggtaaagagatgagaggaaacaagtatttaattaaagagaaaagcaacaactaaagagactagtaaaaaaatagaaaagattaacccagtacaatgatacatctagtttgccaaaacagaatgatatagttaaaactgtataaataataaaataattgagaattttgtatggcaaaaaccactacaatattgtaaagtaattagccttcaattaaaataaataaactttttaaaaagcctgcagggaaagacccaatattaacagcaaaaaaaattaaattaaaaaaatgagaatttcacacacaataacatggagttgactgtataacagttatcacatcaaaagagggagcttagtgattccttaaaaaaataaaattatattagacatcagtgaaaaaatgtcaaattatagcatatttactgtacaaggagatttctccagaaatattctcaaaagaagggttagctcttctgaacatgttcttgaactcatcaaagataccaaaagatccaccaatactctctggcatgctaaattaaagaaagagagaggggaaaatttaaagccaatatacagtaattaaaggaaatgaaaaaacaatttcactgaaagagatgaaatatcaatactattgtcacatcttaaatggatcataattaatctaataatccaaatatttgctaaagaaacagcaatatcactaaatgaaaaccaactaactagctgacaaaaaaacaacaaaaccacttttctgaaagagtggttagctcaaagtaaaataagagtatttaaagaagcataaattaatatagtatttcttaaataagctgatgctgttaggtattgtaaaatagtctgctaccttctcatgtttaaaatgtttaatttataactataactttctaaagagaaaattagatgctataaacaaaattagaaatattaaaaattacaaaaacacttaaatatcactaaagattagtttgaacactttattctatcataaggcttagtatgaaacataactggtaatgtacaaattcatagaacttttgagagtaaaatactgaataatatttataacatatatattacatatgctatatatattacatgtataatacacaaattcatagaacatttgagagtaaaataataaataatatttgtagcatacatattgcatatatattacagagatcaaaatatatttacatgcattatctcagctgatcctaaacaaaaagtcctacaaaataaatactatctcccttttggatatgaaaaaataattctgatataaaacctaagaacagaagtcctgtttcagcaacatgttttataaagaagccatgaactgacatagaaaggaaattgcaatgagactaagaaatagcatggactttatcctataagtcatcatcagatggccaacactgaaatcagattgattatatcctttgtagccaaagatggagacgctctatacagtcagaaaaacaagaccaggagctgactgtggctcagatcatgaactccttattgccaaattaagacttaaattgaagaaagtagggaaaaccactagaccattcaggtatgacctaaatcaaatcccttatgattatacagtggaagtgagaaatagatttaagggactagatctgatagatagactgcctgatgaactatggatggaggttcgtgacattgtacagcagacaggggtcaagaccatccccatggacaagaaatgcaaaaaagcaaaatggctgtctggggaggccttacaaatagctgtgaaaagaagagaggtgaaaagcaaaggagaaaaggaaagatataagcatctgaatgcagagttccaaaaaatagtaagaagagataagaaagccttcctcagtgatcaatgcaaagaaatagaggaaaacaacagaatgggaaagactagagatctcttcaagaaaatttagagataccaagggaacatttcatgcaaagatgggcttgataaaggacagaaacggtctggacctaccagaagcagaaggtattaaaaagaggtggcaagaatacacagaagaactgtacaaaaaagatcttcacgatgaagataatcatgatggtgtgatcactcacctagagccagacatcttggaatgtgaagtccagtgggccttagaaagtatcactacgaacaaagctagtggaggtgatggaattccagttgagctatttcaaatcctgaaagatgatgctgtgaaagtgctgcaggtatgccagcaaatttggaaaactcagcagtggccacagcactggaaaaggtcagttttcattccaatcccaaagaaaggcaatgccaaagaatcctcaaactaccgcacagttgcactcatctcacacgctagtaaagtgatactcaaaattctgcaagccaggcttcagcaggacatgaaccatgaaattccatatgttgaagctggttttagaaaaggcaaaggaaccagagatcaaattgccaacatctgctggatcatcgaaaaagcaagagagttccagaaaaacatctatttctgctttattgactatgccaaagcctttgactgtgtggatcaccacaaactgtggaaaattctaaaagagatgggagtttttctttctggcttacttcactctgtataatcggctccagtttcatccatctcatcagaactgattcaaatgtattctttttaacggctgagtaatactccattgtgtatatgtaccacagctttcttatccattcatctgctgatggacatctaggttgtttccatgtcctggctattataaacagtgctgtgatgaacattggggtacatgtgtctctttcaattctggtttcctcagtgtgtatgcccagcagtgggattgctgggtcataaggcagttctatttgcaattttttaaggaatctccacactgttctccatagtggctgtactagtttgcattcccaccaacagtgtaggagggttcccttctctccacatcctctccagcatttattgcttgcagatttttggatcgcagacattctgactggtgtgaaatggtacctcattgtggttttgatttgcatttctctaataatgagtgatgttgagcatcttttcatgtgtttgttagccatccgtatgtcttctttggagaaatgtctatttagttctttggcccattttttgattgggtcatttatttttctggaattgagctgcaggagttgcttgtatatttttgagattagttttttgtccgtcgcttcatttgctattattttctcccatttggaaggctgtcttttcactttgcttatattttcctttgttgtgcagaagcttttaattttaattaggtcccatttgtttatttttgcttttatttccagaattctgggaggtggatcatagaggatcctgctgtggtttatgtcggagagtgttttgcctgtgttctcctctaggagttttatagtttctggtcttacatttagatctttaatccattttgagtttatctttgtgtgcggtgttagaaagtgatctagtttcattcttttacaagtggttgaccagttttcccagcaccacttgttaaagagattgtctttactccattgtatattcttgcctcctttgtcaaagataaggtgtccataggtgtgtggatttatctctgggctttctattttgttccattgatctatatttctttgtgccaataccatactgtcttgatgactgtggctttgtagtagagcctgaagtcaggcaagttgattcctccagttccattcttctttctcaagattgctttggctattcgtggttttttgtatttccgtacaaatcttgaaattatttgttctagttctgtgaaaaatatcgctggaagcttgatagggattgcattgaatttgtaaattgctttgggtaatatactcattttcacaatattgattcttccgatccacgagcatggtatatttctccatctattagtgtcctctttgatttctttcatcagtgttttatagttttctatatataggtctttggtttctttaggtagatatattcctaagtattttattctttttgttgcaatggtgaatggaattgtttccttaatttctttttctactttctcattatttgtgtataggaatgcaagggatttctgtgtgttgattttatatcctgaaactttactatattcattaattagctctagtaattttctggtagagtctttagggttttctatgtagaggatcatgtcatctgcaaacagtgagagttttacttcttcttttccaatttggattccttttatttctttttctgctctgattgctgtggctaaaacttccagaactatgttgaatagtagtggtgaaagtgggcacccttgtcttgttcctgactttaggggaaatgctttcaatttttcaccattgaggataatgtttgcggtgggtttgtcatatatagcttttattatgttgaggtatgttccttctattcctgctttctggagagtttttatcataaatggatgttgaattttgtcaaaggccttctctgcatctattgagataatcatatggcttttatttttcaatttattaatgtggtgaattacactgattgatttgcagatatcgaagaatccttgcatctctgggataaagcccacttggtcatggtgtacaatctttttaatgtgttgttggattctgattgctagaattttgttgaggatttttgcatctatgttcatcagtgatattggcctgtagttttctttttttgtagtatctttgtcaggttttggtactagggtgatggtggcctcatagaatgagtttggaagtttcccttcctctgcaattttctggaagagtttgagtaggataggtattaactcttttcgaaatttttggtagaattcagctgtgaagccgtctggacctgggcttttgtttgctggaagatttctgattacagtttcaatttccgtgtttgtgatgggtctgttaagattatctatttcttcctggttcagttttggaaaattgtacttttctaagaatttgtccatttcttccagattgtccattttattggcatataattgctgatagtagtctcttatgatcctttgtatttctgtgtcgtctgttgtgatctctccattttcatttctaattttatttatttgatttttctctctttgcttcttgatgagtctggctaatggtctgtcaattttatttatcctttcaaagaaccagcttttggctttgttgatttttgctatggtctcttttgtttcttttgcatttatttctgccctaatttttaagatttctttccttctgctaactctggggttctccaattcctccttttctagttgctttaggtgtagagttaggttatttatttgacttttttcttgtttcttgaggtatgcctgtattgctatgaactttcctcttagcactgcttttatagtgtcccacaggttttgggttgttgtgttttcattttcattagtttctatgcatattttgatttcttttttgatttcttctgtgatttgttggttattcagaagcgtgtagagtgaagtaagccagaaagaaaaacaccaatacagtatactaacacatatatatggaatttagaaagatggcaatgatgaccctgtatgcaggacagcaaaaaagacacagatgtgtataacggacttttggactcagtgggagagggagagggtgagatgatttgggagaatggcattgaaacatgtataatatcatgtaagaatcgaattgccagtctatgtccgatgcaggatatggcacgcttggggctggaacgcggggatgacccagagagatgttgtggggaggggggtgggaggaggggggttcatgtttgggaacgcatgtacacccgtggtggattcatgtcaatgtatggcaaaaccaatacagaattgtaaagtaaaataaaaaataaagtataatttaaaaaaaataaaagaaatgggagaaccagaccacctgatctgcctcttgagaaacctataggcaggtcaggaagcaacacttagaactggacatggaataacagactggttacaaataggaaaaggagtaggtcaaggctgtggttacaaacaggaaaaggagtacatcaaggcggtatattgtcaccctgcttatttaacttctatgcagagtacatcttgagaaacgctgagctggaagaaacacaagctggaatcaagattgccgggagaaatatcaataacctcagatatgcagatgacaccacccttaaggcagaaagtgaagaggaactcaaaagcctcttgatgaaagtgaaagaggagagtgaaaaagttggcttaaagctcaacattcagaaaacaaagatcatggcatctggtcccatcacttcatgggaaatagatggggaaacagtggaaacagtgtcagactttatttttggggggctccaaaatcactgcagatggtgactgcagccatgaaattaaaagacgcttactccttggaaggaaagttatgaccaacctagacatcatattcaaaagcagagatactactttgccaacaaaggtccatctagtcaaggctacggtttttccagtggtcatgtatggatgtgagagttggtctgtaaagaaagctgagcgccaaagaattgatgcttttgaactgtggtgttggagaagactcttgagagtcccttggactgcaaggagatccaaccaggccatcctaaaggagatcagtcctgggtgttaattggaagttctgatgttgaagctgaaactccaaatctttagccacctgatgtgaagagctgactcactggaaaagagcctgatgctgggaaagactgaaggcaagagaagaaggggtcgacagaggaagagatagttggatggcatcaccgactcaatgggtgtgagtttgggtaaactctgggagttggtgatggacagggaggcctggcatactgaggttcatggggttgcaaagagtcagacacgactgagcgactgaactgaactgaactgaacatgaatcagttccaggttttagagtaagaaaataatatgaccaaagtaaagtatatgtttgtggatttttttttcagttcaaaactaataggttccagttcaaattgggggactagagacacacacacacccccctctatcaccacaaagtcactggactaaaagtacagaacaaaaaggaagaaacccataataggaaaaaagcaggggaggcagtgggcactagcagcacatcaagtgagagatttaaaaatatttcctgcagatggaaggatagagagataaaagagaaagctgcagcctaggatctctctgaattacaaagggactcagaggaatggagagccgatctgtccaaaatctggggagaaagtaacaacagggctgctagcacagggattaataagaggtttgtttgtgaacatgcacctctctcccttattctgaatattcagcacagataactcatcatttaccattacgccccaaacttgttaactgttctctaaagaaactgaatagattctgccaacaaaaagctgagatatacggcaggatgtatgcattagggcttccaactataactataaagtctgcagactggccgagttgcctaaccaagggtaaaaacagcagcagaagagttgctatgcagggtatacagagaataactagagcatacagagaataactaatactcaacaacaaaagaaacaccctgatttttaaaaagcataaatgatttgaatagacatttctccgaagaaggtatacaaatggctaacaagcatatgaaaagatgatcaacatcacttatcattatggaaatgcaaataaaaactacagtgagacacacaatgaaaaaaaatcagacaaattccagtaggaagacatcatgatcagtcctcctcaaaactctcaaggtcattaaacaggaaaactctaagaaactgtcacggccaagagggaacctcaagaggtatgacaacaaaatgcaatgcgaatcctggataaggtctttaaacagaagaagaacattaagtacatatgaaggcaattgaataaactatgaactttagttaataatgtaacaatataagtacattaactatagcaaatatactaatgctaacctaggtactttctgtactaggctcaaactctctgtaaaactttcttttggggtgacagaaaagttttaaaatgggcaattctgaatctactgaaagacagtaaactgtatacttcaaatgggtgaagtgtatagtatgttaattatatctcaagtacatgaattatacctcaataaagctgttattaaaagataatggaatagaatttttcagagctaagatacaaataagtcttcagatcaaaaaggtccattaagtgccagcacaatatataaaaatatagccataactaagtaaatgcagaagaagggagggctttccttacagtgtaattccaattaagaaatgaaggaatcatggaaatagaaaattactatttgacaaataccaccatattaattatttcagtcaaaaatcatcaatggatactaaaatgagtaggttaaagtaagatagaaaaaggatatttacatagtctcaagttatctccccacaagatacttactaattataaagagaaaatagtaacttaacagtggaagcaccttgcaagatattgtcttaaccaagtgatcaaaggcaacatcatcattgctaagatacagatatcatgaacccctggacatgatgcactgaggtatgcctacccaaaatgcataacttgaatttaaccatgagaaagtatggtgacaagcccaaactgacattttgtgtatgtcagccttaatcctccaattaaactttaggtttctacagctaaaatctagggttctatctagtatatataatatgaccatattatatattcattatgaatttctcaaatgtctgtgaaagtacaaagagagagcaggcattcaagtaatacctgacagagcagcaatcttagactgggttacagtctcgtaagaaacaacagacatcaaacaatggactggttcaaaattggaaaaggaatacatcaaagctgtattttgtcaccctgcttatttaacttaaaacgcagagtatatcatgtgaaatgctgggttggatgaaacacagctggaatcaagtttgccggaagaaacaccaataacctcagacatgcagatgacaccaccgttatggcagaaagcaaagaggaagtaaacagcctcttgatgaaagtgaaagaggagagtgaaaaagttggcttaaagctcaacattcaaaaaaagatcatggtgtccagtgctatcacttcatggcagatagatggggaagaataaaacagtgagagactttattttcctgggctccaaaatcactgcagatggtgactgtggccatgaaattaaaaggtgcttgctccttggaagaaaagctatgacaaacctagagagcatattaaaaagcagagacagtactttgccaacaaaggtctgtctagtcaaagctatggttattccagtagtcatgtatggatgtgagagtttgaccataaagcaagccaagtgccgaagaattgatgcttttgaactgtggtgttggagaagactcttgagagtcccttggactgcaaggagatcaaaccagtcaatcctaaaggagatcagtccctaatagtcattggaaggactgatgctgaagctccaatactttggccatctgatgtgaggagctgactcattggaaaagaccctgatgctgggaaagactgaaggcaggaggagaaggggatgacagagtacaagatggctggatagcatcatcgactcgatggacatgagtttgagcaagctccgggagttggtgatggacaaggaacctggcatgctgcagtccacggggtcacaaagagttggatacaactgagcgactgaactgaacagtctcgcagtgccacttctaaatacaagaccctgaacaattcatttgatcacttggaatctagattttcctctctagaaattcaagatacttatatctactgtattggtttgagaaatgggagagatgctgcatataaagctacttctgaaaccacatggcactatgccaatgaagctattattgtcaactcttcatttcacataacaaaattatttcaaagctattgtttaaaaccaaagtttcaacgcaccttgaaaatcagaatcagtctgtgttaaaatactcaagaatcctcctaaaagatttttcacagttccctgaagattaaaaaacaaaaaataagaaattaaatttcttacctcatgaacgcatgaggaaactataatgtcataataaattacttgatagtatactgtatacacctatctagatattttaaaataagtggaaagaatgctatgtgtagggttatacacagttttcattttgtttttcatactgtttttttctgatttttcaaaaacaatgatcatatatcaaaattaaatgcaatttaaaaaatattactcgttctcagaaatacactaggattcttatagttagccagtgacaacactgatttttatcctactttggagaactatggaagcagaagatttttagactatcacttgtactaaaaatataccataaagtgttataaaaggtaagtaatcatctcaattttcagacaagttgggttatatataaataaagagatgagtaattagggcatgtgtgtgataaatactgatcacatttaattaaatacatcttttacctgttgcatgagtagaaaaatattcttttctttctgtctgatgattttcaaaaaactctcaaatacatgggtaagcacatcaagtttagctttaccagtagaaagcaaatttaattccaacgtacaaatctcaggataaattatttccccttgagcgaggttttcaagtaagtcatttggactgcttgatgcaatgaaactttctgcttcaggctttaagtctacccctaaaaggagaaaaataaaaggttatttttattcccttcctaagcactgaaaaaaatttcgaatctcattcatcacttaggagatctagtggcaaaagtgctatttataagaagatgctcacaaaaatcttttcctactacttgatttttgactacaataattatcctgaataatcaagtcatatggatattttgatgataaatgagtagccttgaaagtaattttgatcttcactagaagcacaagtactatcaacagtaatttttatagacatgtgatgcagatttaatatactcctttgagacaaatggaaaaaagtactatcccaaactttctggtgccaaaatatctaaattataggcttatatctctgtgaaaacagtaggtttggctattggttggataaattttatactttgctttttttatcagtgggatatagatactgcctcaccaaatattacattctggaaaatttaactgttatgctctttaaagaaactgctgtactctttttaaaaaagttcatataggtaagaaatttataaatttctacctggaccaaaattctttaagatctagtgagcaaacttacacaaaggagggtatctgtcattatgaaatcatgtctgtactacgataaaactgacactattatagcaatatttttcaaaagcacctgcttaggggggaggggggggtgggaagtggaagaaggtggtcaaaaggtataaacttccagttataagataaacaagtactagggatgtaacatacaacgtggtgactatagttactactgctgtatgatatacgggaaaggtgttaagagaataaatactaaaagagttcttatcacacggaaaaagtgtttatttcttttctttgtactgtatctatacgagatagtgaatgttaactaaaactactgtggtaatcctctcacaatatatgtaaatcaaaccaccttaaacttatatggtgatgtatgtcaattatttctcaacaaagctggaaaaaagtttgtttaacaaaccaagtaagtcacatgaatatatatgtatgaggctttcaatctgtggctgttcctttgtttttttcactctgtttatggtaaaaaaaaaaaaaaccaacaaaaaacaaaaaaacacctgctatgggtccatcaaagccctttaagtaggacatcagtgattattccaattcactcaatttgaaagagacaacagccactgaagaaaataactactgcaaacttagtgaagactaacagtattggcacagtcataaaaccagcaaataaaaagatgaagccctcccagaaatgtcctggctctattcaatccatatcttccattctactccactcaagttttcggcctggaaacaaaggatcacatgcaatgttatttccatcttaaggacaagctgggctgtggtgaactaagaaacctatgctgaagcattcttggatgccacaaagagatgtctgtattccttgtattacttaaatctttgtaactaactgttttcaaagctcttcctgtcaatgtccactgaatagatcttttctatcaaggcctcaatgtaaatacatcttcagtgaggccttctttgactacccagtcactatcacatcatcctgttttatttcttcatattgcttatttctggtatttcttgtcttttccactagaatccatatgaaattagagacttcttctaccctgtattcttagacactccatcaatatttgtgataacaaaaatatatttcattgatttaaactgcttaaactgcttacaggggcttccctcatagctcagttggtaaagaatccacctgcaatgcatgagaccccggcttgattcctggattgggaatatccactggagaagggataggctacccaccccagtattcttgggcttcccttgtagctcagctggtaaagaatccacctacaatgtgggagacctgggttcgagccctgggttgggaagattcctctggagaaaggaaaggctacccactccagtattctggcctggagaactccatggaccatacagtccacggggtcactaagagtcggtcacgactgagcaaccttcactttcactttcaaactgcttacaagaacgccagaatttgttgtcaagatcaaataaaataatgatgtaatacactttacaaatataattcaataaaagttctaaagtgatattattaagaaccatttgctagttaataatctgactctcaaatgaagttacaggtacttcagtgatattttaccatcatcccaggattcactatcctcaggattgctttcactatctgcttcataaccttcttcttcaaccagaagtttaaaactgcaacactgagaatcctcagcttcttctgaaaaatcaccaggctgggatgacagttcttcttcagactgatgactctataagatcagtataattaaattaaggcaaaagttacaatgtttgttcatttttcttaaataagatatttattactcaaaaatcattttgaagacagcttcaacattttaagaaaaaaacattaggaacagatattaaccattatacattatgaaattcacacagcataattctccagaatttcttagccaatttgattaacacctcaaaaaaataggtgtcctaacaaattaaactataggtcatttcagttttactgaaaagtaagtctaagaaatttcattctagctatgtaagaggagatgagtaaaaaccacaatgatgtggaattatacttcttataacttaatgcaaataaatacatattatatttacatatttgcacaacaaaagatttttccaaaggtttttataaagtgtttcataaattagataactaaagacatgaaaaattttcaaagaaactgattttaagatttcagaatgcaattgtctacatataagcatctctgaaatcagagttccagcattaactccctgtgcagtatcatgtggcatgaaattttccttttcttataaaaatgctaataatatcttcacttaaaaaaaaaacacttaaagaagctcagagtacttaatcattgcaatattttaaaaataagaataatcttttttttttaataggtaggtagatattttaatctacataggtattctgacatttcaggtaggtattttaacattttccagttaaccaactgattcagtaatatgattatgacattagtagttattttagtaagtttttacattatatgacaaacagtaatgtaaactattatggcagaagattataaaacgccaatatgtctagaccaaggaattgaaaaagaagtcacacaaagataaaggtaaacaaacaacctagatgtccatcagcagatgaatggataagaaagctgtggtacatatacacaatggagtattactcagccattaaaaagaatacatttgaatcagttctgatgagatggatgaaactggagccgattatacagagggaagtaagccagaaagaaaaacaccaatacagtatactaacacatatatatggaatttagaaagatggcaatgatgaccctgtatgcaggacagcaaaaaagacagatgtgtagagcggacttttggactccgagggagagggagagggagagggtgagatgatttgggagaatggcattgaaacatgtataatatcatgtaagaatcgaattgccagtctatgtccaatgcaggatacagcatgcttggggctggtacacggggatgacccagagagatgttgtggggaggggggtgggaggggggttcatgtttgggaacgcatgtacacccgtggtggattcatgtcaatgtatggcaaaaccaatacagaattgtaaagtaaaataaaaaataaagaaagaaagaaagaattcagaataaaataaaataaaataaaataaaaattaaattaaattaaagtgagaagagagttctgtaaatattaaccatatcactatagaatcaaataagacaaagaggacagctgagtcatcactatccgtgcattattacttaataaactatcagttatatatgagacatcaaataatacttccatcttactggaagcaattctcggtaaatttccagattagatgaagaaaagcatgtcacactgctctcctatgttttatgagatataaatacaatccatcccagaggatggagacagaacccattgaactcacctgaccaaatcctggcccgtatgttctaaccacatcacagtgtcacactctgaacccacacacttctgcctctgccagtcacacccaaacaataacaacacaactgtatgttactcataccttctcagtcatagcatcatcatgctcaaaatctgctgaatgattccccagtgcaactcgaagcagggcatcaaataaaggctttgctaattctgtttctataacctttgacttggaaagatgatccctcatttcatgcaatatagtttccacagacaagttctaaggtaaaagcaaagaaactaagaatatcaacatgctttaagaaaaaaaataaacagtgagaaaacaaatgataaattaatatttacattaagtaaaagctagtccatttatttgcagttgatatgaaattaaaatgactatataaatatccagtgcttatacaaatatcctcctgttacaattaagaataattaatattttaatttatccaatgctttacttatcttatttgcttttgaatttgaatgtatcataaattaattgtatcagggaaaaaatgattagttgaaactcaaggttttcattaaccatttctagattttactaattccttttcttagtgattgcttaagactctaagaagcacttatattctaattcttttctcttcctcccttctttactccttcctatctgtcctggaatggagctctcactgcttgttcttctgttaagggatgaagccataaggatagataggaaattgacttctcccttaactctgtccagtgggagacacagatacacacagacaagatatgatggagtaggaaatggcaacccactctagtattgttgcctggaaaatcccatggacagaggaggctggttggctatacagtccatggggtcacaaagagttagatgtgactgaagtgacttagcacgcaggaagaaaggaagggatctaccatatttgaaatttccttagaagcagggcctataactaagcattcctttttggctgagatgtgctctcaggggaaatttgtaaaggcatgaggaaggcagaatatgctgggggaagaatccaggcaaagatgtgctttcagaataaatgtgtcaccccagcccaattccacgggaagctctggagcctgaactgcaccacagagactgccactcccagagccatacccatcagtcactggctctcagcacaccccacactttgggagatgggtgcagatgggagttcttagcagccaacatctgcagcagatggtgcacgggtggatcagcttggcaagggatatgggcagggcaccaaacagaaccacaccaagactgttgagtgtggacgttgaaatacaatagctggggaaggaaatggcaacccactccagtatccctgtctggaagatctcatggacagaggagcctgtgggctgcagtccatggggtcgcaaagagtcgggcatgactgagcaactaacacttcagttcagtcgctcagtcgtgcccgactctctgcgaccccatgaatggcagcacgccaggcctccctgtccatcaccatctcccggagttcactcagactcacgtccatcgagtcagtgatgccatccagccatctcatcctctgtcgtccccttctcctcctgcccacaatccctcccagcatcagtcttttccaatgagtcaattcttcacatgaggtggccaaagtactggagtttcagctttagcatcattccttccaaggaaatcccaggactgatctccttcagaatggactggttggatctccttgcagtccaagggactctcaagagtcttcttacccattattactcatctgacatctgatatttaaggtgtatttaatgccttttagggttggtaaattttgtcacatgggttctgtattccaaactaaaccctaagcttctcgagggcaagaacagggtcatgtactcctctgtgtccaccacagtacctggtactgtgctaagcatacaggagcacctcaaaactcagaatctttggaaaaacaaaatgacaatagcattacattataactttaaaaaaatttacattgcacaatggttagatgaaagataagttcttacctgattgggtaactccaactccatcttttgctgacaagctctggtgccatgaagacaaatggccagaagggcttccaaaagtcgtatgccctgaagtgaggtttcgctttttcgactcataaagacttctgtttcctctggaacagcttccacagctggaatctgttccacatttacggaagaaagatgctctgactcgaatttacctaaactgtcagcactctttttcagactactcagttctgctggtgtggggtcactttttacagtcaaagataataaatcttctttcacagtgatctcaggttgagaaattctgtttaaatcttgattttcatccatgtttcgatctccttcccttctcccttgctcctcttcaggatttctgaacagttcctgtattaccataaatattaatttatggcatacttggaaaccaccgagcctataaaactgtttctggaaaatgggacttaacatgtagatccaacgacacatggaccaaatgtcagctgcttggtgcatgtgtttgggagagggcaggacgaggctctcgagagagaaacacggcagcatgtgttgcaaaggctcgctcgctgtactgtcatagccagaagtatcctctgaatcattggctaattctctgtcagattccgcctctttacttacacacaagaacgccacacagaggaagaggttaattgtgttgatatgaacatcctgcaccacagactttcgtttctttggataagcatctttgagccgggcataaaatttactaagactctgagaatctgaataagcttgctggttatacaaagtactgacatttaaagatgacaactccttctgttcaaggtctatcccgtcaatacctggaattgaagaatctttctgttgttcccctaggctgattatcagagtttcaaatgcttttagtgagtgatttcggataccatctaagtaatttaattcaattatttggtttactccattacaacttaaaaacaaatctcttattaccctgtgagagaaaaaaagtacaaaagatttacatacaggcacatcattcatacattatttaaacatgtcattgctgcatatactaaacactacctatttcaactttatcaactatctggctgaagtccttagttagatatgaccaggatttcaagttgctttctaactacttttacacccttctgcaaacactgcatatataattccagtagcatttgaaaagaacagattacatgcctctcaagtgaaacgaagcaattcagggaagaatatttttccccaaacggcaaatttctctatataaattctccatgccacaatcacctccatatttgagacggacactctgaaagcagggaggcctttgcgggtccattcatttggctacttggtggttcactcaggacttttgtttattttaaatctgtacgtcatcaagggaaagaaccaaactacagatctgaagtttttcagctctatctcaggtaaaactcacaagtctggatcactggaatctgagtaataattttagtataaatcagctcagcaaagatccaggctgtccacaaatatgccacagagttataaaactgtcagatcaaagacagttctatttaaacaatgtcagaatgtcaggattttttttttaatgattgtgaaaataatgattacagatatgttatactttactgtaagttttaaaaatggtatatgcattaatttcaaaggccaactacctatcagaagcaagcttcatttacaaaattattttttaagtatgagagctgacaatcacaaaatctgcaaaactcactggtgagattctaagtatcttaattttcttcattttgcttacctgtattttccagtttttctacatacaggtaataaatgtaaatatggtattcaaaaaataataattccattaatttcactgttttgatcattatcatgcacatacacactttatgtactatatatattttttcacagtaaataaatgaaacatttttttactttttgtatgttactgataaaatattataagcattttctcatgtcccaatagatcctagctaacattatttttggctaataatattacatccagtatatataatttaattaatttaactttgcccctgctgttgggtatctgcatcttatccattttttctcatatatatatatatttaaaactttacttttttttcagagaaattaaaatcaatggctctgtcctcttccctataaacacccccataaaacaaacaaataaataaatgttaaaaaaaaatctgacatgggatgggaacttttttcattgttaaactaaaattaaatcctaggaaaaataaataataaagatattcaaacatctttgaatatgatttttcaacaacgagaaaaaatatctacacatatatataacaaaccttgatttaagcagggtaggcagagtttttaaatagatctgaagtacttcctggggcaaacactggttatgatgactacagacatgagtctgagctgaagtaatgctaagctgttgacagtgatgtgctaattcaactcctctttgcagcacaggattaaatacacagttatacagtttccactgaacaacaacattgcctttctggatcaaactgcaaatgtgatttgcaatctgtacactccgtaatctgtcctcttcgaaaacaaaattctgataagcctctaaggcatcccatttccacagcaagtcttctgatccactgctgggcaggatgccttgaaatctgtagggtggactagatacacctgaggaaggttcagcattgtaagagtttccctgcagggtctcctctaatttggctagttgatctgagtcaacagtacagatgttgcaagctgcttttttagttttctgcggtatctcagctcctcctaactggtccaaaatgagtttgtgaagaatattcagtatatgctgctgacagcttttcagtgctggcaacttaaaagcatggaggagaggaacaattacagatttgggatccatacaacagcatatgccaatgttctgaacccctgagaggatctggacacacgtgctgctcaaggaagcctgctgcagtaagcgtaagcactggtgggaacacacagcaatgcaacagcaccgctcagggtaatacacgtctccatctgccgtctcttcaaatgggctcttggaaacctggtttttaaaagccgagaccaacagacctgagaggtctctgtggtgatgcatgaagtgggaatattcgcaacgtctgtgcctttttcttgtacacattgaatgatgcagctgctctgacttcacttttttgacagtgctcattattttcatgacattattgatgagggctttcaaatgtcctgaggcctcgggaggaactccatctcttacaaccagccattccatttgaagaactgctgtttcaaataaatgaaatccgtgatgctgaatgaattcttggaccagatccatggcttgactgaagaagaacggatttgaagttgcactttgaagacaacagatcaggatctgcagaactccctccagcagctcaggtaaaagaagcactctatgacgatacttggaaaacacaaaatcttcctgaccctcttgtagtgttttcttctgtcttggggcaaaagggtcaggttgcttttctaggcaagttctaatttttaaagctgctctaagcaattctgttaaattttttctgagattttctggcatcacctctgccgtactaatatctactgacatcagatgcagtactgttcggaaaagcatccgttgaatcaaagccactggttcttcagtccaacctgcagaaaccatctgaccctccaaattgtcactgagattacagcagtccccaaaacccgctaggaattcagtcagtgtgggcactacactggctgcgagagcagaattatgattcaaggtaatgtcaaacttacaaactttctctaataaagataacaaaacatgacataagtcaaatggagaattgttcatgtgactgatggtagacaaggcagctggctcacttaaaatgtcagtgtttgactcctctcttggaatcatttctctggaattttccaaagccatggtgtcaggaggagtctgctctttggttgataagtggttaagcttagctgtaaggtggtcttctttaggacactgttttacaaaatgctgcagcacatgggaccttctgtatttagtcattactatacttttgtcatctgaattggcttctgaatctgaggtggaaagctgtgtctttcttgcatctcttacagaataacgatgggtagttttacgttgccgcctgctttttctaaaaacatttacttttgcagaaacctgaccagctggagcactcccttctaaatataatttttcctgagtagatctttgagaacttgagttcttttctttggtcaggattataccagctgagaatggtagattaaagtctgacaaaatgaagaaagaaaatttagaataccttaatatgttttaaaactcaatatgcataggtgattatcctcttctttactttaggagtttgtcctcagtatatttttattatggggctgacttcttttagctttttggtatgtctctactccccttcctccccacatcacttcatttccttatcctgcttatattaaataccaagtggccctgaatcaaagaacacaaattgattttgaaaacagggagaacagagttaggaaagcaatgctggtatttagcattactattcttaccactttacaaatctcctctaataacaccattaattaagacacagaggtatactatatcctcaaaacagtatttagtttatagctctgatataacttaggaaccttaagatctccccaaattatttcaaaatcatacaatagatacaaatgttctccgagactggggttaaagagttactcattcacattattcactgcatgtgctacgcaaggaactcggtataggtgcaaatattgctgtttcaccctcagtgcctaaaacctagggctgctgtgtagtcatcactcaagacctatatcttagagaaaagaataaattttccatactaattaaaaagataatgacgctgggctttttcctttgcaataatacaaaaggtacagttataatttagaatgaataaataaaaatctaaataaaagacttgtgctttaagggagagaggattaaaaggagtctgacaaattccacatatgcaaaagatgcaggcaatgaagagaacttcaccaaaagaacacaaattagagttcttaagtgattaacaatttgtgagttcataaattcagaagaaaataagagcagagtcagtgaatcaacaaaataagcaggataatattatgacaagaccttagataaatcccttaaaagagagctccatatcagaaatacattaaaaatgcatataggcattaaattcaagagatttttttttttcaacctgagagatccttaagcatttcacaatatgcatattccaggaatggccaagggggaaaactgttaatccctctactgaaacatttaaactaagtttcatgtacttaataggatatatatatttttttttctgaatcagaaattaaaaatatgttgaccttaagtgtaataatcctgtctagtcctaacacaaaacattacttcaaatttatcctttaaaagcagcattagaaaacctaaactgcaaacgtcattgataagagtactggtaatggaaagcagtctttaaaataagcagagaatctttaatttcttcaaacttttcactctccatttttaaatgttaggctgcacatacagatttactccttttgctaagtgttcagcttcttcatctattttctaatcatcagtatgttcaaggaattctctatcatttttatattattagaagaaatgaaaatgtatttgcctaaagaatttttcatattaaatatcacactaatatatactgctttgattttgagctgctatcaaccatcacagcagaagtaacctttcaatataagtttttccccagtagaattttgataacacaagtgatatgacaaagaaaagaaaatacctgttgccttttcttcttgaacaggtatcttccataccaatggaaggagtgacagaagaagggtaaggagttcttctctgcatgtcaatgcctgtattagaaataaaagaatccttcatgctctgaggtcatgaaacacagttattcctaataccttaactttaagttgaaaaaaaaaatcccgtttcttgaggaggaagaatcaaattaacctatgttaaatcgaattaaagctgtgatactttgcaatttataaaccttcccaaggatagaagagtgtaagagtatttgacggtatttagcacattcttgctgctttttccgaaagtagctgttattaccaccatgcacattgtaagaattcctcacctacaaaaagataaatttgctaggtgcaaatgaaaagttaagccctattaattagcaaaccagtaacaaaaattactagaaaaacaaaaaaggcttcatgcagttaaatttaaaactcagaaaacacaattttcaaaaagagaaatggacattattaatacaatagtatatgtaaagagagacagacttattagtgaaggtcatccgataaataatttattgactgcacactaggtccatccacagcatttactgtcttaccctttctggaggatatggtccaagccctggagaaggtcccctcatttggtccatagaacacatacacacaaaacagttaaagaacagaaggcacgcagcatgtgtacacacccaggtgtggcgcaggcattcagtttaggagttcagaaaaaggagcaatcattatcagaggtgtgcaagtgctacacctgggaaacttgggacatgggtggtcaaggaattaatgacaagtcaagtgtaaattcctcgtgtcaatctgtggggagggggtcagagtgggtcagggtgacctaatcagatttgccactatatagacaacagaactggtggggaggggaatggactaatcagtgttagaggcagggaaacagtaatacagacgagagatcataattacctgtagcctcagacagtaaaattgaaaaggaggagacatatttgagaaaccataagggagaaatgaaatgacttgcagctgattatctatggggcatatgagagggaggaaaaaaagatccaaaagaacttgaaagtttctgatttaggccactagctaacgagtgataacacagtcatcaagacaggacatttagcagtggtgttaggttggggaaaagatgacggattcactttttagatatactaagtctgagatgtctgttggatctccaaatggactcagctcttcagtaaacagttgaatatacatgactggaacttaagaaaaagatgtaaagtaaataattggggtgtcatctgagcagaggtcaaggacatgggtgaaatttcctaggagagtatgcagaaggagaggggcagacttcccagagtggcgttctggagaacagcactgaaagaactgcagatggtggtgctgaagagcagcctacaaaggagactgagacgctacctctctccaaagaggagcagaacaagaaatatcaagggaagggagcagttcagaaaagagagaaaagttaatcaagtcaagagttgttgatctttaattgtgtaagatgacggtaggaaagcacttagcaagtacagggtcactggtgaccttaacaaacacagttttgatggagtgatgagggtgcaaatcagattacaaataggctgaagagtaaaggggaatgagaaagtcgagacaggattcagattattactttctagcatcctggttatgaaaaggcttaaaattctgcaaaagcaaaatctaaatcccttctcaggcctggaagacccttcatgacatgattcctactgacttgtccagttttaactcctaccaccacagccaacccctacctacatgtactattaaggtttcctgaacatcagtggtccttcaaacgtcttcctcacatgcactgctcttacaattctctcaccatccttccatctgccaagtgccaactcatccttcaggtcttagttcctctgtggaagacctctctaatcgctcctaggtcaagtaaggattcatgcccttgatttagtatagcaaccaatttgctgaatggttaatgtccaaatgcccattttcttctttcattcattcaacaaatatttattgagcctctactatgtgccagatattctggatgtagtggtgaacaaggaagacaacactcgcatccttacaaagctgacactctagcaggtgagacagaaaacaatggtgacagataagaaactttcagacagaatgctgtgatatggagaaaattaaataagatggaatgaggaacatttaaataggctagtcaggatggaccatttgagcagacgcttaaccgatgagaaggaagaatccatgcaaagacatggaggaaaagagctcataggaaagatacaaagggtgggaatggatttgactttttcatagaatggcaggcaggagagtgtggctggagcacagcaaggggggagggcactgagagaaaaggctgcaggtcagccaggtggacagtgcccaacacaaggcggccttggggaggggggtcagatgaaggggtttggatttatctctaaatatgatgggagatttttccaaacatactttgcaggcctctctcagagcatgaattcagggctcaggccctagttcttagcaatcacctccctttttcccactcaatgcctagtacacagctggatgttcataaacattacctgcctgaatgattttgaattctggatgcaaaataaaaattgtatcaaagggccccatttctatgagctttacttcagaatcagcagatgtctagataacgattgtatgcagagcttgtaaacagtacctatctcaacattttttaagatgccagcaaacgatccattatcttgcaaaaacaagtaaaccaattttggacaggtatattcccgcctagtccctctaagctgaatctttatctttagtagaggaactaataacattcgaacagagcttgccaaaacctcaagggtgtgtgaagaagtgctacagacaggctgtccttggaattcagtgcatcttcctgcacagtacactggcaaatcaccactgctgtgagactggcattcctgcccctggcttctgagacacgtggcctggaacttctctatttccttcccactcagctcaaggctcagtatgccaaattaagcaatatacgacccaaacagagccattccctggctattcctaaactatccgatctacagaaaccacattactcctcatctaatacttacaattttatgttctccctctgcttggaaaatgaccgtgtcacacatttttttaattccccattgcaataacaaacagtgagatcactctcatccaggtggtaagaatcatgctcatgctccgtatctaccaggtgccaggcactgtctctttcgcaattctattgttttgattgtattttatattaattgcctatcctaaccatccaaaagtagtgatggcaggatggaagagaaagggcaattttatcgggaggaaaagctgagatcccaaattagaggcgatgtttagaaagctgcaggcatatgggcaccagatcagtggggttcaaggatctcaggatgacatgttaaggaatttggactgaagttattttaatttatattaatggcattactttcaattttaacatgctgaatttaatgttccagacatagcagaaatatacgtgctatttggttaagtccttcatttcttctatcagaattttataattatttcttaaatgtgtatctatacacacatatgtgaacatttcttcattactactgtaaacagaatctttttaaaatgttctagttgtatagctttagctaaaggaaacaatatgtttgtcttatattctataattctgttgaacagttttctggatgatcttttggatttttctgtacacatcagtttaaaaattaacttttatttctccatctttctcacatttagctgtcactatttgcatattccactttattactgcatgttttgaaaacatgatatcaatcagaatagtaataaagttattcttatgctggttctattgcagagcttataaaaaattattttgattttttcatacaaacagctcacacaacttgataacaacgaaaaacacccagttgaaaagtggaaattttcaaaagtagacatttttccaagcagatggccagtaggcacatgaaaagatgttcatcatcattaattatcagagaactgcaaatcgaaactacaatggcataccacctcacactggttagaatggccacgatttaaaaagtctgcaaataaatgctagcgagaatgtagagaaaatgctcctgcactgttggtgggagtgtaaactggtgcagccactatggaaaacactacagaggtgcccccaaaaccctaaaaatagagttgccatgtgatccagcaatcccacccctgggcatatacccagatgaaactataattcaaaaagatatgtgtgctcctatgttcatatgagcactattcacaatagccaagacatggaaacaacctaaatgtctactgacagatgaatggatacagaacatgtggtatatacatgcaatggaatactactctgccaaaaaaaagagaaataatgccatttgtagcaacatggatggaccaagagattatcatactaagtgaagtaagacagataaagacaaataccatataataatcacttccatggagaatctaaaataggacacagacgaacctatctacaaaacataaacagacccacagacatagagaacagacttgtggttgccaaggaggttggggggatgaggaagggatagattgggagtttggggttagcagattaaaacagaatggataaacaacaaggttctagtgtatagcacagggaactatattcaatatcctgtgataagccaaagtgggaaagaatatgaaaaagaatattcactgaatcattttgctgtacagcagaaattaacacaacattgtaaatcaactatgtgaaacttgctcagtcctgtccaactctttgctactccatgttgaaagtagcaaagactttttgctactagtaatactgtactagtagcccaccaggctcctctgtccatgggattctccaggcaagaatactggagtgggctgccattcccttctccaggggatcttcctgacccagggaatgaacccaggtctcctgcattgcaggcaggctctttaacatctgagccaccagggaagtcctactataccttaataaaaagaaacataaatttttttctttttttctactctttttagatgaaactctctattcttaatctatttttagagtttttgtcaagaatagatgaattctgttacatgtttttgatgtctcaggataattacatgtactgttttccctactgatgtcaaatactgtgttttgaaaaaaaatagtttttcttgatttagaccagaaattgcaaacttcttttgtaaagggccaaaatgtaaacattttaggctttgtgagtcatatatggcctgtgtcccatatttttgtttcttttaacagtgctttaaaagtgccaaaactcttcttagcttgtgtgctgcccacaaacagatcaatggcaacaggatttcgcctaggctatagtctgcccaaccagctcccaattccctctccccctctcctcccatcaaaaatgggttattaagtggctataatactaagagtattatgtcacaaccccagaaagacttaaggtggtacctagtaggcccagagattgcactcatctcacacactagtaaagtaatgctcaaaattctccaagccaggcttcagcaatacgtgaaccatcaacttccagatgttcaagctggtcgtagaaaaggcagaggaaccagagatcaaattgccaacatccactggatcatcgaaaaagcaagagagttccagaaaaacatctatttctgctttattgactatgccacagactttgactgtgtggatcacaataaactggaaaattctgaaagagatgggaataccagaccacctgacctgcctcttgagaaacctatatgcaggtcaggaagcaacacttagaactggacatggaacaactgactggttccaaataggaaaaggagtacgtcaaggctgtatattgtcaccctgtttatttaacttctatgcagagtacatcatgagaaacgctgggctggaggaagcacaagctgcaatcaagattgccgggagaaatatcaataacctcagatatgcagatgataccacccttatggcagaaagtgaagaagaactaaagagcctcttgaaagtgaaagagaagagtgaaaaagttggcttaaaactcaacattcagaaaacgaagatcatggcatccagtcccatcatgtcatggcaaatagatggggaaatagtggaaacagtgggtgacttaatttttctgggctccaaaatcactgcagatggtgactgcagccatgaaattaaaagactcttactccttggaaggaaacttgaccaacctagacagcatattcaaaagcagagacattactttgtcaacaaaggtccatctagtcaaggctatggtttttccagtggtcatgtatggatgtgagagttggactataaagaaagctgagcactgaagaattgatgcttttgaactgtggtgttggagaagactcttgagagtcccttggactgcaaggagatccaaccagtccatcctaaaggagatcagtcctgggtgttcactggaaagactgatgttgaagctgaaactccaatactttggccacctgatgtgaagagctaactcatttgaaaagaccctgatgctgggaaagactgagggcaggaggagaaggggacgacagaggatgagatggctggatggcatcacagactcaaaagacatgggtttgggtggactctgggagttggtgatggacagggaggcctggcgtgctgtggttcatggggttgcaaagagtcggacacgactgagtgactgaactgaactgactgagtaggccctgttagccagacaaaagtagagtattactaaaaattttgaaggtgttttttcacataagccttacatgcccgaagtagagatctgtctgaaaaacagaaaaaagtatgttagaacacctgcctagttggatttcactggatgagtgactgcgagtgccttctctcactctcccttgttgaatgcaagtatgtattgtggttaacttgttcctatctcatcactgtgtacagggtgtgtaggagtagataatctgtctttttagttcacgagtctctcaatcaagaagagctgctactacagtcctgcaccaggaagcctagagtgcatagagaactgatgcataccgtgagcttgtggacttccgactggatgccatgtgggaacattacttggagagtcctggaagggagtatgggagagatgctaataatcatggccagagggaaaacactatggtagataaaacatggccataagtgatttcctcccatcaagtgctggagtctgtgttctcatcttttaaatctgtgctggccaagtgacttgcttagaccaacagaatgtggcagaagtgagattatatgactttcttcagcttccccctcagcctcttggaatgcttccacccatggaaagaagctgagactagccttctgaaagatgagaggccacatggataagaaatgaggcagctggccaacagtcccatccagcagccctcagtcttctgccaaccaactgcacattcagatgtaatccctgctgacaccataaggagcagaggtggtgatcccagctgagcctgtctgaactgccaacctcacagaatcattagcaaataagtcatttttaatgccgctaagtttctgaattgtggtttgttacatagcaatcagctgatatactcactgctcccgtctaccagcccaggtgtaaaggagacaatgcaatggattatctactgctgtccagtggctaccatttccactgtgatcacactcccactcctccaagaagtaggaatgtcagcatctgctatgctccctcatccctgttagaccaatcatacacaggtaaattctggcatatgtgtaaacagaatctgcaaaactagatgtagtaatttaaaattcattcattgttattacctttactaaattgaaaaatgtgcattattctccaacagaaacaattcttgctaataatattaccagtgactgacttgtcaaatctgaagaatacttttcactccttattctcttacttaaaaacctccctaatattttcagaataaaattaagattccttactatggtagactgacttactatggtagagccaactctttgaaaaagaccctgatgctggaaaaaactgaaggcaacatgagaagggggtggcagaggatgagatggttagacagcatcacccactcaatggacatgagtttgagcaaactcagggagatagagaaggacagggaagcctggcgtgctgcagtccatggggttgcaaagagtcacacatgactgagcgactgaacaacaaaactacagtagacaaggtttgccatcagtttcaaatcaaaatcaattgccatcagtttcaaaatcaaaatcaaaataattgttatttttttaggctgggcaattttcaagtttacaagttttcaaaaaacttgtaaagatctcagtataaactttcagtctgttatctttaatcattaaaaagattatatttttgctatttaagcattttttccctaagaataaacagattaacatttctgtatatgataaactatgaccaaattgggtttattccaggaatgcaaagttagttcaacatttagaaaccatcaatataatccacctacacttatggaaaaaaaaataatatgatagtgtcaacaggcacagaaaaggtatttgacaaaatccaacattcattcaggatacgaactctcaacaaactgggaataaaagagaatttccttattgtgataaaaggcatctgggaaaaatctagagttaacttaagacttaatggtgaaatactgaatgcctttccctcaggccaaacacaggcaggctgtccactgtcatcacttccacccacctctgtactagaagccaaagaaaaacacaagaaaatgaaataaaaggcatacaaatttgaaaagaagtgaaattatttatagatgacatgattgtttacacagaaaatcctaaggaatgcacagtaaaacttcaagatagataagtaaataaatttagtaaaatcacagggcacaaggtcaacatacgaaaatcaactgtatttctatgagcagcaagcagcagaaaaataaaaatttttaatgccatttataatgtcataaaagaaataaactatttagaacaaatttacccccaattacataagacctcaatgctaaaaatcacaaaatactgtggagaaatttgagaggactcaaataaagagatttatatcatgttcatggattgagaaactcaggattattagcatgttaagacgttcattctctccaaactgatttctggattcaacaacatcacaactgaaatcataacaggcactttgcagaaataataagctgattccaaaatgtacatgggaaggcaaaggatctagaatgttcttcaaacattcttgaaaaagaagaacaaattagagaacttacaccatttaatttctcgaattactataaaagttacagtaatcaggacaacatagtattagtgaaagaagatgaacagagtaggagagagtctaaaaacaaactataaatatatggtcaattggtttttaaccaagatggcaaggtttttcagtaggggaaagaacagacttttaagaagaaatgttgtggaacaaatgaatgggcaggcagaaatgaaccataattcctacctcacaccatattcaaatattaattcaaaatggatcacagacctaaaagatctaaaaataataacaaaaaagcccctactgggaaaaacattggagaatatctgtgtaactttgggtttgtaagaccaagatttcttagacaagatataaaaagcactattcacacaaggaaaaagttggcctttctaaagacattgttgagaaatgtaaagtggggctgtcctggttgcccagtggttaaggttccatgcttccaatacaggaagcacaggtttcaccctggttggggaactaagatcctgcacgcctcatagctcagcagggaaaaaagaaagaaatgaaaagacaagccacagagaaagtatttgcaattcaacaaagagttttatccagaatacataaagaattataacaactggattataaacaaataacctgagctttatttaaaatgaacacaaaacttgaacagatattcacaaaagatatacaaatggacattaagcacactaaaaagtgctcaacatcatcagttgtcacagaaatgcaaattaaaattgcagtgagacactatttcacattcacttagaagggctactactaaaaaaaactggcaatgtcaaatattagagaggatatagaacaactggaattctcatacaccactggtaggaatgaaaagtggtacaaccacttcgaaaaacagtttggcaatttcttatactgctaaacacctaccctacagccaagcaatcacacatgcctggatatttacccaggagaaatgaaaatatattcacacacagacatttataagcatattcacagcagctttattcacaatagtcaaatgtaaacagcccaaatggagaagaaaatggcaacccattccagtattcttgcctgggaaatcccatggacagaggagactggtgggctatacagtccatgggggtcacaaaagagtcagacacaatttagcaactgaagaacaacaacaaaacaacccaaatggttaaacaacgggagaatggttaaaaattatggtatatccatacaacaaagcactaaccagaaacaaaagtaacgaactgctgatttaagcaacatggatgaatcatctctgagacacaagcatacatactgcatgattacatttacaggaagtactaggacaagcaacactatacttcgatgttaaaagtcagaagagtggttatcttgcagtggggggaggggagtggctgagtgaaaaggagtatgacaaacctttctaagggggtggaaatttctaaccattgatttgggtggtggttatagaggttacagatttgtcaaaacttacccaacaaaatactgtgcatttcctatacatatattatgtaccaataaaaagtctgcttaattccttagattaactgttaataaagcagaagtactgcaaggatttaagctgcctcttctccagagtatccaagaagtgtttcaacatatgagaaacagatagataagaaaagctaaagtttctccggtacagctttgaatccagtgctttgatttcattttaaatgattaaatcttacatagttaaattcccatttaagagcctaaagatcattctccattttctggtttaaataattaagtcttgggaagtcttattttttaaatggctattcattaatattttattttcactctacttctactgtccctaccagcattgctacagatattccaaaaagtgagtgactagggagaaagagggcattaaaaaaatattgccatagcaaaaaaatgctgcaattatgagttgaatgatttcaatcatttaatgggcttcagacagtaaaaaatccacctgtaatgcaggagacctgggtttgatccctgggtcaggaagatcccctggagaagggaatggcaacccactccagtattcttgcctgggaaatctcatggacagaggagcatggcaggctacaggccatggggtcgcaaagagtcggacaggactgaatgacttccacattcacattcaatcatgtaacagtacagtaatagatacttcacaactcaaaagagaaaggcagaaagtagatcagtgtttgctgagggccaagggggacgggagggacagggaagtaatggctaagggcaccgggtttctatttgagggggtgaaaatgttctaaaactgactgtggtgacagctgcatttctgtatgactacattaaaaaccaccaagtcgcacatatgaaatagattaattctttgatatgtaagctatattccaataaagctggcattcaaaaaagctattgaaagtttgactgggattatattggaatttacagatcaatttggagaataaaatatatttattatattgactttttcccagtacatgaaaattatgtagttctgctcttatttgggtattctttagtttctctcaacaacattttatagtattttatagagaaatctatatataatttatcagatttattcctggataactggtatttctgatgctatataaatagtatcttaaaaaaaaagagagagagaacacagaattgttctaatgtggggaaagaagataaatagagcatgatatgtatactaactcatcaaaattttgaaatataaaatcatcaaatgtggtctaacaaatcattttttattttaaaatttatttatagaagccatacaaatatttaaaaattaaattccatttagtcatatttgatcaatcacattaaaaaagaataaaattacataaacctatataatgttataaatcaatgctacctcaataaaaataaattaaatttaaaaatatataaacctgaaaatattctgaaaaactcgatgacaggtagacaccacagggaacaaatgcgtcctgatttatattgttaggtttcttatcttatagtgaaaatagccgctttaattttagtatccatatttacccaatatatgtatttcttagcaaatgctttcatgacaaggaaattttattttacaacagttaaatttacccttaaagctgtccatcatactggtgctacagagtgtttactatcctttaaatttaaattaattgaaatattattatctaactacattagttagtagatggtgaaagcagatggtgggcttttctttcataaaataaatatttgttttctaataaaatgaaatggataaaaattgcatttaggcttcaagttaaccttgtttgagttatttaatgtttctggatctcagtctttcatctacaaaaggaggttagatgaaaacatctccatagtcccacctagctttaaaattctgttaattccataatgctaagttgcttcagtcgtgtctgactctgtgcgaccccacagacggcagcccaccaggctccaccgtctctgggattctccaggcaagaacactggagtgggttgccatttccctctccaatgcattaaagtgaaaagtgaaagtgaagtcgctcagtcgagcccgactcttagcgaccccatggactacagcctaccaggctccttcgtccatgggattttccaggcaagagtattggagtggggtgccattgccttctctgaaggaaacagcaaaataccatatggtcttaccattgtttaagcaaacacagtaatgtatgaaaaccagatgatttagtaattattagtttacacaaaggactctgtattttcaccccagaattggcaagttctctaaatataatttacactacactttaaaaaaatacacctgatgcttactgaaagtactaatgcatgatgtttctgaatcacgatcttatccttactaacaaccatagttatctcacactgatattaaaattaaaaagcatactgtatatgaaagcattttagaaaaaaggctgtttataactgtaagatattttagacattttggaaagtatccaaataaacaatatgttcataaatggagttacttttccttgtctgagtgatgtgagagacaggactttatctcaaagagactatcagaaattatgcaacctagaaattacttatctataattaaaatttactgatgaaaaaaatgatttgatatgaaaatgttacctgatcaatgatagaatttagcttcgtaagtaacagaaatcctcggccatggacaaggtattgtccgagggttgccatgtgggtttcctcttcttcttcctccctggcctccactctctggaccactgcattgcaaagccggttgacatcggtcagaaactcacgcgccaatgagttactgtcagtgctcatgaccgagctataaaataaatattacagaaaagattagaaaaataaaaatgttgcataaaactattaatacgtgattttgttgctatttgtttttaatcgaagactgactttaaattatatagtaatttaaagggcattggtacctaaccttaaaatctttcagacatagttctgacctagtctggtactccttaaatattcctgcaaagcagaaattagtcctgggtgtgaaatgactaagcaagcatgggtaagtgaaagtgctgggaaagaaaacactgggtgggtggtggcggttaaagtcaatgctgacttcctctctaaaagggcctcactctagaataaaaataaacccattacttataaaatactcttgttgtacatattttgaaagataattggatctttaaaaatataaactgtttttcacctgacagaacccaaagacgctgacatcattctgtaggttttgaggctgtgcaagtttttcagtcttaccagagaagactggtagaaagtaactaaccaggaaacacggaaaactcatcaggtgtagtgctgacaacgcacacaactcaactgaggggctgacactgtgaacagctatgaccaagctcattcaagggtatgcaagaataaccagctcttccacaaatgcagcccactgactatagaagacaccaacagttgcaaggcacgctgcaactttagaaatttttaaaaatgtgaaaaacaaaaaaactgtggtaataattagggcctatcttctagaaattaaaataatagaaattaacatgaatttttagacaattgatgaggaaataacttcaatcccacttcctaaaagcataagacggccatgtcagtaaaaagtattatatgcagaaacatttttccatatttaaaaatgtatataaaatacatacacagttacatatatagggtatcatacataaatgatctattacctgattgtttcatttagatagtttggaaatgttcccctgaactctttctctgtttaacagctgtatgcttactttttagtacattccactgcatgtgtaattttacatatagtacatgtgtttccttagtagatgtactgtaacaatgtagccaatttgtcattgttgaatatttaggttgtttctagcttcttactatcataaacaaactgtaataaacaccttataatacctgcaaatttaccccattatttccttgaagtagaaattgctgttatatatttctgttaggtttattccaggtgtcttatagttttcatctttattctgaatgggattttattttccattatatattccaactaggatacaaaactggtatataggaggcctatagtaagtagatttattttgagatatccaaacctaactcctgtatccaaacttcctactgaactctcttattgatcttattggaatttccagatctaaaaccgtgtcaactacaaataacaaaatatgtgaacttttccatccgatattcacacacttttcactcctctagctgcattagttattaacagcactagcagaacaacactggcaggagtgatgggggtacttctgcttggcacagtaagaaatacttatttcttcccacgcatctaataagaatgatgaatttaactgaatgtttttcagccattctgaatgccaactgaaaagatgattacatggcattttttaaagatttttttgggaacatttcaaatgcccaggaaaaaaaaaagattctataacgtgaggttatagcaaatactcagacttcagatctagcaagtataaactatattcagttcagttctcgtgcatggggggatgggtgtgtgcgtgtgcatgtgtgtagagaaatcaaactttatagtacaggaaagctacactccacccatacctcttccacctccttagttgttgttttatcatttccatatatatttttataattttgatacatcatagtcataaaatattcagtatcatttattttaaaaagtatgcatctttttataattttgcttttccctctcaacattaagttcactcctttaggccactgtgcaatgtgccatagtatgaataaaccataatttacatgtctagaaagtttaggtattttcactttgggttttaattaacatcatatcactattagtttcaaagtcttagactgaatcaagtattttggctgttaatatatgttacattaaatactcaccgatctttcaacacttctgtaacatttagggtctttataatttgagttcatgaactggacgaaacaaatattcttagaacaaagctacacctaccaaaaaaaaaaaaacaggataaaacaaaacaaaacaggataacaattaatggcgatagctaaacacaaataattttaaaaattaaaattttgacataaaaaccagaagctagtcttcatatttgatgtatgaaacagccaacaattttttaaatctcaagagcacactaaaaaatgcctgtagctttaagaatgggatcttgagagatgaagtcttgggacatatttgatctgcacaagacaacctgatcacagctccctacacctcctctcccaactcccaacttatagcctccagtaaaccacgacaaaggaggaagaattgggcaccatctgtcttcttaataatgaaatctagacagcagtagaatatcatctatatactatgacagtcaagttattactttcctgtaaaagatatttgaggatacatgagaactcagaaaatactacacagccaacgaatgaataaaccacctccaagtttcctaccctttctaaattttaaaaaatgaattaatctcctacgtataacacagtgaaggctatttctagaataccaaaggataaattcctacttctgagatagcaagaagatgcttctctgtagttttctcctttgctataacttttaccaggcagaggcatgaaaaatattttctgattatagctataaggcaaacagtaaggtttattttgagccacaagcttttaaaatcaaaatgacctttaattgcttgaagtgaagtgaagtccctcagtcgtgtcggactctttgcgaccccgtggactgtagccggctaggctccaccgtccatgggattctccaggcaagaatactggagtcatttccttcttcaggggatcttcccgatccagggattggacccgggtctcgcgcattgcaggcagacgctttaacctctgcaccaccagggaaaccagagcactgtcttgaattccgttcagcttgacagacggttcttgtactacacactattctaggcccttgagaataaactaggcaagaaataggacagaactgccctagactacacaggactttgtgtgaattagggaaaaaacacttttcctgggctggtgcagcgcatggcacacagctgtcaaagcacaggctgggtctcagtcttacctgctcactccactggccaaccaccagggcatcaactgccccaccaaacaaaacagtcctggagtggagtctccaaacgccttccacacctgcttctactgcatcaccctcatatttttaactctagaattacagacaaggaaatcacctatcgaacaatgagcgtaaggaagtactgtatgaattgctctggctactggcaccctctagcctggattactacacgatggagccatttatctcagatgct

SEQ ID NO: 73 - DNA, 36106 bp, Hippotragus equinus
  source 1..36106: mol_type = genomic DNA
aaaataaagcgaagggctatgtttcacagatttgtgcaagtttctttcaaatctcagtctgttctttcatcaaaaaggagatcgcagcatctgtgttagtcctcatgatgaaatagtaaaaaactgcattccattgacaaaaaaaatagctttgcttccaaacagcacaagtctttaaagtgacttttccccaacaataaatatagaaaatagcctttatggagcacgtctggcttggtcagagctgcttcctccccgatagcctttagacgtcgtcttagtctttggtgcatgggcggccggcgagatctgactccaggctgcccttcggggccctccagtggccccagccccgtgcagcacaggctctcagctactgcaaacgcccagctgaaggcttgagccctttcgagccggggcccctcagaccccacggctccacctgccccgtggctgcccgcgaaggcgctccccggctctcacggccggccgggtggacatcacaccgagggggcctttggcgggtgaacctgctgcacgagctgtgggcgtttcaccctgggcttcctccgcttcggcctgctcttggccttgttgatctgcaccacgaagaaggccaagaccaccatggctcccaggaaggcgaaaacgggaatggtctggcccacctcctggttgtagcggccgggcatgatccctgcacgacagtgggaagatggtcagtctgacggctgcaaccagctgggctcgtagtgacccagacgaaggaggagagaaaagtgcaggccagcagggaggtgaggacagctggcctcgccactgggaaggcccctgacaggtgagacttgtggtgggcacctgagcgtggccgctggtggaccctggggttcgtgctgccatcagctctgtaaatggacaacgccagggttccagaacacatggctggaccacatgggacagggtaccccttcctgatccctggagtttttctgggcaattcctagaaccaagagaaatgcccccaggaagctataaagtcatgtaagagcatagggatttccagagcagaagaggggcccacactctgccagaatgacttgattccattgtcccagataaaggactacctgcccccaacagcctagccaggccaaagccattatcagggttgggggcgagggagggacatctgatgtcacttgggggaagggacacccccaaaattaactgggcatcccaggttagggaagtcccatcccaggtgggctggagcagagaattggtggagatgtctgggttgagggttcagagtcaggctgtgacagacgaacatcataaaataaattcagatttgaaaattcagataggattttctaagaggccacagtgtgttgatcctttaggtctgctctggccttgtgatttgtaccaggaagaaagcctggaccaccgctgctcccaggaaggcaaagacaggaacagcctggcccacctcctgggcaaaagggagaggctcttttgaataaaccataggatgactcagccccacaataaagcacctagaactgacctccaggaatgtcccaggctccactctctccaggagacaagggcctcacttgagggcgattcgatcggaagttgggcaataccactttgtccaggtcaatggagagcaacttctggtgtttccaaaggttacttcaggaaaacagattcaaacaaaataaacattagcaactgtactggccccaggcaacttagccaattcctaagaaacagaaagtgatttaaacagaaacgtgaactgacatcccatctatgtctatctaaacacaactgcggacaactgaggggcacttccaggcccccagacgcggacgtcagattgagactttatgcacgagatgcttctagagggtctgtaacaccaccaacgcaagactgtcttggcttcaaccaggcatgacccagcagaaaatgaggaaactacacgtgacctctgaaggagctggtggacagaggcagtggacacagcccggctggaaggaccagtctccgccatgggacagcagagccgtgggcacctactgtgatgtggcaaaggggggcagacctggcgctgggagccagctgtcaccttggtcctcaaggacaccacttgcaggagggagaacgaggcagacacacaagtaaccgagcagtggacagaaacacgggaataaaggagtgggcatgggccttgcctgagggctcaggatgatgaagggaacacatgtgctttgcaaaatgcactggactcgtttcgactgcatcattactctcagtactaactgagattggaagcacatgtaactgaggaagagaggctggtacacagccaagagcagcgtgggaagacacagagatgagagcaaagagtgcagacggaaaatctgaagaccattctggctaaaacaagggaagagaatgaaatatgcttgcaattatgaattccccattctgcttcttattcgtgtggaccttgctggcccatctcttactttggccaagtgagagcagagagccgagttctagcagcactcaagaggcaggtcagtgggcagccgggagatgccagctccgtaaagaggctttctcataagctgctatcgggcacttccagctgggcaactgcttggactataacctgctctattttgtatgatttcactttgcttttcagtttaatcagtctggaaattaaactgacaatgctaagttacggaatcgatgtatttaagctttataaccctgcaggtgaatatacatggggatgtcttttaatgctcacagtgctctcctgttctggaatttaattacccccccagtgaccccttcttgctgagcagtcggggtgacagagcttcacactatcatttgagaattccacaatgtcctgatgggaggacaggttagcctcatgtggggctcctcgcaggcctgccctacagccactcgtagtatggacgcccgacgcccgggaacaacaccgggaactgtgtcccggttttaaggacggagtgaacacccgcactcagcactaggctgacagaccctgacctttccagggctgactggggcactctgacattgttttgcatctcctcagagattcagaatctagacccagatctaggtcgccgaggacggagaacaatttccagcaagaagtgagataaaagtggggtctggtgggtgttttaggaagaaggaattccagagagcgacagtgaaaataaaactctaggggctgcacagcagcagcaccttgatgggccaggctggtacatgacaggctgtctgatggacacacagatatagaacactgtcacctgttctcagagccccgagcagtaccatggagaagaagtgggtttcaagaacctttgctgacagtgactgtccactgagtgtgaactgctgacaacagctggaattaaagtctggtttgaatgtctggataatgataggttataaataaatgagatataaaaatggaatcttatcagaaaattttaaatgatggcatgttaactggaatggaaaagtactcagtaattaaagtttcaggaagaaactgctgacgaggagacaacgtgatgaatctccaatgccgtttcctattgagcatgttctaaacatgacatggtaagcaagaagtatactcagggcttctgttcatgacgacagtcaagcacagaagcttctgggccttctgcaggcagctccctcctcgtggttcactgtgtagatggcagtccccgtgccctgccacacacaccctaacactgtacatgctgagacccaagcaaagtgggcagctggtaggggagagaaggcaggagcccccggaggggaaatggccgcgcgtgtggggtgtgctgcccatgagggagacagtggctggcagctgctcagaggaggaggagccgtggcggggcgggggggtctcccacagccatgccccgaacatggggccctacatcactgtactaggactgcaatcctcctcgccacagcagatctcctgctggggccagagatgccaaagagagaaacgggagaggagcgatccagagaaaataggaaccagtggactgagctggcccttctgcctgaacagagacacagcacaggtcactcaattttggcttctaaaaggaactgacacaaacgaagagcttgagcttgatagccagatggaaaagcaggcagataagtgtctgggcctggcacagtctgaggtcactttaccagggacaacacccagcatggggtgagggcataaacgtgactccaggtcgccccagtgggacacaggaagaccccatctgtattccagaatcaacaccacacacaggcgcactcaactcccaaatctccagcttaaggagtcagagcgacccttccagggacatgactgtcagatcacagcttttcaagcaaaaaccaagcaaacttcaccagaaggctaattaccagagctctttttatgcataataccactagggtgcgtgattctaaaggtcaatacgggggctcgctaatttaaaaaccatcacaaatgacaagctagatttgattattcgataatgatgtcagtaaaattccattctctcctattaaaaaagaagcaatgaatcataaatccagcagaagtggaaaagcacaggagacaccaacctgggagctgtctcgtttaaaggctgtggcttggcccatgacaggtgtggacaggctggcagcgcacgtggctcagggcctccgagccgggcctccaggaccttggagtaccggtgcaggtggttccctgggcagcacccgccgacaggccatcgttgttaggaggcaggggagaaagagacttcgttagtcgttgcttcctctaaagcggccacactgcacgcacagcagcagctgggcccctcatgcccgtaatcacacatacgtgcctacactccaggagtctaacctgtagatacgcctcacggaaacagcatctcttcaaatacttaatgctcaggccaaaaagaaaatctccattttcaaaattccaaattccttttatttctcagatccgtgctgccccttactgtagccactgcccacacatggctactgagcaactgagaggctaggtgccacacatttaaataataatattctggggactggggctgtacagttttatcacaaggaacttcccgtttctttttactccttaaatgaggccagtgggaagttcagaactacaccggctcacaccacgcgtccaaggacagtctgggggaggcggagctcaggctgtgaaggctcgcagaccgggctccgctgagtggcctgctgctgggggacctgggcccatctctttcgtggacttggaagaagtatctgctttccaggttctaagaggactcagagaatagtccctgtgaagccaccctggcccagcgcctggtacctagtgactgtgcagacctgctgactactcctccccagagccccgaagccacgtcgtttcaagtgagtctgcaccccagaacccccacctccgaggccgctcaccttccatcctctctggggccgccgagcctgctccgctgggggggcgctgccgagcccctgagtggctgaggctggggggcgtcaccccatacgacgtgaactgcaggagcgcatccaggagccagaagcagtctgcagggtaaacaacacactgcttaggaagtcgacagtttaaagcagcctctacaggaaaactaaagtgagccctgaacaatggggaaatagggcgggaaaagatcaggtcccagcacggccctgctgagatgctcatgtcatcttggtcatcggctgcccacagggcctcctttcaaggccccaggctcagccaggctggcccacaggctcggggctgcacgcactgcccaggcacccccctggctctgacgaggacgggtggggccgctacagggacagcagggccacatggcagcacgggaacaagtgctgcttcagaacaggggccctgccgaggaggggagagtgaggagctgaccccggccagcgcccgcaggctgtcctggaggaggggagagcccagatctcagggcagagccaggaccaccacgtgtgtccggagaggtgggctcaaggtcagtgcaggcgcagtctagtggtttgggctgccctgagttggtggccccagccacagagtaggatgacagttctcctggggacgtcactgcaagtcctgtgccaggctgtgctcaacaaccccctcatggggccaagtggatggactttcctctccggagaccaaggagctgcactggctaaacctggatcactgcccccaccagcttctccccgcagctgccacgtcccccaaaaccagcacagacaggaggcggctcacaaaaaggaggggatggcaggaagcgcctgtcccccaacggagctcgagtcaagtgctcacggccccgaaagctcctccaggtagccacagggagtgtgggacaggacaggcccccaaccactgacagggccaataaagacgcttcccaagacctcaggtctgcaatgacagtctctacagaaataaaacattaatcttctttcaactataactttaaccgtcacttttgatttttattaaaaaaaaaaacaaaaccaatattctaatgctttacgtgaaatgctaggaatgcagttacttaaccttcacatcacagagagggcacagggagagagagacagggggagaggtgcaccccaggtaggaggccagctatgctcaggccaccttgccccctcccatgaagcctggtcaccacctgcccatgaggacacgcctccccctgccctcctgcccccgaagactaggttctggttctggtcttgttgtctcccctcagcagagacagaacactcacacccatccacccctcctttacaaagcaagagaaagacaagtctgtgtccaagctcatccttcaaatgtggactcatcaagagatgctggaaaagaggggtgctaaagaggggttctaaggactaggtgccccctctctgccacccccacacccaacaatggtaccacacacccctctcacaacagccaaaactcccaggtctggcatgagggccaagtgctgggcctgcacgaaaggggtggtcagatgcaagaggggacctgcagagtagtgccagagacacagatgccagagaggaagtcagagagggcagagacaggtaaacagcctcccacccacacacggtgggtttgccatctgccagcctctctggaaggccacaaagttttgttttgcttattaaacatgtctggcccaaaatacctatcgaaacatcctgagcagcctctacctgttcatcagcacctcacaggggcctgttcggggactaggacagaaagtgggaacgtcacggccaccgagcccacccgctcagcagcaccactgctcacccttctgccggtgactgtcgtccaagcagttggagtctccatacagcacgacacggccgccgccctcagctgggagctggtacagccccaaaatggggacgttttcaaccaccaccgtttcctgcttcaagacctctagtcctgaaacaacacaacaaaacaggagtgagaacttcagcgaggaaatgaagcacttcccagctgccccttaagttgacatttagtccacatgacaaaagagaaagaaaaaaaaaaaaaatcacagtaagatctaacatgcagtcacaacagtgcaaacttataggagaagaaaacaatgtataaagtgccactaatttgggttgtagcaaaattcgtgcctatgtgtgtatgtatattcccataatcctccttttccattttcacctgaaatggtgatacatggtattcacagctttaaaggcatcacttctctcttttcatcccccaagcacaaatttttgtcccttattatgctaagaggctatgtcttcagactacatacacacaagggccagtgccccctcaacacacaggtacctatgcacacagttatacacactgatgcccaggcttcatgtttcgtaacaaaagctacgacaatgacactcatctttaaaacacatgcccacgtatttctgatttaagttatctgttacatgagtctcacagacacagtacaaatgctccaacagcagagctgtctcgcctctgcccaaaccgatgacaattcacaacatcaactgaaccaggacgaccctgcacagacgccacggcagctgctgccagtgacaccagctcgtaagcagagcctcggcccctgaagcacatgcagccgcacaccgagatgacgcacatctgcatccagcgcctaccgcaccagtcactctagagcatatgtctacagggacgcagagcttcctatgctctgcgtataagcccccgggaaccccgcggaagggaaacaggcttttcttcgtcagagggagagacagggcagtgaaacacacaaagcaaggaaagtgcagcctggcctcggggtctgacagggttttgcctccgacaacaaggtcctttttgatccagcataacccagatttttaaattcctattttgtacccgcaagattatgcaagcaacctaaagcctgtttggaaataaaaagccctttaaaaaggattccaaggtaattaatctttattttcagactagcagaacaccaaagtaaagtatgcacccttaacctacttcctctccccccaaaatgaagagctaccagacgccaagaggctaacaaggagtccacggcctttacctgggggtggagggggtgtccagaagcgacacggcctggtgaacaatggagcttagaaaggatcactaagacacagtacagtgtgccaggggactgggaagacaggatcatacacgtgcttaaaagttaaaacataatcttatgaacacagaactcctcactgactgacttttccttgactggatggaaggagccccttccaaacaacacagaagtaaatttcaccttgcaaatgcaaacacatgagtgagaaatctcctgacttgtcattttctattaatgaaactgtccctgacttcaaccacagaaaatgacaaacatcccaatgaagggggcctgccattctgaaacacaagagaaacatccacctgcacgaggacacggatccagtctgcaagtgcccatcatgtggccatgcaataacctcgcaggggagagaggtgcggcgcggaccccggctcgggagcgcagggctacaggacgaccaccctgggcaggacgggggcggtggcgcctgcaggaagggcagaggcacccaggcgccccagctcccctgcaccctgtctgctctgtgagccgagcacggtcacagcaccgacgctgggaacacagcatggttgaccttccagggttagaaaagagcaactgaaagcaaagacctttcctcccttctaactcttcacagaatcttaggagatgactttgtattacaatattctttaccttcacatagttaagacattcaaaacagttaacatttctctaaaattttagtcatctggcaatcacagagcagaacaattcataaatagtaacaaaaatttcaagcaactctgaaggtagtttaaaaaaaaaacacaaaaaacccttaccaataccctcttctcctataggaaaatcaacttactttgcagtgctcactacccacgtattctaattatcagcaaaagatggttgaaccttcctaggtacctccagaatcatcacacagacgtcttacctgaagtaccatacaaacactgtgatgaatttttaaaaaatccaaactgctaatggagaatggacttcttttctggtgatgaaaatgttctgggactaggtggtggtgatgactgcacaacttgtgaatatacaaaaataatcactgaaccgtagactttaaaagagcgaatgttatggtaggtgcacgcatgcatgctaagtcgttttagtcatgtccaactctttgcgactccatggactgtaacccgccaggctcctctgtccatggtgttctccaggcaagaaaactagagtgagttgccatgccctcctccacatggtaggtgatttatatgtaataaaactgtgattaaaaattaaaaagaaagaaaaagagaaaccaaaaagcatatgaatagcatattccataccttggtccttaaatgtctgtgttatcacgatgccatcttctggaaatttagcaatgctgcaccctgacgcataatacactagaataaacagccattcacagttagaacctggaaacactgaaggcattcagcagcagctgttcatttacctgtatgcacgttttagacattatgtatttactaaaaccattcctgatcttaagagaggagctattattattggctggtcacatagactacaagtaataatctcaaaactcaagctaaattatgctattaatctaaggtttctgggcagattaaagaaatcggagctgtcagactcgggacaacctgtcagaaacagcagttagtgaataatgctcaagacgctgtttcagaaactagtcaccagaatgaagtggggtacttcttaagtgaggtatgcaatgttatttcataaatagaatttcataaataatcagggacctgcacagtgttccttatttgggaatatacagaacacaaagaaccaaaactaggaatgctgacaggaggtattttatctcccaaatctggacaaagactagggggaacacccagaattgcaggtgtctctgtgcagacactgctcagttctctccacaggtcttgtagatttaggtgacagcacattattttctctctctctgaaaaactcaagacttcaaagacgcacggcatctgctagcccacctctgggaatgacgagacctactaaaagcaaacacaaaaccttactgtcatggttcgccaaggtaaagtccccctcgtacaggccatcgctgaacgccatgttccagactgacagcagctcgttcagggctgggacgttggctcctccggtgtccggcatccaccactgcctatgacagggacagggccttcgtgaggcacttgaggcatcccacaaacccatcatattttgtgagaaaaccgatttctcccaccagaggccactccatccacactaggcttcacctaaaattaactgtccgggtttgagtaacagcacaatgtaaatgctccaaccagggtacagaataaaccgaagcccaatttatttcatgaaatgtaccacatttaacataaacacatgcatataaagcctacaccttgagaggctcagtgaaggaagaaggaagcttatgaagttcaagtcacagactccgaagaacgaacatgtatcataaggatgagacattcataatacactggaaatttgtcatccataaccatctactgcaaggttctttaaataacagttcttttggtgcatttaaacatatacagtaaatgagagatggaagaacagaaaagaataaacagaaaactaaggctccagtgtcttaagatcaacaaaaacaatgaaccctttcaactagcacttggttcaatgagcatctgactttcaagaacatctctgccaaaggagatcttgccctaaccaggagtctgaacctgcttgatggccagaaaggtcatcactctaggcctctgctgggtgggatttaattcctataaagtcaaatttcttatccaattcgtgtcagtacctcgtgttttcatcataaaacttgactttcctcatcacggatgtgttgtaccagtcactgaagacaatgagtgagaggccgttgtccacatccctccgcagcttggccacctcctccgggaagtactcttcctcactgtccaccatgagcaacgttcctgagggacaggggtgagaaacggtcatctcaccatttcagacatacggttttacactggcctcagtatctccagttactggcttctaatattttgtcctgtgcccctattccacgtcagaaggggatgtaaaagaaaggatcagggtctgaaagcacgtggacactggccagctatggcctgtttcactggtgatgacctacatgaggatatttcacttactcaaaaagaagcaaaattctgtgctagaatttctttgattaaaaaaaaaaatcaacaacttattgaccagaaacatattaataatacatattttgttactcgaacattactgaccggaatctttcaattttcacttacataacaaatcataggccacaggcgttactttctgcaaaaatcacccagtcaataatgttgatgctaatataacgaaactgtaccaaatgtccttgtccccagtgatcctgagagtttcacatttcagctgaacgtcaggagcacagaccctagcctggcctcacccgtccccagccaagcggggcagcctgccagcacctggcatcgctcaccgtactgattagcatcaaagcacgtgaagggggagccgaggacttcgacgaagtagcccatgctcctcaggtgctggtacatgtccctgaagttggtgtggatgtggtcaccgttcctgagacagaggaagcccagcactaaccctcctagtccttccacggactgaaggccacatggccgcggggttcacttccaaaggagcagtttcactgcccagagggctggtccactggcacaaaagccagcctttcagaccaactcgccctgggctgcatatcaagtagtgataacaggaaattacctgcatagcatagacatgaaggagagaaaatgacgagaagacatagccaaagacatgttttgtcaagtgcaccaaagcatcactttagtggtggcacagatgtaaaaggccagcaagcagccagctgtgctgcacaaactcagcatgggcaagcagagatgctggcagtgaaccgcggtggccacataggcagccttacatgcctgccacaggtcaccctccctcccaccccagcctagccggggaaggacagggcaggggtgatgggctcaccagtccagagggtcattcttcatcctcaggttgtcccgggggaaatagccgggcgggtagcgcaggttgtggtactggtcccagaggacgcgcttgctccggggaggggcggggatgatcttcaccttgatcggaagcttcactgtggacgtctgttctgcaccactgtttgactgaaggaagagaagaattctgaaatgccccttctgctcagaagaaacgttttatgccagaaacgtggcacggaacagcccacggcctcttcaccgtgcaggccatgcccccaggtgctcgccaggccaggacccacatggcctgtgcctcatacccgagtgcccggcgctcagcccacggccacctccccaccagccccaggcacacgtacgtccacctctgccggggaagccacggtgaccgtgacgtgcccctgcgcaacgccttcccaggaggcagccttcttggtgacagaaagggaaatggccaggtagccggaccagggccacagcactgaggagtaggagaaagcgacctcgatgttgtctccgtgctgcggtaagtagggctgccactcgggctgcaggaggaagaggcagaggcctgggtgagaagctcagttcccaacttaccaacgttggtgtctgagaaacactccactaaacaggcaaagtgaaatgtacaaagacactgagcagcctgtaaccaaggctgcccaggctgggtctggaccatcatccactagaaaagcctagaaacactatttttgacaaaacacttgttttgacaaacttcagttttaaagaaaaatttcctcccctccaagctttaacaaaggaagggatggggacacacatggtttgacaaagaacttgtttctgacagataattaacataaaagaaaatgctcaaatgtggggttagatctcagctgtgtgcttaaagaaccaaactacttaaaggaataaaataataaaaaagacacagatgtaaattgtgaccaattagataccaaggtcagtgactgggcaggcaggggcccaggagccccaaagagagctggccatgctgtgaaggagaccacccgccaggctctccaggctcgaggaagaagggaagcctgaaaggggagacagacagtggctctcacaatgaaccagtccttcaagctaactccctcacaagccagagaacagtcatatacttcccaggagggtaagcatattaaaaaaaaaaaaaaacaaccgtgaaaaagaagaaaaatattcatgggatatagtatcacagacaatgagaaaggacagggattttgaataagttattttgagactgctggttaacaactgagaaaaaaatgaactctcatccatctcatcagattgactcaatacagatgaaaacattaaatatttaacaagcataaaagaaaagtgagtcaaaaataaaactgaaattttcttatatttctggagagatgagtttctagtttttgaaacagaaataatcataaaagatgaaaataacatctacatgaaaaagtgaaacctttaccaaaccacccccttaccccaaatttttaagccacttctaatattatttaagagacaaaacccagtaatttcggccatctttcagcatgacactcaacaccggagtgacgatgacaaggacaacctagactctgacaaacaacgggtcaagaaatgaaaagctaattcacataagagacacagaatcagaaacaaacatgcagatccccaactcatcagcaaccggaaaagcacacattgaacaaggtacccgctatcccctgtagagttaaagttataagatgaaccacataaaaacgaaaggctcatcaactgacgatgccgggtctatccacacaagaaggcacgagaaggagtgaagcactgacacactgcagtgtggatgagcctcttttaaagacactgcactcagtcaaagaggccagtcacaaagaccacgaaacgtatgattccgttcataggaaccgtccagaaaaggtaactccatggagacaaagtgcattaggagttgtcagggtctgaggcggaggcaatgggaagtgttaacaagggtctctcctttgagtgatgaaaattacacagaattacacagtatgagacttaacataactacttgcaaatatagtaatacccactgaaatgcacaatttaaaagggtagcattgcatggcatgtaaattttatctccgttttttaaactttcatgcaattgggaaaaaagaatgtaccaccagacacccccactctgtacaccatcagtggcagcctcaggtgatggacctcttctggaaaccatttcatattatgtcccaagagccacagtaacattcatgtcctcttacttggaattctaacccagggaaattatgttaagaatgtaattcagaacaaaagaaaaccaaacatacaaagatattcagtgaggtatttacaggtgaaatcaccttgttcaagtaagaatagtaagaagttatgacttagcagttccatgtaatattgaacaaccattaacattagcgcttatatagaataacatttttaaaaatgctttaacgtgaaaattgaaaaaaaaaaggactaaatttttgcctacccacacaaagataactaaaaatatccttttcagataagggatagaaaagattcttttttttcccctcccaggcaactgacttttattaatctcacaaaatcaaaagaaatgtactgtctggggatttccctggcagtgtgcttccactgcagggagcttgggttcaactcctggtcagagaactaagaccctacatgacacactgtggccaaaaagtaacaaaaagaataaaaaaaaaaaagtactttctgtgatagcttcatgaaaagtgaaatcctgccatcaagacattctgcaccaatcctggtggcctagtggttaaaaatctgcctgccagcgcaggggacacaggttccaatcctggtctgggaagtttccgtgtgcctcagggtacctaggcctgtgcgccacaaccactgaagcccacgtgcactggagcctgcgctctgcagcagaagccaccgaaacgagaagcctgcacactgcaactcgagtggcccctgctggcagtaacgagagaaagcctgtgcacagcagcaaagactgagcacagccaaaaagacagaagtgagatgaaacaaaggatgacacagtgtcgacaggcactgaatcaatttaaatacacttatttaaacaactacagtaatttgttacaaaatatgacttgaacttttttttaccagtggttctgttcatgtctgaggttaaaatcatttttctgttctttttccctatcctttattgttgtgataatgtttatatagaaagtgtaaaacaaattataaaaacaaaattcaaataaagaccataccttctaaatacaaacgcccatgtgtacacattaaacaataaaataattacaagtgggcctttaattatcagtgattaactgttaagatgaagactcaaatgcaattagctgattcaggaaccaaactcaaaatgcctagtataaccatagcaaattggtctcatcactgtatctctgacttatccgtaaaggcctcagaggagaacaaacccctgcttcccatccccagccgtggacaggaggaagcctgggccacatctaggtccccggcagccggagggcagtctcaccttgtccacgatcctccccgtgactcccatgccattgaggatggtgacgttgacgatagtcggcatgcccccatagtagataggctgggagcagtagggccacatgtaaggacactcggtcaggtcgatgtagctggggctcaaactgaaacagacaggacagtgttgcagcagacagagtcggagacggcaatgacgggacacaaccgcaggaaagcgtcatcagggcggacctgagcctcagccagggtccgggaacctggcctcacagcactccctgcggtgaggaggcctccaggccagccggcctcgcccgcagcacagtggtgtgcgtgggtatcacctctgccccacgagcctggagcctgcagctggcgaggaacaagtgcgtgagcggccccagggcagacctggactcagtctcaagtcatggggcaaagatggactttttaataactggacctgggataaatgggtggccatttggtaaaagataaaattagattcacaactcacaccatacatattggagtaaaccccaaatggaacagtctcaagtaaataaaagaaagcaaacaagcagaagaaaacagggtgagtctctcctttacctcagggcatgtgcctcaaaatccaggggcaaaaacaacaacggaccaactaacacagcagttagaacaaaaaaagaccgcagggccagaaacacttttatgacaaaaggcagctaacaaactgggagaaatacctgcagcaaagggttacgtaccctaatatgtaaacaacacttaaaccaagggacgaaaaccccataaaaagaataatgggtgaaagaaatgaacaaacacttcacaggaaagatatagaaaaagttcttacctacaaacagtgtttaaactcactcacagcctgagaactgcaaataaaagcaaccctgagggagcacttcccatgtgtcagacaggccagcggtacccccgggcaccctctgctcacagcctggacccagcgacgctgcttctaggaatcttccctacagacacaactccaacaaaactaggacacacagacacaagcagcttaaaatgacaaaatactgacaacattttaaatgcccatatatagacacgtacttgaatacacaaaggtatccacactacgaagctataaaaaaggagaagcaagatctctgtgaatggatacaaagtgatttccaggacacctttacatgaaaaaactataaaacagtatttataataatgtatccttcatgtaacaaaggggatatataagaagatagatatgtatctgctcatttgtgaaaaaagaaattcaagaaggataaatcaaaaacacctgggcttgttacctgtgggagcagaggggcgggggggcagaacagagggatgggaggaccacacctggccaggcacactctggccttagagtcaccgtcctctttcacaatgcaatacgtaaccagctgaatcaaccagaatgtagtgggaatccaaaaagaaatacacatactaaccagtgaactcaactatactgaaaataaaaggcaaaatcagactgacagggcctggtggggaggaagaaaagaaatgaactgaggtcactaacaatatgattcagttcagttcagttcagtcgctcagttgtgtccgactctttgtgaccccatgaatcgcagcacgccaggcctccctgtccatcaccaactcccggagttcactcagagtcgcatccatcgagtcagtgatgccatccagccatctcatcctcagtcgtccccttctcctcctgcccccagtccctcccagcatcacagtcttttccaatgagtcaactcttcgcatgaggtggccaaagtgctggagtttcggctttaccatcattccttccaaagaaatcccagggctgatctccttcaggatggactggttggatctccttgcagtccaagggactctcaagagtcttctccaacactccaacaccacagttcaaaagcatcaattcttcggcgctcagccttcttcacagtccaactctcacatccatacatgaccactggaaaaaccatagccttgactagacagaccttagtcggcaaagtaatgtctctgcttttgaatatgctatctaggttagtcataactttgcttccaaggagtaagcgtcttttaatttcccagctgcaatcaccatctgcagtaattttcgagcccccaaaaataaagtctgacactgtttccactgtttctccatctatttcccatggagtgatgggaccggatgccatgatcttcgttttctgaatgttgagctttaagccaacttttttgctctcctctttgactttcatcaagaggctttttagttcctcttcactttctgccgtaagggtggtgttatctgcatatctgaggttattgatatttctcctggcaatcttgattccagcttgtgtttcttccagtccagtgtttctcatgatgtactctacacataagttaaataagcagggtgacaatatacagccttgacgtactccttttcctatttggaactggtctgttgttccatgtccagttctaactgttgcttcctggcctgcacgttctataaatctaaaaagaactacccacaactgtcatcctctagggagtaaacttgtgttcaccagggtacgagttacagctctaaaactttccacgtgtgcgtcctaggaccgagtcaacagagacacggtgaagagtgacagccaggctgcctgctgctagagaaggacaaccagcgagaagactgagggccgtgagtgggacgggagacaggtggcatcacagacacagaaaaggtacagaagtatgtatgcggacactcgccagctcggtctgtaggaagggctgagaaacaagcaggagcacagccaccaaaagcacacctggagccaggagtccatttctaaaccccactctccaactgaaggaccagggctgcttggacagaactgatacccacagtgggcgtagaaatgctgccagtggacaatgatggagacacgctgaaaagacacaggagccaaaaagaaggaactccagagagccaaatctgggacaacaggagcaatgaataaacaaagacattaacggattatagtcagagtgaaacaaggatctctgtccatgctgatgtaactgaaataataagagaggaggacagcacttccttacagcagaatttcagttaataaatgcacaaggaatgagagaagcaaaaatcgccaggggcaacctcatataagaaccagtacaggaaagaaccatctaaggatactaaacgtagtgacggaaggtatggcaagaaacaagatcatcttcaagcgtgcacccccaagacacttcgcagtcccagagagacagagagcccctgcagtggaccctggcaccgcctctcccactgcccagccccagacactccacatctgtgccagggaccgagcgcagcgggcaccagagccggccccgccctggggactcagcctcctctaacagtgaccttgattcagggattctctgggatgaggaaagatttcagacctgtgctggcgtgagggtcctctccccatttctcccgcctcctcccccagaagatctcttggtgcctgcttcctgaagggtccagcctgacacgtcacctgaacctcaggatgcagacaagcaccgccaagaacaaaaggaagggcactgagccaatgagcccagctggcaactaaccgcaacgccgatgccggcctggatcctggaccaggctgaggacagggtggggacaatctgggcaaaatccaaacatagtctgcaggttagcggatcgtaatgcatcactgttaactgctaggctatgtggcgtgtgcgatggttacataagatgctaacaccagaaaagccagggcagggctggaatcctgatgtacgatatataagaacgtccatatgatttttgcaaatttctgtaagtttaaggttacttcaaaaaaaagttttactaagtaaaaaagaccaggaattcattactttaaatcactgacattacaagcagcagaatgtggggaagtggggagcggtcctggtgtcccaatagaagcagcagcatgaagctccccaaggccaccaagccttgctggtggggtgggatctgttttgaggcaaacagcctgtgctgagggagcccaggaagaggagaaagacgggcacaccaacctggcctggggcttgtagctgttgaggatctgataggctcggaggagatccagcttgccgtggccttgctcaaacatgttgacacctggaagccgccgggcggacgcgatcagggcctgcttcatgctggctgggtttaccagttcacgtttctggactgtgctggggggagaaccacatatttgctcatctgctcttagcaaaagaaggaaaaccagaccatccctgacccgtagcagtgcaaccacacgacctccaaccttgctctatatctaatgggattttcagtaaaatttgtgtaagacaagggcaaacatgctcatttctgctcctgtctcaggactgaccacttacctccttccaagtggctgtgagagcacggactctgggctcatactaaactgaccaggaaaacatattttcctactaactcaatatagctgacctcagaggctgcaggtaggagttacagttcctgacaggtggacacagcctggctgggagaaggggaggatggaggtgggtccagcaggcattcgatgctgcatggcctagaggcatggccaggagggaagcccactgccccacaggtctgttttgtctagagaccctggtgggtcgggcctggtggagggctcagcatcagaacacaactggactcaggcagcagcaccccactctcgcctgctttagaaccagcattaaaacacgtgcgtttgtgtacctacatgtaattaatacaagtaaactgtgattccctaaatgcagagaaaaaatccagtaaacagtaaagaaaaattctctctccacagttgctaagtatttttcttcgaggatgcctggtcttggagtgttactgtgttttttgctaacaggtctagatgggaatctgacttcaggagatgtgagaataaagtagaacttttggtagaaacaagaactgctcacagctcagcccgaggcggacgccctgcccctcctgccgacggaacaagaccaggctgcagctccggctgctcctggggctctaagaccagagctgaggaagtgcttccctgtggcctggcatctgcatgagctgcttctcacactacaaagcactgctgaccccccagaggtgctctccgtgctgcagggaggaggaaagcaaaggcatcctccccactgaaagcatcatgctcagagaggctgtgaggctgggcacggcaggcaccgaggactcccctcccgcccgacagcaggagaccagacagcccccaccctcagcaacgccccccaggacccttgagacagactcctggctcctgcagacaagggcgaggccccgctacaagctggccagccacaggactcgtcccctggcctgctgccacctacccctcccaaccaagcagcactcacctcagcagcaaggtgacagcaccagccaccaccggggaagccacgctggtccccgagagggcccggcacccccctttcacgcccgagccccgcactccagcgccgtaggtgacaatgtcaggctttacacggccatagcctccaggcagctcctgcaacaacagcagtgtggtttccatcaggcccccacgagggcatacagcccttagcagttatgagtgaatgaaaccagaaatgccatcagctaaacagcaccacctgagcatgctgctggttttcatctgaaattcactgcaattcagaagaagcttaaatgatcatacagaaaataaaattatttttgatgtgtttttataatgaccagcataatgcaatgctctacagcatttaaaaaatgaatatctaaaattttgctaacatgcaagactggaaactgatttataaacaacttaaaaacttagaaatatgttagaaaaatcagcaagttaaaattaaaaattaggaaaaaaaaaagatacattttcttaataaggtaaaaagttacatgatatgactggcatttcaatctatcaccagaagggaaagaatgacttagaacagtcagtgtagccatacaagcaacccaagataagactttaactgaatattctctcaagcttccctgaaactgggggaaatgagaattccactggcacttatattctggaagaaagaacacatgtgaagtgaaaactccttcctggccaccacacataaatgggctctggacctgcacacatgggacactgagcaaagatgtcttcacctgcagcttcgcagattattcaggaacatttctcaaaatgccgttaaaacacttgcctcgataaaggccaaggacacagcaggtgggtgagaaagaccaggacagcaggtacaggtcaggtgcctggctgccatccgaggaagcatctgctcagacgggagggtgagccagacgcataattacagctcatggaagtacacacacatgcatgcgcgcacgcacacacacagacactccagcaggaaaagagccccgcctacccaggtggtcattccccgcgaggagaagcgggcgatgttgtcctcaaagtcgatgccgcccactccgatgacatccatctggtcagcagggttgttcagagtcctgcatcaggcacaaaagcacaaggggagaggaccattttaaatgaaaggttcaaatgaaggcaaagtctgagtctgcagcagatgctcctgtgacgtgacgtgcggctgtggcagcggcccgcgcaccgccacctctgccagccccgtctcctcacacctgggcaccctctccttctctccttccttcccgccctgtcggcttcccaccctcccgccccaggctcacgtctccctctactgccaggcgtgaaggaacacgccctctgagcttcacaggaccagtcaccggcacagcatcacctatgtacgcgccctcacagcacctcccaactgctgcaagtgcatcctcctgcctccccagcttgagtccagatccagaggaaggaactacagccacagacgtgtccctgccaccgtcagaaacaaagctctcaactggtctcaggcagctgtcccctccctcacagcaaccatgggggccactcatctctcagcaacctgagctcctcaggcagatgacaaggatgtaccagggaagaccgtgcaattctccccagcacctcaagggcactagatctacaaagaaatgacggtgaagccgggggagtcaaggtggaagtctagacgaagctgaacttttggaaaatgtaagaccaccagttatggagctttgtctatttcagctccaccaccagtaaatgaactctggaaccacaactggctccatgtagctgaaatgacatcagcaggattctctgttttaacccaaggagtcgatcctggcactgcctccctagctcacccaccaccaacacactaccagctggttgtacaaaggcaccacagtgacttttcagttggctgacagtgaaagtttacaaatttctgtgacatcagagagcagagattagaacagaaatcactgggagaacttcccactgaagctagtaccaaagactgccaccttcctgccctccctctccctgtcagccccacactttgtgagtgttaaacccttaacatacagaggaaagcatcgacaaagctctgctggcgctgaaaagcgggacgtggagcgtagactcccaggcactatgaagtccaagtgtcaagggggccacaccccagagagctcccggaaggggtacctgcggggacagatcaggcagtgccaggcctacaatacacagcttggcttcttagtgcattatggtcacccgacctgccctacccaatgccagcaataagccacacccactcaggatgggccctggtgagtgggtaccaccctcggcccgcccaccagagggtggactctggatcctgtgaggctccatgggcagacacaagtctgacaccagggccacctcttctgggatccttgctaacacgctgagcacaagtagctctctgattacaggctcccacatgtgactgcccacaggagtacaaggattccagaagagtgaccagcatgtgcagagcagtcaggatggcatgtggaagagctggtatgaatggaaaggcaagccaagggtgtgggggcagtgggggcagcgggggcagtcagcagcaggagcaggtgatggcgaccgaaacatggggtccccagggagacccagagaggagccagacttgggggagatgtgcacaggacagtgagcaatgaggccacagctgtggaactctgcctgggccggaccaggcccctcatccaacttcctaagaaagatgttaccgggacacagccatgcccacttgtctacacacatccataccaccttcacactagcagggtaggtgagcaagtgcaacaaacaccacgtggcccacagagactgtctgctgctttcacagaaagtctgccgactccaggctagaccagagaccctgaaacccaaggagaaactgagatctgagcaggcagtagcaatccaccacagatccctagttaaggaaactgcttgtctgcattttaacaacagaaacactgaaaaaggaagggaaaggagcagccaccactcacagaagctcagtgtccatggcactctcccttggctgcctcatgccatccttcagccaccaccctgaggaaggtctcgcgccctctggagacacatggggtggccaggcctcaggaaagcaaaggtccctcagcctaaggacaggcagacctgcctggctctgtcccacatcccccgcgcagggaagggagggctggggagactgaaggcaggagaaggggctggaaaccgacaataacctggggtactgagctgcagacggccggccttgagcagggacatcagaactgggggaggggtaaatggagaaacattagaaagagaagacaagagcgcctaatgagagactgctaagtaactggtgtctgtcacagcagaacttagttgggaacatgtttacgccactcacactcgtgagtcacaacctggacccccacaaggagagtgggatcaatgacggaactgaggctggaaccatgacctggagcgtcattaatttcatagagttcagcctaatcctccgccctggacagtttcgcacatgctgtcagggctcctgaggcctgctgcatgcagccacacagccaggatgccacgcaagacagcacgcaagctttgcgggccatgagcacatagccgtgccagcggctctcctggaccggggcacgcgggggcaggactgagcgttcggtccttcccctgcatcactgcaaaccccctgccacagcactgaaccgcacccatcccaggaacccatcaaggacgatgacagacgccccatgccaagtgtgtcagcccaaaacattactagagacgctatctacagaataaaactcagagctgtaagcagaaaggaaattcggatctctaacagataccgcctgtgaaccagtgactaacgtcccggatctccagtcactctgaagtgacctgactcaccacacaaccgggcacaaagggacctgtctgtgacactgctctctgccctcccatccgatctgatccttcccgtctgtatccaccatgccagcctacacgctctcctgttaagtttcactgtatccgcatcttttcctaaaaaggcaggcatctcatctcatctacctcctcaccctgtgccccgcgcacagtgggtctcaataaacactgtggaacccacttatttctagtagatttactctcctgactgcttgcaggagtaaaaagagtagaataaaaatgttaggcctccaaattgctattttcagtaaaggtgaaaaaaaaaattaaacagaaacaagactgtccttgagtcacaaccgctggagtatgtgggtacctgagattcattactaagtcttttttgtatgtattgaaaagttccacaacgcaaagttttagatagatacaaacagctacagaaaaatacagagacagacagacaacagtgtttcagttatttcaaggaaaaagatacctctaaggtcattcctatcagagatacttacccataaagaggtccatcattgccaatagcagaaaccatgatgacattgttagctgttaattcccacacctacaaaattagcaagcatttacttatgaaaggacatcacttttagacaatcaacgtataaatgtccaaaaacaactttcaaaaacagaactaaaacataagagagcccctggaagtgcaacatcgggccaggacagacatggtacgtctggcagccagtgtgtcaagaaaagagactccaggacacaggtccctgtggcagagcagacccgggctttcctgacacacccagagaagatgggcctcatgctcaggtgagaggcaccaacagggcgccgtgacctgctgcccacaagtctctgcagctcacgccctcagagctctccccacgtgggtgacaaagccaccagcaggctagacgccaagcaaagtggggaggggagagcaggagccgccaccaagccagcatgggcccctgcagagacagggccaaccttgtcgacgaaggggtggtccatgaagtcagggccgccaatgctcaggttcagtacgtcaatcttcttcaggatggcgtagttgaaggcgtccaggaaccaggacgtgtaggagacctggccgtgtgaaaacagtgcttcaggtgttgcagtggaagtctccagataccaggctgccagtggcatgaagcagtcacgtgaacttcagaaagaggtcccaagaaccacaaaggctctgccatgtacactacacccagagcctctgctcctcgggcctggacaccggggagggcagggtcccaggtcctgtcccgctgggtctcacatccagctccttcctgaccttacagcccgcctgcccgcccaggggagaccccaaacttctagtcgtcgctcttgcaggacttgtcctaagacacatctattaagtttttccaaacagtttaacatatttaatattctttattcctaaatagactgaacgtcatttcacagaattatttctctaatagttattatttctctcatagcttcctcacaaaagttaaattccttcatgtaccaccattcaggtgatttataagatacaaaattaaatagagtagaaaataatagactgaaaacaatggcgtaaagtgctggagagaataaagactttcaatccagaatttgatactcagttaaaatagttttttgagaataaagatgaaataaagatattttcagataaactagggctgagagaaatcatagctaacagactacattacaagcaatactaaaggcatctcttcatgctgaaaggaaattatatgatgtagaaacttagatccacaggtaaaaataaagagcactacaaattaaaagcgtgaataaacataaaatgttaaaaaaaaaacagtagaaagagaatatgattcacaattatgctttttaaaggctcttaagacaatacagttacacttgcttgaatatgcaaaagacattctaggaggagcggatataagaacaaaagaaagcatcacatgggggacttggggaagtgaggtaaaaacctgctggatgggagggttgggagaattatccgtgtgccctgcatgtttgtgaattatgtattacctgggcaaaaattagactttaacaataaataactagccaggaccctccctctttccaggaacatttccaaatgcagagcgagggcgcaagcttctaaatcctcatgacccaacatgatgctggatgctgggcacaagcgaccccagtccagcaaagcagcaagagcacaaacgtggattatcctcaagtacacgtatgcccgaggcgtggtggacaggagaaacgggagggcaaggaacgcccctggagcagggcctttggtattctggtgaggctggtgaagggggcggcgggaagagggcaaagccacgtggggtgccaggagatgctcagcaccatggatgtgcattgcctttaaaccagccttctcttttcacattgtaaaaccaattctttaagttttaggggccctcaaaacatacctggttgttggtaaagactctgaaaatatgaagttctgcatcgggagcaaatccctggcactctctcatgctggctatcacacctgccacgaatgtgccatggcccaaccctgctgtccgaaaggaaaaagtcatgaagcatggctgataatgtgggccatcgattcaaacagactccttctccaagtccaagacacagtccccagtgcctctccagggcctccactcagagtctgcacctcaccagccccacctcgggggccaacagcttctgctccccccgaacagcaaggattcctcccaccaggcaacccctctcctcagtcacctcccaacctcctctgagatacttagaaaagcttctgccaaaggcacaaagcaacctgagtttgtctgaataactgtcgtatacagactatttaataatttacacaggaaaatcccctcagctgataaaagagagtatgggagcgaccagaaatgcccctcaggcccccggccacccaccgtcgtccagcgttcgctcattggtccagttggttctctccttcacgtttttgaagtgggggtgcttctcacttagcccagtgtcaaacacggcaacccttacattagtgccttattccaagaagagagcagaatcgtgttcagaaaaaccactgttctggatttttgtgtataaaatacattccctgttgggacccacacagaacaccaagggacccagaggcaaagcctgcccacagagtgcacacagtagggagatgcctggggcctggctgagccaaggccagcgagagggacagctgaggatggccgacaccagatgctaagtaagacccgcggacacacaggaagtccctctggccatccctcaaccgtcacccacacccgggcgtgaaaccacctcccccaaatcctccgctgatgatggactgtcctcttcaggccattttctccaggctccattccccttagaggggctttgggggtagtgcagagcacaaggccctcactcataggagcggggggtggctcctcctcttgacaaggactcagtgctgttcactcatgacaacaactctgcagacacgagctttcacccacatgcagggaaaaccacacttaaaggaaaaccactatactacacactttcctgtaataacaagtctatttcagatactggacaaaagctaagtgcaccaatgagaaatatgattgatactgtcagatcaagaaattctagaaaatacgtaggaaaaaaaaatacagtatactcatattatttaaaagctaacaggaataagccttgatacgtaaatgtttttccagtaagagaattgtgtttatgtatcaatactaaatattaaataatcaatttacaatgaaataaccatcaaagtatattgtttcctttttttaaatgcacacacaatactagaaaatagctagtggggggggataaaaaatgcttttctgatgattagagaatttctgtttttgaagcttttgccttaaaaagataaaccaagaggaaatcataatttaataaaatgtcagtctcccgagtgttaagtctgagcaggggtaaggtctctgggtctaagccaaggagaaatggaaagacaccaagacaaactgtgacgtatcaggggccagagacatgagttgatgtttaggacgcaaacttccacatcagttaaaacaggaattttctgccatgattaatcagtaagaaaaaacatttgattggctgtgagttctattttctaagaaacagtctttaatattgtttcctgttctgaaacaaaagatcacaatctcgacaatcacttagccctgctgcacacaggccactgcacggaaggatgagctcaaatcaaggtgacatctctggatctgacttccttccctgggaaatgacagaactccactggactgccagtccagccctggcgtgggcagtaagtactgtgtctgctcacgtgccaacaacaggaaagaacatgccctgaccaccccagaaacataagacacacaaagtcaacaggactagacaaagacaggagctgccacggacacgcaggacaaagggacagctgagtgcgtccagctcaacctgcagaagcagatgcatgaggtggcacaccctcagctacgggtgctggagagggaggaggcctgccaggccccccacacccacctgtgtagcccatctgccacagcacgtcggcctgcagcgtctgggcgacctggcgcgggatggccctgagcagccgccgactcgagtgtctcccagtggcgtgccagaagccggagcccagggagaggctggccctgcgcaggggccgtgacgactgccacttctggctccagcgggtctcgttacagggcgagccaggctcagctgcaggcaaggaaagagagcagaaactcaggatgcatacctgtcaggggaaactccttccaccagtgcagtgaccccctcctgagacccccgtgcgggagagtgacactctctcccctctgctagaaggaacttctcaacacagttacattcacaggacgttatttagccaccacattcttcccaaacagttctttacctggaatcttctaatcaataagagggagggaacaactgataaaatgattactgctaaagaaataaagtcagttttgatactgaaattgaagaaatgcttgctatttcaccaaccacttattctccatgaaccaacagggggcaggggagggggcagagtgcaagaaaacgtgcaccaaggaacggtgcagtttctccgtttactgcgtgatctcagacaggaagaagccctgtgaccgcaggacacctcgctccaaccttgtcctactgtgacctgttcaaggtcctcagcacgagtatttactagaacatcgcccttcaaaaaccaaaacacctacacaggactcggggagaactgctgggggcaacattttacatcttgattttgttggcgggtacccaactgcacttttatcaagacctgccaaaccgtgcattaaaaagcatgaatttaccatctgtaagcatttgttttttaatggaagaaaaaagtagaaatatcacaagggtgtccctttacctttcaaaaaccatgctataaagaagaaaaaaacatatttcaaacccttctctagaggaccaccctgtaatactactgaggttcagtttctaaaggaagttattaccgctctccttccggtctcaccaggctatacccatgaaaatacaaggacctggagaaatacacagttgtgtcaattccattaagtgactatttgcacactgcaactgaaacgattctgcactgaccctcccatattgactctgtgccttcagtcaacagccagggcactgactgaaggacaatattcagaccaaggagggtctgtcatgctctccctccagcagaccatactacacccagaggactgaactcagttctggctttactcgttaggagcaatttagagaaaacgggacatatttgcaagcaacccattaaaagggtaaggccaggtcctatgagtagcccctgaaggaactggtatctattatcccagagacaagtaacagataggggacatcaagctgtcctccaaatgcctcgcagtgctgtctcgtggaaatcaggtcagctctgtcttacagcccactgagaccaggggtgggatccagagtgtgacaggttcccaccctaaataaagcaaagcattctaatgatagagccacagaaaaatgagttgggtttttttggctgcaccatgcagcatacaggatcttagttccctgaccagggattgaacccagggccctgcactgaaagctcagagtcctgaccactggaccgccagggaattcccaaaaatgaacatttaacatctgcttataacagcccaagaactctgctaagctctcttcacatgcactatttcctttcaccttcagaagaactcaggtgggtagcatcatctccatttcctggatgagcagaagcttaaagaaaagatgctcaccacaggtacccacagctcatgaccagaggaagaggtacactacttcctttcagggcagcccagcagctgaccaccatgctggagagggcacagaaggggaccccgaaccatgaagctccatatactccccatgcttccacatttcctaaaatattctgcagctctttaaagaataaaaagacacaaggcatacatttttgcacaggtctgatttgtttttatcttcatggattgctttgaggtgactgcttttcaaagagaacagcacgaaacatggactaatggaaagagctctgcaaggtcagacacccctgaactccgcagctggcacgtgaactggcttgtccccaggtgtgtttttaaacctgaggctctcaggcctcttatttcatttcccttctaatgaaagaaacgacaataagcagtaacagctattatctatttgctaccccagtttctgatgaacagggaaaaaccctttcccctgcaagtagtacacctgctttggaaactagcatattctaatcctcacttggttatctgagaaggaacttctctccacaggcccgtcgtaaggactcggggagtgagccctggagctgaaaggcactcagcaaggtccttccatccccgcacgtgcccggcttccagcttcaacaagcccggccgaggcacaatggtgcacggtcaggagggtctgagaaaagcaaaatgaaacccaaagaaaaggcattttgtcagatgcatccaaaataaaaatttgcactgaaagacacaaaatgcaagcaaggagactcaaagacaccatcttagtttccaagcgtgaaggggcgtcagggcctcacggcctgaaggctctgagagaaacctggtgaaaacctcttcccacacaacagagatcattcttactgcaaactttcaatcagaagcacaaagtctcttttctggtttttttattcctgctggaaagtgttcacagctgatgaaagacggggtgttcactgtactatttctcagatactgccctgtgtcaacacacacacccccctctgcttccagcacagcagaaatgcacacagaccagccctcgggagcagtactcaccctccgtgtacttgagggaacgaaagaccttccgctggggtgttacccgcttgatgtttggatggtcttcaagagtcagcagccccgccttctgtttctcttttatctgaatcacctcaaaatcactagggtagtcactggatggattgtttcgaggtataattctccagttgtcaattgcactgctcttcagggcgcttgaaataaatgaatttctagctttggccgtaaagtatccattgaaagccacaatgtactctgaaatcaatgaccacaaaataaaaataagaacttacaagcctatattatgacggtatacaagagtatatctaatataacgttttcctggtaaaagaaaacctatatatcataaaacctacaggaaaaagagcagtaaacagactaaacatcctggatggcagtttccagagttctgagctacaacgatctggatgaaccccactaatcacaggacacatcactcacaaccagacacctgagctatttttcaaacaccgaatgttaagagaagtttgagcatatgacagagaaatgcacataaggtttcaaggaggaaggaggaattcagagaagtgaaggctctcttcttcctgagaagttaacgaaacttagagcagatcttataagactcattgcttagttattcacaactggtcacataaactttcagcccctccaaagtccctcaccagctaccataacatctgtcccatggaatccaagtttagggaaataattcagaatgtcaatttctttgctttatataaaataattaaactgaaaaaccaaaccagcagaattaatatacaaacactacgcactcagcccatttggcattcattgcagaagagagagaaatgtttttggcaaaagctaatgtttataataaatttgaaaaaagaaaacaaaaaaacccaacacactgaggggaaagtccctaacattttaaataatatcattaccatattccacaaccgttgaggagaactccaccttcaaagccaggtgggaacagccggggcatggggccttttcaaaaggtttcttttccagtctgtcgcccagatgcttcttcccgcagagcaaaaccaccagcagaagcagccagatgttgacaagcttcatggtcgtagtgagtacggtcataaaatcgcataaactcaaatcgcacttttttctttcttgattataagttaatttttgtttcagctaaaagctgaaacattactgatccgccattttacagtcttgtccaacgtaaataaaagttaaatttcatggccccttgtggcttggcctgaaacaaggctttcatttctttcttcgtttcttctccatcttgggcctcaggcttcgctcactctggcccagacctctgagtcctacactccatgtgcaccaaggaaccaaaggccagcagggatgagtgatcactctgtgagccagtctacaaaacaaagcaagcacacagggacatgagcagcacaccgacagagccacggaggtttcgcggtctctgaaatctggataagagggtctaaaagcgtcactagctataagacaaaacaaatgcctgatgaaaccaagaaacatctatgggctcattttaatttagttactcttcacccctttcagggggaaaagaa

SEQ ID NO: 74 - DNA, 35108 bp, Hippotragus equinus
  source 1..35108: mol_type = genomic DNA
gagcaacccgagaaacccaaggagggcggagaggatcgtttacgcaggctgggaggggcgcgaagggagtgaggcgcccagagatggcccagagatggccccgggctagttcagaggcctcctgcgccccaggtccagaaagactgctgcagaaaggggcgtggaagggagcagagctgcggaggcgggtcacgggttcacccggccagcggagggaggatgccaccgctgctgggctcacgtcgaaccccggctgagctgggctttagaggcttctagagcgggctgacctgccgcggccccggccgcggagaagtaggcccccaccggccctttctggcgccccgcttcccgcgccgcggccgcaggtgagccgagcccagccgcaccccgaggcatcaggtgtcgtgggaacggcgcccgcggcgcgaagggagagcccgccgcctctccagccatccgtgatatactgcgggagggtcgggtccgacggcggcgctatgaaggggacacaggagggagcggggtgcgagctgcagcggttcggccccccggctgctctgcagcccgcacaaggtcagtggcgcccctgcagttgcggggactcgggatgtggcgcgccgccaccgggaggccgggccgcacccgcgaggcctgggtagggggcggccttccgcgtggggctcggggctcggtggcggtctgctggcggcacagccgacctctccggactcggagtgctgttttattagaaggaagggggaggatgtacttgggaccaaagcccgggtgggtgtgcagggtttggggcggcgaggggttcggacaatctccgttttgaaagtgcgccttcagaggggcgctttctgtgacagtaaagcgaaggtttgcagcgagtttagcggtcagtcctcgtgaatggaacatcttttccgtaagcttggtgcgcgatgtgctaagttaattgtggttggcttctttttcactttgttcctatgggttactgttacacggcgtgcggctagtttgtttatagtttaattttaccagtatcagaaatagaaagggctgaaggtgagctcaaatctgtcattcgctaacagaggctgtattactaacagttcccttattttgttactgttcatctgtgagtttccatgaactggcatgaatcaggttctttataaatcccatagatacagtgtctttaaatgctgatgaaaatattaatatacccttttgaagaaggaaataaaatgttcttgagtgaaaatcctaagggattatcttttttctctccctatgtctttatctaggagttactgtactcagactttgacaggcatttaaacacccacagcagccatactttaatgagttctttcataattagttcactttgaaagcactgcatatgctattgtaaatatatgtatgctctattgcctcagcagtatctttattaatctttttattcatcaaaaacttaaaaaccttcctcatggatagtttttacagtcagtatctactgtttggagatggtgagttgcgaacaatgtttgactcagaaccaagcgttggattctagacttagaaaacccttaaacagtgacttgttagatattgtattagtacactttgacttagaatttttggtaaaaatatcacacagaatcagcctttctattctgtaaaaaagaacaatactgtccatagtggtttgtggtattttatttttaagaagtttccatgatatcgagattagtctgagggaccatccaggataggttccagtttacaaagtgacttctttatcactttggataagccgactatgaagacagtaaaaccagccctatccgtttcaaagggacaaaaaaagtatgaagcgctttgaaaagtaaagtgtgctatataaatataaaggccctccataaaaaccttcatgcaagtgatgttgccgattggggtttgaacttaaactgagattctgagctctttgcagacctcctttgtaagtcccccgaagctcacactgcctcttaggaactttgttggctgtttaggaagctgctatgtctgctggagctgtagggaaagtaaggctgatggtttagtgttagaccctatgcaagggctttattttcgttttctcactagaaacacatgaagatgtagatattcttattcccattttgcagaagagaaaactgagacgcagacaggctgaatgacttgcataaggtcacagaagtgtctcaatgtagaaccaggattagaaacaaaacaggatctttgttctctacatcacattttttacctttaactcaattgttaaaaaaatttttttaatataatctgataaaactgtatctctccaggaaaattgcccatattcatatatatacaaaatttagcacataatttcagagtccagcctgctttctgaaaccttttcggtgctttcaggacaccctactctaactatgtctgttactgaatgaggcaaaaagcatatatatataatatatattggtaccgtaatcttctattaacagcagccctttgaacttggtagttttcaactgggtaaaaattcattcagtgactgaaatgaaaagaaaaatgacttgctatgttctaaatgattctgtaaacaccaaaatgcagtttattttttaataattgtaatcacattctttttattttttaaattttaaaaaaattttgttttatattatagttgacttaaaatgttgtgttagtttccggtgcacagcaaattgattgtcgtccatatgcatatatctattgttttttcaggttcttttctcatatacattattacagaacagtgagtgaagttccctgtgctgtacagtaggttcttgttgattattttatatatagcagtgtatatatgttggggcttccctggtagctcactggtaaaagaatctgcctgcaatgcaggagagttcggtttgatttctgagttggggagatcacccggaggaggaaatggcaacctactccagcactcttgcctggagaattccatggaaagaggagcctggtgggctacaggccgtagcgtcacacggagtagaacaaagtgactaagcggcagcacagtagcagtatgtgtatgttaatcccaacctcctaatttaactctcacctttcccctttggtaaccttataagtttgttttctgtgactggaagtctgtttctgctttgtaaataaattcattgtatgacttttttttttttttttagattccacatataaacgatatcacatgatacttgtctttctccgatgtcatttagcatgatcatctgtgggtccatccatgttgctgcaaatggaataatttcttttttatgactgagtaatattccataaaactaagaatcatggcatctggttccatcacttcgtgggaaatagatggggaaacagtgtcagactttattttggggggctccaaaatcactgcagatggtgactgcagccatgaaattcaaagacgcttactccttggaagaaaagttatgaccaaccagatagcatattaaaaagcagagacagtactttgccaactaaggtccgtctagtcaaggccatggtttttccagtggtcatgtatggatgtgagagttggactgtgaagaaagctgagcgccgaagaattgatgcttttgaactgtggtgttggagaagactcttgagagtcccttggactgcaaggagatccaaccagtccatcctaaaggagatcagtcctgggtgttctttggaaggactgatgctaaagctgaaactccagtactttggccacctcctgggaagagttgactcattggaaaagactctgatgctgggagggattgggggcaggaggagaaggggatgacagtggatgagatggctgggtggcatcactgactcgatggacatgagtttgggtggactctgggagttggtgatggacagggaggcctggcgtgttgcaattcatagggtcacaaagagtcgaacacaactgagcaactgacctgaactgaatattccatatatatattcataccgcatcttctttgcctgttcatatgttgaaggacatttaggttgcttctatgccttggctattgtaaacagcactgccgtgaacattggtgtgcatgtatccattctaaccatgtttttctccagatatatgcccagtacttggattactggatcatatggtagctctgtttttagtttcttaaggtacctccatactgttctccatagtgactgtgccaaattatattcccttcagtagtgtaggagggttctttctcttcacacccagcatttatgtttgtagattttttgataatggccattctgactggtgtgaggttaatatcttccttgtagtttttttttaattggaagataattgctttacaatgttttgttggtttctgctgtacaacagcatgaatcagtcataagtgtacatagatcccctccctcttgagccgccctcccacccaccccccaatcccacccctctcgattgtcacatggcactgggctgagctccttgtgttatacagcagcttcccaccagctatgcattttgcacatgataatgtatatatttcaatgctactttctcagttcatcccaccctctctttaccccactctatccacaagtctgttctgtatgtctgcatctttctgccctgcaaataggttcatcggtaccatttttctggattccatatatatgcattaatatgtaatatttgttttctctttctgacttatttcactctgtataacaggctctaggtttcgtctgtcctcagttcagctgactcaaatccgttcctttttatggctgagtaatattccattgtatatatgtaccacttctttatccttcatctgtcagtggacatctagattgcttccatgtcttggctgttataaatgcagtgaacactggggtacatgtgttttttgaattgcagtttttttaagggtatatgcccattagtgggcttccctgatgactcaatggtaaagaactctccctccagtgcaggagatgcaggttctatccctaagttgggaacatcccttggagaaggaaatggcaacccactccaatatctttgtctggaaaatcccacggacagaggagcctggtgggctgcagtcctcggggttgcaaaagagtcggacacaacttaatgactaaaaaacgtgttggggttgctgggtaatatggtggttttattcctagtgttttaaggtagttttttaaggcacctctgtactgttctccttagtggctgtatcagtttacattcccatcaacagcataggagggttcacttttctccacacccaacatttattgtttgtagattttttgatgatgggcattctgactgatgtgaggtgattcttcactgtagttttgctttgcatttctctaataattagtgatgttgagcttcttttcacatgcctcttgatcatctgcaagtctttggagaaatgtctattgcctgttttgggtcttttgcccatttttgattggggttgttgttgtttttttttatattgagccacatgagctgcttgtaaattttggagactaatcccttgtcagtcacatcgtttgcaaatagtttcccctatatatttttaatatttgtccgtgggttgtcttttcattttgtttgtggtttactttgctgtgcaaaagcttttcagtttaattaggtctcatatgtttatattttcatttttatttcccttactctcagagacaaatcaagaaagatactgcggtgatttatgtgaaagagtattctgcctatgttttcttctaagagtttaatagtatccagtcttacttttcggagaaggcaatggcaacccactccagtactcttgcctggagaatcccagggacggggagcctggtgggctgccgtctatggggttgtgctgagtcggacacaactgaaggacttagcagcagcagcggtcttatctttaggtcttcagtccatttagagttaattattgtatatcgtgttagagaatgttctaatttcattcttttataggtagctatccagttaccccagcactgcttattaaagagactgtcttttctccattctatattcttggctcctttgtggtggattaattgaccatagggtttacttcttggctttctgtcctgttccttgatcttcggaggtgcagtttagaacaatggcgcttatttgaaagcagatcttttctttggactccatcaaccatccttcaaaaacaaagaacatagatgttgcctttacttacagttttgttttttgtttttcctcctagagatggcaaatcctgaggctgctataagtagctgcagctctcatgaagaggaaaatcgctgcacctttaaccagcatacatctccctctgaggaacttctattagaagaccagatgagacgaaaactcaaattttttttcatgaatccttgtgagaagttctgggctcgaggtagaaaaccctggaaacttgccatacaaattctaaaaattgcaatggtgactatacaggtaggcacctcacatcatgagcttagtgaagtcttcttttactaacaaagatgactatgtgttttgttttgtttttaaataacttttaaactatatgcctcataacaataaattaggagatatacaatcttaaatcctttctcttccatatttgtgaaagaagactttttttcccttgtttcttttcatctttcattaaattgtaattttactcacatagtgtaactagatttcaggaaaagaaaattttaatattttgcttccagtcaagtttagctgaaggtttcgaaatcaactttggaagctagctgttgcccaagtagagaattcttttttttcctagttagttgcctgaaaatttcttcataattttttggattctcacgtccctgtgatcgtgggagccctgaagtagaagagtgtggagctgattaaaaggagtaacataggtagtgaaatatgagacttcattttaggagatgttgaatctcatttccttggcttctcttaacattttagggagaaattatgttttgtgattctttatatatatttatgatttactcttgtgaaggtatgttcctgctagtgagagtaattatctcttgtttaaagcaaaagagcaaaaataaaagcatatttcaataggaaaaataggtgataggtttattttttcttaatttggtgaaaaatgcatatgtaaataaatgactggattaaggagaatttttttaactctgaaatcacaccttttagctgattattgagcacaaattcttctcgattgttagaagctggcaatcatatgaagttggtgaaattcttttatttatttattttttaattggaggataattcctttacaattttgtggtggtttctgccatacagcaatgcagatgaactgtaattatatactctccctcttaaacctccctcccctctccctacccctctaggtcatcagagcacgagactgaactccctgtgttgtatacttctcaccagctatctgttttacacatgatagtgtatatatgttgatgttactttctccattcattgaagttgatgagattcttttttttttttaattttatttttactttattttactttacaattctgtattggttttgccatacattgacatgaatccaccacgggtgtatacgagctcccaatcctgaatccccctcccacctcccaccccatatcatctctctggatcatccccatgcaccagccccaggcatcctgtatcctgtatcgaacatagactggcacttcgtttcttacatgttagtatacatgtttcaatgccattctcccaaatcatcccaccctctccctctccctcagagtccaaaagtccgttctatacatctgtgtctcttttgctgtctcacatacagggtcatcattaccatctttctaaattccatatatatgtgtcagtatactgtattggtgtttttctttctggcttacttcaatctgtataatcagctcgagtttcatccatctcattagaactgattcaaatgtattctttttaatggctgagtaatactccattgtgtatatgtaccacagctttcttatccattcatctgctgatggacatctaggttgtttccatgtcctggctattataaacagcctaagtttctgatgctagatgttgtgtaaaggaaactgacatttgagtgattatcttgttccaagacattattttgtttaatttcagcaatacttctattgggtacatactggactcctttggtttagagaataatgagctgatatttataaagtttttgaatgccacatgacgagtactgactagtacggccagtggcagaattaatactttaaagacacgtgctctttctgattatcaacataaaaatggttgtttgattcccaatatatttggcaagttggaattgaaattcttaatttccaagtgataatgtatgtcacaatagtgaaagtatttctctatgttgtttctgataagtcggaggggaagcctgtatcagttcagttcagtcgctcagtcgtgtccgactctttccgaacccatgtaccacagcacgccaggcctccctgtccatcaccatctcccggagttcactcaaactcacgtccatcgagtccatgataccatccagccatctcatcctctgtcgtccccttctcctcctgcccccagtccctcccagcatcagagtcttttccaatgagtcaactcttcgcatgaggtggccaaagaactgcagtttcagctttagtgtcattccttccaaagaaatcccagggctgatctccttcagaatggactggttggatctccttgcagtccaagggactctccagagtcttctccaacaccacagttcaaaagcatcaattctttggctctcagccttcttcacagtccaactctcacatccatacatgaccacaggaaaaaccacagccttgactagatggaccttagttggcaaagtaatgtctctgcttttcactatgctatctaggttggtcataacttttcttcccaggagtaagcttcttttaatttcatggctgcagtcaccatctgcagtgattttggagccccccaaaataaagtctgacactgtttccactgtttccccatctatttcccatgaagtgatgggaccagatgccatgatcttcgttttctgaatgttgagctttaagccaactttttcactcttctctttcactttcatcaagaggctttttagttcctcttcactttctgccataagggtgatgtcatctgcatatctgaggttattgatatttctcccagcaatcttgattccagcctgtgcttcctccagcccagtgtttctcatgatgtactctgaatataagttaaataaacagggtgacaatatacagccttgacgtaatccttttcctatttggaaccagtctgttgttccacgtccagttctaactgttgcttcctgacctgcatacaggtttctcaagaggcaggtcaggtggtctggtattcccatctctttcagaatttcccacagtttactgtgatccacacagtcaaaggcattggaatatatgttaatatactttaatttagagatgagttgaaagaatatttttatttttggtcttattgtcacagttttggtaattagtcctagaaatatagtttgattataacacttaaacttagatatttcttaggttttattgtacacctgcttcaagccttcttgatgtcctgaagaattcattttgaaagcttctacttgcccttcaagctcctgcaccatctgacttaagtgtttctgctcacatttttccccactgtttctctaattgaattatgctggtgtcctcagtgtccccctcaaagtgctaagttcaactcgaccttctttgctttctccacacgctcctcaaatgtcccctgccccaagttatgcatatactacgagggtttctgttattcttttttcccttaggaaaccttccaacttccttagtcaaagttatcttgcttctctgagctgaagaactcctaaaggacttctcagagctcctaaagtttttattggtgggacaatgtcataagtgagatcatacatgaaaataaatgttgaaagtatgcaaaggcagtttcttttagttaaaaactagaaacccaccttatctttaaggacaaattagttcccaactgccaaatgtttaatttctataggatatattaggaattaattaggtattgaatcttaaatagatgaattaatcatttagtggagacctttatttcattgctgtttcaccctctttttctttcttttaagctgatcttttttggcttgagtaaccagatggtggtaactttcaaggaagagaacactatagcattcaagcacctcttcctaaaaggatatatagacagaatggatgacacatatgcagtgtatacacaaagagatgtatatgatcagatcatctttgcagtgaaccaggtgagtcagacacgtgcattctttactttggagaaagattagactggagaattgttagcaatgtgcaaaatagaagctgacattcaggtgtacaagggtgagcattttttaatgaaattataaatgtcatgtatgaaaccattaatttttttaactttgccaacaaacttttacaaaactataagttgagaagagcttttgtttagtaacagagagacagaaactttaaagacttaattaaaagagtcagatctagggcttgacataagaacttcaaagatttaaaattattaaccatgaccttggttgtaagtagtcattaagttttcagagtttatatgttcagggaccctttagaaataatgagattattaaccttgcagaatgtgtagagtaaccaagacctgaaattcatttaaaaaataagaaaggcctttatgtcacataaggcaatggttttattgtaacattgattaactgcttcaaaaaggaagcttgtttttcatacatgtaggtcaaatttctactctgagtttctaataaattcatttttgctacaagcaaacagtactttcttaagtctgaaaatctcctgttttgtaggaatctttggcagctttcttgaagtcagcatttccaacctgagttagtactgcagacaatatttctgcagtactaactgcagtatatataaaaattataactcttcttcaaaaattgttatagtgtaattagggattttcattttcccagagacaaactatgggataatatacatatttgtgacactaaggctttctgatagcattcagattacaaaaattgtccagaaatctataataatagaagtaagctacatgcgttgttaaatagaattatgtcctacagtttgtcctacccttgcttccctgatggctcagaggttaaagcatctgcctccaatgcgggagacctgggttcaatccctgggtcaggaagatcccctggagaagggaatggcaccccactccagtattcttgcctggagaatcctatggacggaggaacctggtgggctacagtccacggggtcgcaaagagtcggacacgactgagcaacttcaccaccaccacctacagtttgtaaggtcaaatagtagcaaaattctggagatattaagttttgagatccttgttttaagattactaagtttatgtaaattggatcttccctgctggctcagacggtaaagcatctgcctacaatgcgggagacctgggttcaatccctgggttgggaagatctcctggaggaggaaatggcaacccactccagtattcttacctggaaaatcccatggacggaggaagctggttcctaaattatctaaattactctgaagcaaattagtaatttctttttgacaggaggggtgggtagaggcaagagataaacagttcaataaattcttcctaaaacatttgacctttattattaaggttaaaagcagttttaaatatatagtatttggcattcaggcagttctgtttatcagatttcttttttctttatagaattgcatgcaggtagattccctgtgctagtaaataggcagatactatttggggtggagtttaccccttttggggcaagtgactccctaccatcttctaagcactatcatgcattttaaactgaaggtaaaaaagtatcttatcacaatattagtgaataaactttgtgtggttaataaggtcagttattctacatgattccagagaagtgaatagggaaaacatggcctgatatgaaacatctttgtctgctgtaaggaaataccttgatagttgaggtgatagtcaccaagaactgacaggtaagacagcagcttctcagcccttagagttatttccatgactagctttcctgaagagtggagccctaaaatgtcatctaactgaataatctctagggcttatcctgatttaacactggttgtaacagcatcactcttgtttagtatgtctatttatgtattggaatgtcaaagacctagttattttaatactatatcctggctttcatcaatcatgtttgggtcatctttactgggttccttctttcagctgcctcttaacttagggcagtcctcaaaggtctgtccttttcctgcagaatttcccccactgtcacccatcaccaagacagatgtttccaaaacagttgttcacactgttgtgtgaagagagctcacaagcacctcagaatcactctgttcaaagcagatgtatattctcttcccacctacttctcagagttgcttctctttctgatcagttgcttagatttaaaggtctcaggatcttgggaccacttactttttcgcagctcaaacaccgtctataaatccctacttctagttggttatcctctttcccctcccacctgtcctaccacttcttggcagtttattctaaatgattcacctgaagtcacagatttgactgcatggtactgctcattttataatagtgttcagtgctacatattaatatatttattccatgaagatggaggtacataccaggcactcaaatgtttgtgaatgaatgaatgagctcaaaagattcatgtgttcagatcaagtaataacagggagaccacaaaaaaaatgcatctgcaatcaaagaacaagctgtttaatctgctttactttgggtgccacatttctcaggtaaggatttttatgtatttttatgtagtctctcaaaggatgccctaggacccatgaatccatgtgaaaaactagttctttcaaggtggagctgcagaggcaagtggggacagataccagcctcattagggcccgacagaagtcatagccacttaggtgccccgtgagtcagtcctaccggttgcctgcctttcagtgatagccctgtactaccttcggctcccagaatcttctgactcaggctccagattggccctttagctggccacagttctgctacttgcccctgaccattgttgactgggaaaaaaaaagcataacctaaaagttgagaataatgttttattcaaggacatcaccgaggactgtagcccaggaaggcagcctctcagatagctctgagagactattccaaagagggtttttgcagaaaacaaaataaaaaccatgtaatgaacatcaaaagatttactgctaatcacaaaaaaacagatatctcaagctaatgattttctgggaagatgaatctggcctaatggcagttatttctttgatatacatcttagccatccagggcaagtatcctgttttcctccatcctgaattcccctcagggcataccctcagtgccactatagtggctgaaggcttgatgactggcaacacttggtgtttatgggaatggcagcaacactctttgtccataccatccagctctgtaggtgctcagacctcacgtgctaagtcacttcagtcatatccaactctttgtgaccctatggacagtagcccaccaggctcctctgtccatgggattctccaggcaggaatcctggagtgggttttcatttcctcctccaggggatcttcccaacctaggtattgaacctgagtctcttacattgggaggcaggttctttactgatagcacctgggaagcccccagactccacaaggagccttattaagatagcaaggaagtctggctgaagaatcacttataaaaatagcgtgtacctgaaggcctacaacttggatcttttgtgtttcaagatcttataaggtttaagacacaagtttctatgataggaggttcagatctttaagtaattcctatctggactgcttcacagggagtgggcactcagaagggctacaggggcccatacaggtgtaacccctacctgcctttctggcttttcctcctgtcacaggcaggaggtatctcacatttcaggcatattggtctccgtgataccttaccacattcagtatcttttacttctttttccatttaatatattgtattcctcttactcccccatgccccaatataaaactaccaattggactctgagtagctttagaaagacttaaggcacttatttccttgtatgggaaacatctcaaaactaaatatgtctagcattgtactatttcctctagatgcaggacataatactattgaatgatttatacagcttatttatattactgtagatttctagcccattttcccagtcccagtgctagcagaaatgttggtgctataacaaatcctatcctaggagtttatcatcttactgtatgtagatgagctctagtggatgaaggtcctctatcatattataatagttttcacctcaccattaacttgacaaatatttgagcatgtactctgtgtactcttacctgaaagctgggtttgcctcttggtggacgtcaagccaaatgaaccaaccaagccaaaaatcagaaggaaggatttattatttgcagcaaataaggagaacaccagggatctttctcaaagtagtgtctcctgggacagtaaaattgggaaacttttaaattaagggcacctgcatatttatgaaggggcttgggcagtcgacaagagtccaagttttagttgattgaagtcatgagggtcagaaaaggttaagtgttacgggctaatctttaccactgaaacagaactgggaatctttacaatggatgtgttatctatgctgtggttacttttcttatctgataatagtcatttgttgtacattcgtttgttcccttaatattattagttactgagacctgtttaaggaccagcattgattcaaaaaggctgaggccaaaaatggcttctcttatgccaaagtcacacgtattctctttctccagggacccaccccctgcccagcctatctgctcacactatggttctaagtgctgaggttagtgcagtgggcttgataaattctttgcccggtggaacttagattctaatggaagaaatggattttaaacaaatttagcaaaataatttgatttccaacagtgatgactgctatgaaaaaaaaaattaggtggcataaaacatgaacagtggtctcaagatggtcagaaaaggcctctctggggacttgaagtctgaggaagaatatttcaggctgaaggagtggcaacagcaaaggccctggaggctggaaaacatttagtatgtttaaggcaagtgtgcaaaggagtgagggaagagccagaggtagggctttccaggccctggaaaagagcttttaagtttatcctgagacacaggaaatcatgggaggactttcagtaggggaatattgcttaaaagtgactaagctatattcttgcaaagataaagattacaaaaaaatcatctttagacaaagttttgctggttagtctggaacagttttatcccacttcctatattatagcaaagcagaactcttgactatagaaaatagttcaaagataaataaagtttgtactcacattaaatgtaaaagtcacttcctaaagatagttctttaaaggaggaaagaacttgaaatgttgtctaaggttaaagtcagcctttaattttgcaggtaagaaagcagaggctgataaagtttgtgacttgctcacaatcacagaaatgagacttgaacccaaaactctaattcacaagtgctctttgccctctgccatcccagtgcacagtagcatgccaattactttccagtctccacctggacaggaggtgggaagccagcgtttcaaaggcagggagggaggggaatcatggcttcacttctgcctggctgggtgctctcatcttctgtttctctttttggttgaagtatttgcagctatgcaacgtctcagttgggaatcatgcatttgaggacaagggcacggagcagtcggccatggcagtctgttggcacttctacaagcaaggaaacatctatcctggaaatgatacctttgacattgacccagaaattgaaactggtgatattcttctataagctagaacttccatttttaactccttgatttaaagtcagtaatttcatctctggaaatattgatttggcctatgctagtaggtcatagtaagaactgaatcagttatgccaggtactccactatgcctcatgattcttaaacaaaccaacaaacaaaaaatcagcaagacaagtttattattatcctcactttacagaagactaaagtgtggctcagaaggtttagtaatctgctcaaggtggacctagtaagagacagtgctgaaatttgacccaggctgtgctcttagccattttattccacaacctctcttctggataagccagtttaatagatagatattgcccctataaaacaaatgtttgaaaattcttaaatatatgatatataaaactatctcccctcaataatacttcactattcagtatctttgggggtaagttgaggagtaatgagattccctcgtagctcagtcagttagagatatgcctgcagttcaggagacctgggttcaattcctcggtcaggaagatcccctggagaaggaaatgacaacccactccagtattcttgcctgggaaatcccatgaacagaggagcctggtgggctacagtccatggagtcaaaaagagtcagacacaacttagcagctaaaccaccaccagtgagaaccagaatttagaaaagcatagcttattcctgttagcaaagttctatttacaatttgtacctaaaacattagcttaggtcattgagttaaaaagtaagtacttttagcagtagccactgggactttttctttgagaaaaataataaaggattatagtactgactagtaaaaaccttctaagatgctgtcttcctttttttaaaaagtatttattgagggaaaattgtcaacacataatattttttaaaaatagatactttaaacataaaaaattttatcttagacactctaggtgcttcaaatgtatgcataggatacgaaaagggagaggggcctcaaaatttaggctgaaaaagacaggaaggaagatggccttttatacacagtgaaatagagttcagatctttctctacctccatctactcaagaaatgttatagtcacatcttacaaacaaataaaagtcattgtaaccatgtggtatggatgtttagattttaaaatcttaattcacaaaaataccagaatctgaatatccagttttcatgatatgatcccttcaggatgcagttttctatgtttatttcaggtgctattttatgtttcgttcctttctatggcagaatgtttctttgtggaaccaaatgaaccttttcacattggaacaccagaagaaaataaactcaacttaacactggactttcacaggtgagggaagcaggtgggagggtaactcctgtttgtgtgtacatgttttcagtgcactaaagtctcctgttttccagactcataacagtggagctgcagtttaaactgaaggccattaacctgcagactattcgtcatcatgagctcccggactgttacgactttactctgactgtgagtgtgggctgggctaatttgattcctgtctggagaaaaatggttttatctagttatgtgttccatctacttctgttgagggttgatcaaatgtatagggtgttcttgtcctaattggatatgcacagaggagacattggttcagctagctctgtagtcctttcttaactgcattttcactttccaaggttttagttatcatggtcaacctctgtctgaaaatattaagtggaaaattccagagataaaccattcatgtattttaaactgcatgtcattctgagtagcagagtgaaaactttctgaccctcctcagtatgaatcatcctttggtccagtgtataccatccattagtcactcagtaaccctttcagttatctacatatcacagtacttgtgttcaaataagctttattttacttaagaatggccctaaagctggtgattccaatatgccaaagtatttctttaggtgaaaaactgaacgctcttaacttaatgaagacagaaaaccaattgtatgttgagattgcttaagctacaagaagaagaaatctataggcgacatcgtgaagaaggaaaaagaaacccgtgctagtttcactgttgcagctcaaactgcaaaaattggggccacagtgtgataagtgtgtagttaagatggaaaaacgcatttaatttgtgcaagatacttagagagaccacattcatataacttgtattatagtatatgttataattttcctattttattattgttgtttagtcgctaagtcatgtctgactcttttgtgaccccatggactgtaggctcctctgtccctggatttcccaggcaagaatactggagtgggttgccatttcctcctccaggggatcttcccaacccagggatcgaacctgcgtctcctgcattgcaggcggattctttaccactgtgccaccagggaagcccactttttaaaattattattgtttttactctcctgtgcctaatttataaacttgatcaaaggtgtgtatgtataggaaaaatattatatatgaattttggtattatctgtgatttcaggcatccactggggatcttggataaaggggagggactcttgtacccacttgtttagttgttaatcatcggtcttctgtacctcagtgtaagttctctgagggcagggaccttgtcttgttcactgctgagtcttcaggaccaagaacagcacctggcaaatacaaaaagaacaggtttgtaggtttgtatggttagctctcagcggttggtggcagtctgcttaaggtcattgccaagggttcttgctgctgagttgcctcactgaggatatttgcagcctatggaagttattgctcacagtgcctcctgcatgctgcctctgaaagttctggataccttcctctttgtattccagttgcagatagagctttgatgctatgtatgcagcacaagatgcctctcatgctggttcatcacctcacaaggatcagagtcagtaacgcaatgctgagaggcatatgcaggacagcatttgataacggcttgccttcatatgatccggatttctagtactacattagctgctgctgctactgctgctaagtcgcttcagtcgtgtccgactctgtgcaaccccatagactgcagcccaccaggatcccccgtccctgggattctccaggcaagagccctggagtgggttgccatttccttctccaatgcatcaaagtgaaaagtgaaagtgaagtaggtcagtcatgtccaactccaagcgaccccatggactgcagcctaccaggctcctccatccatgggattttccaagcaagagtactggagtggggtgccattgccttctccgactacagtagcagtttgtatcaaaagttatgtccatgatactcaactaattggctgttagaaatcaagttttcagaaattgagattaaaaatattttaggatgtagtataatataataattatgcatattgtttaataagaaaaagcactaattctgtaagactgtatttgggctacacattttgaccctaatagtaaccagcaagttgtgaatttttaatatgattttttaaaaattaagctgttatccacagtcttctctctgtctgtctctttgtctgcctctctcttatagagaaatgatacttttttaaaagtctaataatctttcaaggctttggtcaactgaaaccttcttcatggacctctttgtgatttcgcagttagaaatacattctgtgctctgaagccctagattttgtttttgttttgtactgtatgtcttaccaccttctcctttaagtttttctagatgtttatcatcagctccactagaatgaaagttccctgaaggcaggaactgttttatcttttcctctctcagaaaatatagtaggtgactcagatatttgttgaatgagcaagcaaaatactagtgacatgtagatcttttcccatgacacactacagtggaaaagcatcctggcctttagccacatgcagatgttatattttgccattcttggagaattatccccagctatgtctgttcattgtgtattcagcagtacatctcatagaactgtggtggaaactatatcctatcaggtaatttgataataaaagccattggtgtgacttttgccataaataaacatgaactgtggcagtatatccctgatgtaaaatacaaggactttcagttcagttcagttcagttcagttgctcagtcgtgtccaactctttgcgaccccatgaatcgcagcacgccaggcctccctgtccatcaccaactcccggagttcactcaaactcacgtccatcgagtcagtgatgccatccagccatctcatcctgggttgtccccttctcctcctgcccccaatccctcccagcatcagagtcttttccaatgagtcaactcttcgcatgaggtggccaaagtatttggagtcagacaaatctagattttaatgttagcttatgagttagtagcaatgtaattttaggcaaattatttaattggcatgagcctcagttttctcatttgtaaagccaaattaatgcccacctacctgacaaaattgttgtgaagataaaatatagcacatatgaaggacctaccaaattatctgatatgtggtagatgtttgattcaacagttgattaaggttatcttgtttgtgcccagttgggttcataatataaaagtagtacattatcattcattcatagtagtttgataaattcttgcaacttgtattttgaagctctttattaagtgtatagacatctagggttttttatgttcacttgaactgactcttttatcattgtgaaatggcactttttaacccttatcatattctttgctctaaaatttactttgatgttaatataaccattccagctttcttataactagtgttagcatggcatatcttttttcatccttttaaattatttgtagcttatatttaaagtaggtttcttgttacacagcatatagttgagtcttgctttttaaagccaacctaacaatctctaccttttaattaaggtgcttatatcatttaaattgcatgaaattattaatatggtttctttctttttctgccttcttttggattaactgagtggtttttttaggattccagtctatctcatatgttagcttattagctataactctttgttgtgttattttatggtttatagtacacatatttaacttattacaacctactttcaagtgatcgtgtgccagtacatgtataacataaaaaccacctggcatggttttccttctgcatacagggcttcctttaatatttcttatactgcagatctgctagtaataagttcttttcgcttctgtatgtctgtaaaagtatttcaccttcgttttttaaaggtagagacttctagcctggctgtttttaccctggagctttaaagattttgctctttagtttctattgtttctgatgagaaatctgctgtcttcttcgtctttgttcttctgtatgggatgtatttccccctctggatgctttaaaaatttttctcttcatctctggtttcagtggtactatatacctttatgtcgttttcttcatgtttcttgtatttggggttcattgaatatcttggatctgtgggtttatagtttttattatgtttgacatttactcagtgttatttcttcacatatttttctatctctttccccttacttttcagagattccaataatacgtatatttgggcacttgaagttgtcctctttctttgatttaattttctaatattttctctgtgcttcactttgaatagttttactgctgtgacttcaaatcactaatcattttccctgtattatctaatctgttattagttacactcagttttttctttttcatttaaagaattcaatttcttctaaaccttgcttagatgtgattgacattaagtcagagtttattggatatttactgagcacctactatttgaaagaccccaaggctctttgtatgggcaaagcatggtttcttcttggcaaagatttctgactcatttaaatagtgctgagcatcttccttgtgtgaggccgggtctccgcaatgataaagatgggcatacattatcaatatccttggttgcttgtcatgggaagaaacttatagtctaacatgagtggaaacagagtaactagacttactaagtttatttgtaatcttttgtctgaagtggtatctgattacaccacatgaagattttcaattaaactcatctaaaagaatatgcctgcaatgtaggagacccaagttcgatcactgggtctggaagatcccatggagaagggaatggcaaccgactccagaattcttgcctggagaattctatggacagaggagcctgacaggctacagtcgatggggtctcaaagagtcaggcaaaactgaatgactaacacaacagatggcagacttgaaaagaactttccttttactttaggacctgagagaagaggcaccaaaaatgaaaacaaaacccccaaaccaggctgatttccttagtttgccttccaggtgtctgcaaggagaaggtgggggggagcttgaaggggaagacagtggaagagctatgaaagctgttctggcatgactttgtcctgttggtgcctggtgtcccaaaacaggtatcactgaagccagacatactgttggttccctgagaccacgtcctttgtaatattgtacatacggttccagagtgacaaagaaaacgaatctcagaaggaaaattgaaaaagctccacctgaaatgtttcaagacggaaataatgagcatctgtgttagtaagaatagcattaaaaatctatccctagccaaggctctgctggaagaagggggataacatgtttgtacttgctcaggaggacatctagaggtgctgagaatgagaggagggggaagttctcttgtgttacaagtggttcagggcttgaatactatcctagaaacttaggatttttagagactaaacattctttacggaagatctaactcaactttctcagctcacagagaaataaagggaacttcctgaggttgaacgaagttagttagcatcaggtgagagttgagggtctgggtttcctgtaactttgggagaattgtttcctagtgaatgcatggcagcaccttggctttaaaagcactaggtatgtttttgacccttttcctgttcttcacagataacttttgacaacaaagcccacagtggaagaattaagataagtttagataatgacatctctatcagagaatgtaaagactggcatgtatctggatcaagtaagtaatgaattttactagttttcaaaatggttattaaataatattaaatgtttattaaattactcgtcccaaggatacgtggagcttcaaatgaaagaactggatcatgtccaagtccctaattcattttagttatctaatgttccaagtaattcataagttaatataaatggtttttcttgccttttccatgagccttcactggctagtccttactaaaaaaaactgcttataattcccccaacaacaacaataaaaaaatcacatctactcaaaccagtatttatcgagtgtttattgcataagtactttgagctacactttccttacttcagtgttttaaaatatctttaagataggtagcatccctatctttatagatgaagaaactaaggctcagaagtgaattttggtgtctttggtcatatattcagggagaattcaggtaggatttgaccctgaaatatcccacccattataattatcttctatccaggtcaaaaagtagatgaaataaggacagagtacagtcctagaaatatggacacaaactcaagtataaattgagtatcactgagaattttggagctgaactagatgaaactgactggaaagaattgatctcatttcctagttccttgtagtggtgtgtaatagtgtgttgtgcttgactttaatgattaggtcagagggtcttggattctagtaaggagaagcaccattccaagtacctgctaagctgcagttttccttgcttcacacaagacagtcagcaggtctggtggtgagacccaggaatgtgcagtgagtccttattcagaccatacttggatgataattactttagggttccctactaatggattcacaaagttcagaaatagtaatgagatagcatgaataaatgaaataaaatgtcttcattttagtgttcttttcactaataggtaacttcaaatatatgaagacctggactcacaaacttcaattataaaatttcaatcacaaaattgtttatttgaaacacaagcctgttttgtcatctgtaaacatcttaatacttcacatacttgggaacagggaaaatgagagcatacgaaggtgtcgggacataaactttctctcaaatgtttgtttcttggattttaagtttttctgaagtagatttagtccttcatacaacatttagatgcctcttgacaaaattatgggttgcttcattacagtatagtcttgagttctttccatcagcagagagcagcccaacttgttgagtaggacatgtgacagccaccctctgctcttcacctagctgtgcttctgctgggaggactgagtcccagaatctctgggtgggtggctctgccttgtcattcaagtctcagctaaaagccactgcctctgggtgaggccttccttcactgtgcgaacgaacctttcttctccccattccctctcccaaagctccctcagtagtagtgctcaaattttagtgttacctggagagcttaggaaagcagtttctgatttaccagggctagggtaaggaaggaggatgttcatttctaacaagttccaaagagatgccaagaaccactgacagagtaacggaccctggagacaaactgcaaaggtctgaacactaactctgcacttactggcctggaatcccaggcaagttctgtgaccgctctgggcttcagttttctcacctgcaaagtggggataatcacacctacctcgtggggttactgtgaggtgcaaatgagttaaatcttcaaaaatgcttgaaactatcccaggtaggaaatacacttagtagcttttggatttactttcttcctatcacatactcctatcaggaagtattttgttcatttacttgtttacttttttctcttgtctcactggagtagaggttccacaaggtcagggactctatctgtcttcttcactattgtattctcagcatgtgaaaacacacctgatgcttaatgagtattttagacctagataagtatatttaaataagatatgcaggaaccctaactgtattaagaacaaaagatgacaggtgacagttaaagatcttcgatacatggttttgaggacttttaaccttctttaaacactaacagaagaatctgtatcagaggtctttctgtttgttatctttgtggaaagaatacttgaatttttaaaattattctaaacatgagtgtgaagaaggatccatataaaacttgaaaatgtttctgaggagggaaaaaaaagacttgacacattatgttttttgtcaagtgatttaacatgaacatgtcaattctccctagattaatctataaattcagcatgattccccccaaaaattaacagtaagattgttattggaatttgacattttggtcctgaagaaatatgggaaaataacaagcaagactagccagtgaaaattctaggaaagtaatgagacgtatttttcttaggcattaaaacacacaaaaaagttggaaggggaagatatggtacttgaatacattcaacagccatttggtacatgataaaaatagcatttcacatcatttgctccttttattggcaaaaactaatgaatactgatgtccaatgatgaagacgatgtgtgatgtgtgtaggcatgtaaactggcatgatatttttgcagagcagtttcttagatctgtttttagaaagatgcatatggtttaacccaacaactccatctttggatattcatccacctaaagaatcacttgaacctgtgcacaaagaggacctggagaatggattgtagtagtgaaaccagattacagcctgaacgtccttacaaataaagtattgtacatctgtactgaaacgacgcaatgcagctgttaaaataaatgaggctaaaaatggggggggcgggtaagaagtagaagtaagtgtcaccacactgatgttccagtacataagcaggtaaccctctttcctccagttcagaagaacactcattacatgatgaccttcgatgccttcattattctgacgtgcttggcttcgttaatcctgtgtgttcgatctgtggtgagaggacttcagcttcagcaggtaggagtcactgctttctaggaatgcactggtcattttgattgacagaaattcaccatgcttcccctcttttccctaaaggaatttgtcaattttttcctcctccattataagaaggaagtttctgtttctgatcgaatggaatttgtcaatggatggtatattatgattattattagtgacatattgaccatcattggatcaattctgaaaatggaaattcaagctaaggtgaaattttttcctatttatgtccttgttagtatcagatttgccttaactgtcatttgtttttccaaaatgtaaggattcacagagtacaagatttctttcaaacattgtattgagtaaacctgaaataacagtaattcataagaatctggtcaggaaatattttaggctgtttttcaaagtgtgatttaagtcctctcaatcagggtcacttgggtatctgataaaataccccacgttagacctactgaatgtgaactctgaggttggggcctgtgaattcttgcacacactgaaagtcatacacacagcaagataactaaggtaaaagatttttttgttgttgttcttagaaggaatgccagaatcttcagtagaaagagttggactgtgggtaggagatggggagtgaggccaaagtactgttgtgtgagtccttgcagttattcctttgtccattcaaattgagaatattcccattttcttactgttaccattgatgtactgcaaggttttccattttaagttaggactaatccaacttgtatatcaaccctcccccaaagcaaaaaaaaaataataataatactgttcaaactaatcttgtttagatttctgtttttctatcctcgactgtaattaaggatgagtatgaaccacatggggagcctgttttggttgagattcctgggcagagatctcaaatgcaatagctcagatatgataggagcttacttctcccttatgtaattgtcagggtgggttttccagcctggcaagtcactcagctccacacagtcattcaggaatctaagtttctcccatctttttctctgatgaccattaccattgaaggctcacccagactgcataattgatgctggattgtctcatgaacaggttgcagcccatggaagggaaaacctggtatggtaggtagtaggtctcttacagtcttacaccttggctcagaatggcagccttcattctgtcctgctggagaaaatttagccacatctgattgcaggggagctgggaagacagcccacacatgtacctcagaaagagagagtgagtttagaagccatggagcagctgtcaccatatgccagggtaatatatatcattgaaatacatatttaactttagggaacaaataaagagaagtagggggagatttgcagcaaatcttcatttttactaatcccacctaccattaacttcagtgagcccttaatggtattcagcagtctttctacatttttctagaccatgcattccccctgccttctagctgatcatttcatattttttctcgcttgaaacttctaatacctcttttccatcctttctttcaactgatgacctcacttcctgtttcacaaaataataaacagaattgaaattctacaaaatcccacttcatttatctacccatgagcatcaatgcccatacactttgcattttctcttactgtggatataatatttaggttactatccggggccaactcctccacgtgcctatcagatgctgtccctacttgcttgttccagacccatcagcatcaatgcctgtacactttgcattttctcttactctggatataatatttaggttactatccggggccaactcctccacgtgcctatcagatgctgtccctacttgcttgctccagaccatggctccagctcttactctgtttcttatgcatccttaatttcctgttttctgccatggcgtttccatgagcatgtttttttttttttctttctaaaaagacaaatctcaacctgttctctctccagctacttccccatttctctgctctcctttacatagcaaaagacctcaaaagagtatttaatactgtttctggctctgttcatccagttctatcttgtatctgttctaatcaggctgcatggaaagtgtattttccaatgacctgtaactgttgctgtgtctaatattcaattatttatcctcattttgacccattagcagctctttaacactgcaagcactttctttgttgatgggttttttcactggctgtcacttacctaatttttctcttgaatcatggctggtcttcccttccctttgctgttccttctgactttaccaagctatttaagcaacagagcttcaaggcaccatgcttaaacacctcgtttttctgcctttgttttgtgatcttatcctgtcctattgccttaaagagtacctattttccaatgattttcaaatctgtttctccagtttggaattattccctgaactccagtctcaaatatccaactgtttcttccacatcttcacttgaatgtctacacagcttcacaaatttaacataccttaaacaatcattgtctcaatggacatgagttggcacaaactccgggagttggtgatggacagggaagcctggcatgctgcagtccatgtggttgcaaagagctggacatgactgagtgactgaacaaaacaactccacctccaaagtcaaaactcacttctctgtggcctttcaaatttcagttaacggcagctcttttcagctgatcaaggaaaaaaaccatagatccatccttggctcctcttttttactaattccctctcctccatatctcatccaagagaaaatcctgtttgtctaccttcagaaatcacctcatcacctccaccattcccagcctggtccaaagcaccatcagctctcatctgcgttactgcagtagccatctctctcttccacagtctgctctcaaccatagagccaacattggattacagcactcctgttcagagctctcaatctccctcatttattcaaagtaaaaggcaaagttgttaaattatacttgtgaaactctaaactacctgcttcctcacctcggtgactccttactctcctctatcgttctctagccagacccactatcttgccagatgccctcctgcttttgggcctctgcagatactggtccctctgcatggaaagctcttcccctagattcttgcttggtttgctccctcactcccttcatgtctttgctcaaatgcccccttttcagtgagaccttccctgatcacccttttgaaatgcagtgcacagccatcctttgtcccctcccctgaattttctcctctccacttaccatcagcccatgtatgaagggtttcactaattaacttctgtcatctctctctacacccaatagaatgtaaatctcatgagggcagggaattttgtctgttcactactttgtccttagcacctaaaatggtgcccaactctttgctactcaataaataatttttgccccagtgaatttctgctatataactgataatttttttccactgtgttttagagtctaacaagttatgatgtctgtagcatacttcttgggacctctaccatgcttgtgtggcttggagttatccggtactttggtttttttcataaatacaatgtaaggaattccacagatctccaagctgttggtatttctctttcaaagttactgcactggtttgtttgaaggacaaagggattctaatgacctcttttactttcccagctcctcattctcaccctccaggcggcactgcccaatgtcatcaggttctgctgctgtgcagccatgatttatttaggctattgcttctgtggatggattgtgctggggccttatcatgataaggtactggtaaacaactttctctgttgctgttaagctctcagagtagtaccagtggcttgctattcttttaagataagctccttttactttgtgactcagcctaaacattgaaggtattgtgtctgttgccatgtttttaaactggtgaggtaagaccaggtggcactaatggtaaataacccgcctaccaatgcaagacatgtaaaagatatgggttcagtccctgggttgggaagatcccctggaggagggcagggcaacccactccagtattattgcctggagaaatcccatggacagaggagcctggcagggttgcaaagagttggacgcgactgaagcgactgagcgcacaccagcttgagaggatggttgattccttggttgcctcagctccttttgtgagctgtgtcagatagttaagtccttctttccatcagtgaagccaggtttgacaatttgattcatcaatatatatttatgggctatttaggtaatttttactgaaatgtgactttatttttaaaagtagtataggaagaaacttgtagaaatatttgacatttttgtttactagagttatagtcttgactataataccatcatcttaaatggaatgaactttagaacagaagcatgagcatttgtcttcgagacctgaatgctctgcagaagcatttcaaggatctctctctgcagagaggagctggtctgtcccttctttcttcttcagttcaggcttctcctatgaagaggaacatcaagagggagctcctgattccaagaaaaccagtaggcatgtacctactatgtagatcacaaaacaaatgtctacaggaatgacttttcccggttgtctccattgtatacatgttattaaacttttgtttgattttctcgttttaaaaaaaaatatgcctgtggttacccgagggtatttgtttgaaagggtaacttgggatatctagttccactatttttattatggagtcatgatcaaagtctccagtaggaaggaacatgaaataaaatgaatattttttttttgcagttccgttctctgaatatggtctctgagtgtcttttctcgctgataaatggagatgatatgtttgccacatttgcaaaaatgcagcaaaaaagttacctggtctggctttttagcagaatttacctctactcattcatcagcctttttatatacatgattttaagtcttttcattgcactgatcactgatacgtatgaaacaattaaggtaggttcatcaagaaccgcgaggagtgacattttcctagaacttgcagagagtcaataaaatacagtacctaatggggaggagatcaatggaatggtaatttcttctgagtagagaaaaaggacttcaattttagatcccgagaaacagaatttctagaatgttgaaaggtttgtctttgagtaactgttttcaaacaagctttttaatcttttattagcattataaggatcattaggtattgggttagtgaaacatgacatttcagatggtcaaaattttgtggggagcttttaaaatccaattttcatgaagaaaaattgacctctttatttgaagtgtgctgtaactgaacgcatcattctgctgggcccttcttgggaccactccagaggcttggtctccagaacagtcaaggaactgataggtcaagaactcgccatgtatatgttccacatttaggagtgtgatttgaaaagctgttatcatttagtcgctcacttgtgtccaactctcaatcattaatactgttattcacgctggattttaaaaatcagtttgagccctttaaaatatggaaaggcagaataaatatccatatgtattcaaatttctaataaccttcccacgtggcgctagtggctcaagaacccgtctgctaatgcaggagatgtgggagacttgggttcgatccctgggttgagaagatcccctggagaaggaagtggcaatctactccaatattcttgcctgtagaatcccatggacggaagagcctggtgggctacagtccatagggttgaaaagagctggatacgactgaagcaacttggcctgcacacacacgttagtagtagcacgttaggtatattattggcatagacacttccatttggggacttctgtttctgaacatgagaggggtaatgaaacatgatgccatgtgaatagataaggagaaagatgatcaacagttgatggattatatattggtaattacagataccttgttcaggcaaccagggctgtgacttcattcttactgaatcaggtgtcaagaactgactgtcctcaatgctcacttgaccaacttgcttagagtcaccagggagactggaaagaatgtcgttgtacctgtccaaatcccttcccatggtgctctaaaagttcgctgccttcacctctgcatgtagaaagctatattttattcaagggtgatgatatctgaggtctcaaagagtaacgtgaatggacagctcttgacacaagcttaagactcttagtttagatgttaacctctttgcacgactcagggcacttgtcacatgggtgagccctttctgatcctttctggcccagggcccattcttgagatcctagatccccaaactgaaataaatattagacttttatataaatctctctgtctggaagagagactccaaaatggtatgcaggctgatttttccctggaaggaggtcttagattcagattcatcatgtccatttcaggttgactcagacccacgaaagagagcccaggagggcactgcagaatcttagacccacttttccttaggcaaacctaagagtggctctagaggctccatcaccatgaaaatacgtggaagtgagtgaactatccctttagaaaaacccctacctaacccaccgctgtgggtttcccagctggcactagcagtaaagaacctgccttccagtgcaggtagatgtaagagatgcaagttcagtccctgggttgggacgatcctctggaggagggcatgacaatccactccagtattccatggagaatcccatggacaggagagcctgaccatagggtcgcacagagttggacactactgaagcgacttagcatgcatcccacccctgtagccaaatgatccactctgaatttgaaataaagctgttctcaagggacttattaatgaaaactttttttttaaattcttctgtatagcattaccaacaagatggctttcctgagactgaacttcgtatatttatatcagagtgcaaagatctgcctaattctggaaagtaccgattagaagaagacactccagtatcgatattctgctgttgtaaaaagtagctgttaggctaatctgtgatctggagagaatatattatgtaaatgagttgggagataaaaagaggtattttaatatgagatgtagtatgtctgaagactactattttgagcaaattgatgactataattcatcaagaactgtgtttatatttttaaagcaatatttaatgtctatagctttgtgctaggtttatttaaaaaaaaaaacccactttgatgagggaaactgttggattcttgtcctgtttattttgccacttttagaatatgttttccatacctttctttactcttgcttccagttattttgactgtgctgactgtgtcatcagtagaaacagtgcctggtctgatgtcagccaagtcgctaaccctggcctggacaattctcagtggtcatctgagagacgggatggttgctgtctatccagtaatcattggtggctcagatggtaaagaatctgcctgcagtgcagacctgggttcgatccctgggtggg

SEQ ID NO: 75 - DNA, 9848 bp, Hippotragus equinus
  source 1..9848: mol_type = genomic DNA
tcctggccccaggcagctctttattcatggtcagcagtggcctgggcgcaggggattggccagggtttgggcccagccgcccaacccccaggttggggctcctggcaggctcagcgacagctctgtcctccagggccttgcagcacccaggaaacccttggctggccagggctgagctccatgcagcccctgggcccaggaccctcatatctggccccacataacacaaagcacctccatcatccagaccgtgggagatgggttagagttggcactgaagtacaccaaaccacaagaatcccaccagctcggtgtcttctccttaccccagcagggataagctgctgggacctcatccatcctgacctccacccacagccagacagagacaggacaacgcaggggagggagcggaggggctgctccagacctctgggcatcagatgttcacagtcgaggttaatttacaaagggcaagggaccacggggtgggatcagggctaggctccagggtcccctgcaagagaaggggtaggagtggggttggggggatgggccggccagttctggcccggctgtcccagacctaccaccacccaggactagttggggcttttgtagggtgggggcgcctacgactcacatttccgaaggccgatgggccagaccaggagactgcacagagccagggtggcggccacgcccacaccacctgtcacgaccaccatcacccaatggtagaaagccacacaggctttgcagcagagctccaagctggggaggagcaagagggagtgagagctatcactaggtaccctccggccccaggctggacctcctgctcctctcagctagtgcctgcgctttcctggcactcagccaggggtcaccctccacccccttatcccctccagcatctgatacctcacccagtaaggtcagctctgccttcaaagtctatcccagactccccatttgtcctccctcagtacccccaacccagtccagcccagcaccacccacacccctacatcctagtcccctccggttcccaccttcactgccccatctgtccttccaagagccactagagggcgcagtgagcaactgagtcaggcccacccctctgcccacagggctggggccacccccaaccctgcagtcctccccccctgctgctgcccctgcacgacctgcgccatcccctccctgccctcctcactctccagacacccaggccttctccactgttctttcaacataccaggcctggtcctgccccagggcctttgctcaggctcttcctctccatttacctagaaatccctgacatcccccaggtttcagatcccatgtcacctcaaggaagcccttcctgacctcttgccctagtgggccttcctaagtggtgtccttcacaccctcgtacacatttattcatgggatactactgtgcctggaaccctaaggcctaaggatctgaatgacagggattccaggcttcccactgccctgtccactcccgtcacccaacccatctttgtgtcatcagcgcccagcacaaggcacactgtccactctgaataaatgggtgctggaagtggggaataacctggtctccctgactctgaggccaccaccgtgttgggatcttctgtcagttatggaatccatagtctgtgggcagtgcctggcatacaacacaggcttggcacaccttactagacatgacgacagctggatggggtactcacgagcaggggtgcaggctctggatggccataactgccagcccattggccaccttgtccgagaagctcatggcgccgtacacgaaggctccactgtgctggggggacacaggcaggggggtcagcaccccaggcctcggccccagtccccaacctcgacttggccccactcagcaaccctaccgtgtgagggccgatgaggtcagccgtcatggccaacgaggtgaccaggatggtggcacagcccatgcccagcaacacagccgccacatacacagccacgcccagctcatctgccagcgccacccaggctgcaaaggccaggatcaccaggaggcccacaaagtaggtcatctgcagagcacccagcctggcgtcaggcccacctcattgggcagccctgagccggacaccagccctttctggtctccaacctggcccccagccccagcaaacgaggactgagttgggtcatccctaaggagcccccaactctgacctcggagaattccgaggctctgagcctgctgatactgagtgatccatggagcgcatgttctactgctaagctgtctgccatggctgccactagagactggtggctactcatgtctcaacacgagttaataaaggaaatcaagtgaagtgtttggttcttcagtcatacccgccacccctgctcctgacctctagagggctgtgggtggtcacagggtgctcaacgcccacgttctacaactcatttcccatcaggatgtgggtgccctgtccggagtcgcccaggttctgggggcacccccctccccgccttcccactcacattcctcccgatgcacttgttcactggcttcatgaggaaggaggagcagaaaccgctaaggtacatcaccagcgggatggtggcgatgaacctctgtggggtggagagggcacaagcacgtcgggcctggctcagcaggctcagggacccctgtcccaacctgtccgcccagctcaccttgggcaggtggagggagtaggtgaggtacatggctatgtacgtctgggacaggttcacaataagcctcgtgctcatgtacagcaggccaacctgggaacacacggagcatggggccagggggcagggtgccaagtcaggatgagtcaccctgcagctggcgcctgaccattagcagtgaccgcctagctggtcaggtggagaagatggcaggatctattagtaatgtctgtcctgggtgtggaggggaaggggtacatttgctctagtgtctgccatctctgcctgcagcccagcacagtgagggccctggtaggggaggagcatcaaccccaaccttgtttgaccctcctccccctactgtcatacctgataaaaggctggctcccgaagccagtgtttccagagcagcaagggctgggcggtagagggagccaacagggggctgtgttcaccgggctcctccacctgccgccggcgcccctccctggtgcccaggtggaacagcagtgagaagacagctccgacacccaccaccagcagggagaggttctggggaccgggtaggagaggggtcagcagtgacacttggccccaaccctgagttcaggaccttgggagcacccctcccaacccccccagctcacccggaacactggcacatcctggacccccagttggtcgctgacatcctcggcggggccagtgcggggagagccctgcaggtggagcagaagccaggcagctccatagacagcgatgttggccaccacagtgaaggcatacctgtgggacagtcaggcctcagagaggccgcccagaagccacacaaccgcttccttcccaggcggtcacccagtcagagatgctagccatgcctggggaaggcctggccacatgatgtcagccaccaacacgtcaggtagtccccggaaagcctctgctggcctcagtttccccagcctccacattatcagacttcctgctctgaaccaagactccaccacaaggtcctgcctgcccagggcccagagtgcagagattccacgaagcagggccgagtcaggctgcaacccagagacctgagatactcagaaaccctgggcttcagctgggcagagttacccgggcccacacctgcctgtagcccctgagccctgtcccccagggcctcaccagataaggagcctctgggtttcactgggactctgtttccctttctgaaagtgaaaacaagaacacccccagagtcacgaggctcttgtgggtagaaagcacccggagcttgacttctatgagcccagcccgccccctgcagctggggcctttgcgggcccagtcattgggcaatcccctgatgccgttagtgcctgcagctcccagccctaatggggaactgggccgtggacaggcggggcctcatgaccagcgttcatgcctgaacggccacctgcaggagtgacatccctcctgcccaacagtcaccccctgatccccgctcccccgacacaggccccactctgctcaaaccctctccctgggcacatgttaatcaacctcctgggcttgtcatgagaatgaaagatggtttgctgtgctcacacacagcaagtgttctaaagtgctcctgctaccaccgcactagaatcgccacctttaagtaagtcagtggatgcgctgggggccagctgcacccacatgtgacaggcaggatgctaagatgcccagagatccccatgccccgcttcctctccgtctaacctcctccctttggggaacagaacctatgaatacaatgggatgtcaggccatgctaagataacgtcctacggcaaagataagggattttgcagatgtaattaagaaagactatccctggcgggcctccaggagaaggaaatggcaacccactccagtattcttgcctggaaaatcccctggacagaggtgtctggtgggctacagttcatggggtcgcaaacagttggatacaactgaacgactgagcacatcctgggtgggcccgatctaatcaagtgaccctcagaaagaaggcggctcacaccgtccctgagatcagagactctcatgctggccacaaagcagcagcaaaccccaggacttctaaaaggaagcaaacacagcaatcgatgacaacgtaagcggggcagagggacctgaaacctcagccgacacctcaactgcagcctcaagcctgaaactgagaacccagctaagcaaagccagactcctcacctgccagaactgtgaggcagtccatatgtgctgtctgagctgtctgaagctgctgatgcagtgctatttgttacgcagcaacagctgaatgatacactgattgacagatgtccattctggagctgagacccagagccacacagccaagcagagctcagacatcgtaggttgccctgggccccctgccccaccctgccctgccccagaggtggtacctcagagccgtgagctccaccttctcatggtcgttggtgacgagctctgggatgaggctgaggtgggcgatttgtgtagcagcccagccgaactggaagatcacaatgaagggcccgtagtagaggagcgcagcccactcaggtgtggcgggcccgcagcccaggcaggggctgaagatgaaggggaaggacagcaagacacagatggtgcctgtggacaagcagagtgtggagggcacgtcgcaggccttcccgctggccccgggccccccagacacagacacagacaagggtacacagtgagtgagggccagaggcccaggctccctgggctcacagccctgtgacagatagggaaactaaggcggagagatccaggggtcccccgagaacacacacccaaacaggacagagcagctgcacctccccatccaggctacctgccccttgtgtgtggcgggaaaacacacagagtaggtcacatgccatacccatgagggggcagaggcaggaatggggggccccatgccagctcaggactccccaagcttgccccctaggtgacagctcaacaaactgaagcagagcttgaggccatgcagcaggttgaaagagcgctgtggggtcccccggggaagtgcccaccacttccccttcctgcctccccaccaaggaggacttttcctcccagtttctaccaggtgacgctgggtggggctggttggaccctgccctccctgaaccctagtgtccccatcagcccatgagggggcctcttcctggaaagtaccctaattcctcagaacaagcacaggtccttctcgaggcctcaaaggccctgccgacctgccccgtcctctccctgccctcccctcctcccacttcctcccctcggctcactctgctccaggcactgggcctccagctgtccctcctgccccagcgccttggcaccatctgtgccctctgcctggaatgcttctccccactacatctgagcaagacccactcctctccatcccttgggactgaactcaaatgtcacctcctccaaaaagctcccctcccaaccagctctgttgccagcagtcccctccccacccggacaccgtctgaaccctgctttctcttcttcacatcccttagcactcacaggaattctttgtctgtctgcctgtctgtctgagggtgggtaacaggtctctccaagtcacttctgtgtccctggcacccattacagagcctggcacaccaagatcttgtcaatgagtgaataataacagtggcctttgtttacagcccaaagcagtacatgttattattaaccccatttcctgatgaggaaactgaggcccacagagtgagctatggaactaagagtccggcgctccacccttctcctcccatccccggagggcctggagtcagacttccgttcttcctctttcctgccctggctcaggctctggaggtgacctcattccccagaccttgggcccgcccccacagtccagggattgggaactgaaacccaaaccaccctctctatttctccggaattggtgcctgagaagggcaccccaggcccctccagatgcctggaggtctggtggccactcagggccagacaggaactgtagactctggtcagaagaatgtgctgccgtagccagactctaccctgccactgctcaggtagttaaccattgtcagcgccccaggctgcctggctgtggaacttcggcaagtgactttacatctctgggcctttgcctccagaaaagggagctaatgaaaataccccacaagatgggtgtgaggattaagagttaatgaaattgggaactcctactactctgagccacttcctgtctcagcaacttcaaagccatgagacttcacaactttgcaaatgctgtttcaactacttggaatgctgccccataagcacacactcctattcatcctccaaaaccccaaagctaatgccccctccagtgctctgcttcttccttatgaagtccagtctacccacctgctccaacctggaccccacaggagtatccatgtgctctctgggtcctctgtgggctagaaggggagcccagatgctcattaaaggtgaacatcgagtccgtccccactacccacagattcaggggcaaaacagagtggaagtggacactgtggccaaggtgaccttcattcgagtcaccttatcaggcctcacaaggggccaccctggcttcctctccccacagatcttcctggatcttcctatgtactaaccccaaggcagggggagggtacaggtagatatctggttggggcacccattccccacacctgttttgcctaaacacaaagccttcagtttaggggacttagattttggtctggggtcaggtgagaccctcactgaagctcagccctctgattacaaaaggggaagttggcgctgctactaggtcccatctcagggcctttgcacaggcagcatccactgccaggggccacctacccactgaaggctccatctccttagaagggtctcatctgtccatcccagaaaacaaaaagagtcctcacacctctttggcccaggaacgacctgtttggtgtgtgtgtcaacaagtctacccaaatatgaacaaaactgcattcgagattgtgagttcagctctgtaagcgatcccaatgtgagcccatggagggacacctccgtctgcagtctgagtcacctgcctctacctgctcccctccctgggtgctcgtctaacagcctgagcgtgctcagtgtctaagaaacctgaaatccagccccaagccgctgcagacacagcaatgccggccacccgcaggcaacctggaggtctgctgaaccttgcaaatatgtcacgcacaagggcccggggcaaataactgcctcttcagtcactgtttccaggggcagggagatactagccggccctcctggctcttgaaaagttgccaccctgaattctcataagtggcaggattcctgactttgcttcctgaaatgcctggcgtgccccaagtgccaggatgcggctagtacttctgccaggaagagaacagtaggcaaagtggcccacagctaatctcagggcccagggtccaggcgggcagaggagggactctaggagctgggccttatcagggatgtgcactggggagggtactcctgcccctgtgacacctacctcctccccttgcagacagccctctagtccaggcaacacccccagaaggaacagagggtaaccccatagccttctctgaagaaccccatcccatcagctggacaagcacagaaccctgacctttctggctcacccggcccacaacccagttcccagggcagctccccaaagtcaccaattgccaggttgcccaagatggggcagaagacagatggacaaagtgcactgaggggacagagagcaacacggggttctaggcaacctaactcagagctgtcatcggtggtcactctcatacagaccgagagaagtcaggccataccagacagactgacagtggaggcactggcagaagatccaacccagagagggttcagggtgcccctgagcatcagacagatgaagaaaagcaacactagagggtcacacccagagtcacatggaggaggctccacgggtcacccagcagccatcagacagtcagacagaggaagagtacagagcagttaagtggaccgatgggaaggctcatgggctgggcagatagaggactgagcagtgggagaggggccggcagtcggatgagggaggccggaccggggcttaccgaccaggtgccaggccttgcgcgggccgaagcgggcgcagcggcctgcggcgcggtcagcctcgaagcccaccaggggcgtgcatagcccgtcggccacctggccgagcagtagcagcaggccggcgccgcgcgagctgtaggcgcgcaccgaatgcaggtagagcagcaggtaggtgaaccacatggacgcgcacaggtcattgaggaagtggcccacagcgtagctcagcctcgcgaccagggacagcggtcgcgggggcgctccggctccggccgccgggggccccgggcccatggcggcactccgggctcggcctgtccgtccggcgctggcagactggaccccagagccgggctgtccgcgtccagttcgccccgtggcgcctctctcctccgccccaccccgccgagtgcttttgcagctgcggtgctggtggacccgggacaacctcgggtggggcggggaatctcgggagcggcgtccactctcgccaatcggagccacacgccggagaaggcaagccaatcatcacgaagagggggcgtggcccgggggcaaatgggttcccgacgccgggcgccagcgggttcagccccgccggggctgcgaggtcctagcgcccaccgttcttatcattggtttgcggaccccctcccacgcaggtggggggcgacgccaagggtgctcctaatcagactcgcgccttaagacacaagccgtttcagtctgcccgcaaatttacgaggcctcttgtgggccaaggaggacggggtgggctggggacgcgggtgggt

SEQ ID NO: 76 - DNA, 229322 bp, Hippotragus equinus
  source 1..229322: mol_type = genomic DNA
ttttaaacaaggacttggcgtgccctcgcgaaatgtgtgagcttggaggagtgatggtaggagaacacagctgagtccattcttattaaatggtcaagtctgtacccttgaagctagtggagagagagaagggagaggagctgctgacattgacaatgaatccaaactggagttgcactagcggtgtctaccacgttgcctctgccctcgcttagccttctgggaattgtagttttgtggcgagcggctcccctggcaagtcgggtatactcggcccggctgtgactacagatcccagacggcgccgggcagccgcccctcccgtcccggttcgagtgtaaactcccggcgccggggcgggcggccgcgcgcgggccagcgggctgagctctgcaaggcttgggggcgcaccgctcgggggacccaggccccgccacctcccctccgaccccgggctcggttctcactttggagcagtgcgaggacgggaagctggagccatgcagtcggaatcggggatcgtgccggatttcgaagtcggggaggagtttcacgaagagcccaaaacctattacgaactcaaaagtcaacctttgaagagcaggtgagtggtgacagctggagggaggcgcggcccgcccctggaggacccgttgccgcccactctgaggcgaggaaagcagctggcccggactctgggacaaggaccccgtgcccttgccccggggcagagggcgaactgacccccgcagctgggggccgtgccggcccggacgggtgcacctatgagggtctcctcccgagcgcattttgggcgtgcggcgggcagccccggacagcccgcgaggacgaggggatccctcggttggggataccagctgcggagagcgggtgggggctggggagtgccccgacgcggaggtgggggagaaggagcgccgggccgggacgcggtctgggttagtttcgagtgaaccccttttctgaaaatcccagcgggctgagaacttgggggagggagagcttacggtggatcgagcgcgacgttagagacaagcaattagctcctatgttgttggccgcttaggagtcggcccctctgggaaaaccgacctcgggccgcctccaggtgaggtttcccgagccccgcccctgaccttcccggccgcggcacccctgtgcgggaggggcggggtgcgaggtggggggtgcgtgtctccttgtccaggtggaactcccgggctttggggtctcattcaaatgcaggccttccctggagggggtggagcggggggggggggaactttgagacggagatttggcgagtgaccgctgttgggccgcgacatgtctttaattctctgggcacttctaaaactgtttgggaggagagtgaagacacctgctggtctggcgtcccatcacccttagtgctcacttcttaggctgcctccactcccacttgtcccttggagcagtttgggtgtcttttttcctctctgtcctgtggccactcaggacatttccaacgtttactaagagagaggtggtcagttgaggcgctgagagtagagagggtttagttccgcccctcagttgtgaggtagcatgaggctggaactagaagcttcagcagtgcttctgcatccgtttcaaaccttctgccggccgctcactgtcgatagtgtttgggtgaagagggggacagggtccggaaatcatggtgaaggaaggactggatccggagtgaagggatgtgatcagagctgctggggcatgggggattggtacttgtgcagttaagttcgtttccttcagggctgtgtcagactctgaatccactttggagaaggaaatctgtggagagcacaccgactgactgggtggctgaagcagcctcttggcagatgcttcagggagattggaaggaaacctcctatgcagttagttgcctaaaaccagcctttagttggtggtttctcttcataatggctgttttgtgtgtgagcctagattgtgtgtgttgggggttgggggtgtggagtaatagtgtgtaaagggtattgttggttatgctcattggggctttatctgtattcggctgaagggaccagtgttttaccgagcagtctctgcttttgcttctataagcaaatgcttacatggccagaatgagggagggagtgtgtgtgtgtgtgtgtgtgtgtgtgtgtgtgtgtagtcctgaaagaaatgaattaaccggactgtttggaacatttttgatggtagctgatacataacattaaataaatttgagagagtgaggaaaataccatctggaaaaacccaaatgaatgccatgaaactcacgttggaggatttggggcctgttctttttcagagtcggcaaaaaaaaaaaaaaaaaagacttgcaagggttgagcatcctcaggagctagcttgcacgtgtaaagaaaattcgtggacgtgggaagcactggtttcacacgttgaagctggaaacaggtgcaggatggaaccggtgcacagagaaaggctaaatgaaaaaagttgtaaaacttgtctgtggagcagacacatgctctttgcaataaaccagtgaaataaaatctgtgaataaatatatggggttggcaaaatttccctatagtacagttttccacagttttctgatgtattgtcatcgacatctgttgtgtgactttgcaagggctgcatgttcagggcctcctcctcctggctttttgtcttaagtctgcctgggcacctcccttcttgtaatcttggttggaaaaagttgaaatcagaaggggaagatggctgcaactgccttgtctgtcagatgtattttctggattgtcttttggagttgaagatatgtctagaatcctcctgaaaaagaagactgttaataacagaagactgttagttgtgtccaactctttgcgaccccatagactgtagcctgccaggctcctctgtccctgggattctccagacaagaatactggagtggattgccattcccttctccaggggctcttcccaacccagggatccaacgtgggtctcctgcattacagccagattctttaccatctgagccaccagggatgcccctagaatctgcctacttgtcaccaactcctctgctcccactttagttcagactgccacctggcctcactggctaattgtctcttacctgttctcctgcctttatccttgctgactctcagtggatttttcaacacaggagccacaatgtctatgttaaaatcggttttcaacctgaatggtggcttgccccactcaggggtaattcagcagtgtctggagacatttttggttgctacagtggatgagagttactactggcctctagtaagtagagagtggaaatgctgctgaacattctccagtgctcaggacagtctcacaatgaagaattatctgtacccagattgttactgctgaggttgagaaacctcatggtaaatgtatcacatcatgttctctcttcagaaccctccctggtatcagtaaaactcgagacccttaaagtggtccaaggcagaccacttaatgggcgggctccctgtcagcactgactgtgggtctcttgttgcccctggtccctctgctgcacccagcctcctcaccattcccggaacactccagacctctccacttctggccctttgtaagctacacttgctggggccagcaagtgtgctttctgtctttgtccagagagcagtagcgttcattccctccccagccgacttcatgtcttcccttaaatgtcattcctgccttgagcacactctgtgctgtggctctccgtctaaactctcagtgtcccttgccctgctcggtttttcccacagtacttacattatgacctagtctatcattttctaatgggttccagttatgctatgtttctctgtactaaattgcagggtccaaggggatagggatttctgggtcttcctggtttactgtgatgcccccaggacctagaacagagtttcatcatcagtgctgttgacactttggactggataggtctttgctgtgggggctgtcctgggcattgcaggatgtttaacagcattccaggcttcttcctgctcaaggccatagcatccctcctcaagttgtgacatccaaaaatatgtccagatgccaccaaatgtccatgggacacagactcacccctgtggcagatgaacaggcctagaacaatgcctggcacaatagtgttttgttgtttgactatgtgttgttttctccctttgtatttcattctggatgggccatttgattctggtttttgcatttaaggctgccttccttttaaaataggtatccaccatgctgtctccaaagaggagtttatatattcttcatctggactaggcttagatgtgcaagtgtttgatgaggaaggacagtttcattcctaacccagacctcctagactttaggaatgtgaagccaatggatttaggtgatggaaccccactttggtcacaatgactggagaagctgtgtcatagagagacacacacaagagaaaagggtctcctgaagaaatgtttgcagtttggttcctccccaaaggtttttgaaaccttggtgtattctcctggaaatgagccatgaatggtgggtggcagaggaaaggtgccaaatatgagagggtgaacccagatatcacacatgggcacagtcaggtcagggtcagatgtggaaccattgaatgggtccctctcagggaagggactctctgtagggctttaggtcctgaaaaataatttttttttaatatgttagcatctttcaggttcatagttcttttgttttgtttcagttcagttcagttcagtcgctcagtcgtgtccgactttgcaaccccatgaatcgcagcacgccaggcctccctgtccatcaccaactcccggagttcactcaaactcaggtccatcgagtccgtgatgccatccagccatctcatcctctgtcgtccccttttcctctgcccccaatccctcccagcatcagagtcttttccagtgagtcaactcttcacatgaggtggccaaagtactggagtttcagctttagcatcattccttccaaagaacacccagggctgatctcctttagaatggactggttggatctccttgcagtccaagggactctcaacttggtgctaaattttgtggctttgtagctgctaatgcccttttcctggacagacttcagaatttatttaatctaattccagtttctcctcttctcaaagttttaataatggtttagataatggttctttaacttcccacaaattagaaatgggaatgaaagtgagtattaggtttatattggcagggtgagataaagcaatggttcccagatgctgattcagagagacgtgtgtgaaatcgttgcagatttgtattcagatgagaaagaaaagatggttgtgtccaactcatgctcacatgcatgaatttccatgtaaagtcaccagcatttcttgaatttagtctgagatttttcctgggcttcccaggtgacactagtagtaaagaacctgcctgctgaagcaggagacataagagattcaatcctagggtcaggaagatcccctggaggagggcatgacaacccactctggtattcttccctggagaagcccatggacaaaggagcctggggggctacagttcatagggtcacaaagagtcggatacgactgaagcgaccttgcatgcacccacatcttcctattaaaaataccctttcaagatggaactgtccatcttgtattgattttggaaaattttcttgatttttctttctgtctaatctgtagagaattactttacatggagatttaagaggattgttctgtcatttctgtctgtccctaacaagctgagtgaccttggggaggctggatgacctctaaactcagtttcttcatctggcaactgaggggcctgcctcctaagggtcttaaggacattaactgtgacattgactatggaaaagtattagcatgatgctgggcacatatttagtgctcagtaaatgttagcagatgttcttgttatttctctattacttagcagtgagtcctgaccttccagaatgtgtttgcatttggttgactctggctttcttctctaaggccagcgttgttatgcaataaaattatcccaagtttagtaaaatctttttgcttccccctactaatgaggtgctgcagataaatcttttgtgttttataattttgatgcagtccttaacagtttctttatgctggttaaaaaaaaacccagaacatctgtggcatcatcacatacatacagtttcatattctacacatatatattgagtacctgcaaattcataccgatgaatgctgttaacatttactgaggccgcactgtgtgccagcccccgtcgtaagtggttttacatgtgttaacttgcacaacctgcttgagatgataataataaataagagcaataatgttgtgggttataattttaaaaacaagtaacatgcagtgcttactacatgccaggaatgattctgggtattttacttctgttaactcagttaagtctcacttctaccttgggtacttgtatttttgctgttgacattttacagagaaggaaaccaaggcatcatggttagatgggcctggttctggctctggtcctgtgctccagtgcactagtctgggctgccctgtgaaaggcacggggcctgcctgtgctgcgccttctccaaaacttgcctctgtagtgggagggaagggaacacacagatccagccaaacatacaggacggagcgtgataatcaggcgcatgagccatgggaacgtaatagaggaagggaaactggggtgggcttttgtcagtaaataaggggattcgattttggcattgaatgtcaagcaatactcaaagcatagttctttataacattaaataaaatgttacatgccttaaggcatgatctttttttttttttgatatgaaccatttttaaagtctttattgaatttgttaataacactgcttccatcttagctccccgttcagggattaaactcgcaccctctgcattggaagcatggagtcttaacccctgcgcccccagatgcattcctgcctttatacttgccaccagagtcccagctcttcctcttgttctgtggtcacctggggtggcagagaatggatgcacatagacaggttcagaagtagccatgcttaattaaacacagtgcccatggctttgccacttaactgttgtgtctgtgttcacagctggactcttagcctcctagactctcaatttctttacctgtgaagtggaatctatagaagtgtcctcttaggattggtggaaattttaaaactgagataacacgtgtaaatgtgctttgtagcgtgcctagcacatgctagtaatatcaattccttctcttctattttaccatgattgcaattttccccctccgcagcacaacactaaagcaagtgcagaattatgtatctgaagcaaaatggacaagattgaagtacgttaacctggcagatgttcagatcttattatgcaaattgcttgtgtggtatgattagatggaaaacttgattaaagtgggattctaagtgttggttttgtgtgttattggagatttccttttcccgagtactgctatttatagaattatttaagtgtgtgtatgtgtgtgtgtgtttaattctctttgagttctgcagtgccgtttgcacaggctgatgtttatatctgctccagttgtgcaagaagtggaaaatatcctttttttagaacaggtcacatgtgcttactgtcaggaataggacctcagtgtaaaaaaatgtatcttgggacaaatcaaagttactaaatttccccttccaactgctttgtttcagaactggcagtattaggataaataataggagaaaattttggctaaattgtgggtttttttgtcatttttcaaggacggtaagcaagagtttcatttgttttgtgtgtgtgttttaagtataaaatgtactttgctgttaggtctgtctcatcaaagtaaattataaaaatatgtttgactcatctccaaatatgcattatttggagaaaacagtcaggaaggcgggtcagagatagtcagtgtagttgccccaagcttttcatattgtaaagacaaatgtagcatttataaggaggtttttgtgagtctgatgaacagtgtgtacttgagggcaaggaattatagcaagctatgaaggctgcatctttcctgagccaactgagggcgagaggaccagcgggcagatctgggatttctgttgaaacacccacaccctatttctgttcctaaggcctggggaccaggccccttgtgtctctaggtctggtcttaaacatggctaccttctttctttgctgcatcttccttcctgtggtgtttcatgcatgctgtgaaggttaaagacatacacctttggagtgttcgcacagaggtggaaccagggcaggctgagaggaatgcagtgcttcaggaagtggagacaatggtgagagaaagacccaccaggaaataaatgatacccaaaagtcatgagcccctgttgtcctccccaggtcatttctcaaatgtcactcagtcgctttcagcaaaggcagtataactttggggtcagagggacatggatttgtttgttttttttttcttttctgtacctacctcatttctctccttccttacaacacttatttattaagtgcttatcgtatgacagctctttgctggcgtagggaatcaaaagtagaatcagatagactagatggtcctgtcatcttggaggtgggggatataagctaataatgaagcaaatagatgaataagacaagtgttcatgctaggaaaacgaaatagaatgttattgatagagagtgcctgggaaagaaggttctttattggatgggtctttagaaatgacctcttagaggaagtgatttttgaggcaccaaatgtctgggttaaaagtgcagatcttgctgctgccattcgctagctgtgtgactttggacaagctcaccaacctctctgagttccctcctctgtaagatggaatgataactactttgcaaggctgctgtgaagatgaaaggtaatgcatgaaaagagttactgtatgaacagtggagaaagacatgcaggcattaatcttcactgtaaataagtgtttataattagtcttaaatgtttttctaatgtccagggagtcagagatttatggttgtctttacaaatctacccccggactaaacgtggagatgggtcttggtatttttattatccttcctttcttccaggatcatcttacttgaatggtctccttgctcatttcacttttgttgcattgagatcattctggtctggccatacttcctttatgtttagtttaggaacagtttttggctgcatctttggtgcaaaggagagggccaagtcacctaggattaaaaagtaaagcctgagatcgatttcagcaaatacacatgcacaccacaaagaaatgacccatgtagaactcctgactcccagggctgttttcagcccctgggtcacacgcttcctgtctacactgatgtgaaaatgtcagtgttcctgcagaaagtaaaagaagaagcctctcctcccacacaccacttctagcttccatcagagttgacatccataggcaatggtgtgttttaattcactcctttacgaaagaaatcttcaaagcattcaaatgtcagtaactgtgttctttgattcaagtgtccacgggaaaagggtcttgggtgtgtgggagcaaatattttaaatccaaacgtggtaagttgaaattttagggaaggcactggtagaattgtgtctttctataagaaaattgtgggctattgagcaatttcaggaaggcttctgtggcctgcccccttggcacccccgcccctgagtgggagaacttgctgacacattgacacacattcccctactttccctcgaggtagagagccgatgggaagggtggtcgtccccactgatgggaccgtgtgtagcttttgtaggataggttttctttctgggaagcttaacttgcttccatgggaagaagatttgaggcagagaaaagttattgagtcccgtggttgaggttgtacatcagatcaggataaaatagataggaatgctgtacttacttcggtaccttttctgtgatatgttcctgaatattaactggtcctaaaaaagcatgcttttcaaaacatacattttatttttataactggagattggaaacttgatgaagggaaaagcacacagaaaacataaggatgattttcctgtttaacttggaacctagcgcaatccctataaagtcttacctgggcacctcagtgagatgtggccaccttgttcttcttgcctgaacctaaacagttggaggtggtattcacaggcactccaatattgtaacaatcccttctctgtcaagaggactgagtatacttctgtttaatttttttttgcatttgaaatctttaagcaaaaaatgaaaaggtattatttcagggtcagtttgctctgtgtaaactgcaagtaacttgagaaataactcaaactcaaataactcataagtctcaaataactgcataacttgagaaaattggcatctcagccaatagaaccctttgcaacaaatttataatacttggggcagagaatgactgtgaataagcataatgactgtgaataaacattaaaatagtattggccagttaggatcatttccttttaagggaaaaggatgacaccaactatgcattcttgaaaagtctgttcatttttcaaggtagagtttacaatagcttatgtaaaagagcctctaaaaatataaacagctggcacgattcctggtgacattccaaataaaagtttgcccatttgcttcaaagaagcatggttagagagtaacctctgagagaaactggcccctggcttgtggtgtatgggacaatcagtggtagactttttggaaccacgtcttgcatcaccttggcatggtcatttatccactggtgtttaggtagataaacactaatcacatcttatctagatgaaggctagaggtataaatgctaaatgatggggtcgtgaaatgcaactctgtcgatattgatagcatgtggatgctttatatcactgttgattcagaagtgaatgagagagaatttgatgccgttcgattgatcatagtatcgcagttgctaaaatgcatgctttaatggcaaggggctgaatggcaagagcaatgaattgggatttgtttctggagtcagtgatacacatgtcactctgctggccgaggtatccctctttctcactcttggtttcgtacacctgtcatctttctaatcagatttcactggcagccagctcccttgtcctcatgtgtttcccctaatgggcacctttattttgcctgcccatagtcacttttccaaattcttgtaacagccccttcccacgtgcttagcctgcatgcttgagtttcatggctttggggtggagaaatcgatacaggctcgccactcttctgtatcacagggatcagtttcagggagttacatgtagactaacagaatgaatcccaggatttgcttgggtgctcacagagagtctccttttgtttccattgatcttgaacttgggatggtggttgtgttttagaatgaagccctaacttggaggcagagaaaactaagtccttcttttgggttaatgttggttgctataacgaagtggcagatgataatcatgtaagtagtagttcctggtaggcagacagctttcctccatgtgacaaatcaagaacccaggctccttccatcttctggttctgtcattgcctagaaccctggcatcttttgtgtctggtggtggaaaggaagaggagaaggtgtaacttaagtcccaaagtgacaggcatcacttctgctcagattctctggcaaggtccagtttcatatctaggtctggatgctggggtgggaactgggaaagagagaccccagctgagcagcaaaacctcttaacttagaaaggagaacccacttttggtagatagctagccatcatcaccatggtcctagtaggagggttttggcttctgaatcgagttgtgcctatctttgcttaggtttatccttggtcttttctgttattttattttatatcttctttttctgattaaacgtggttaatttaaattttctgtcactccaatgggggccacccgagctgatccattgtctgagccccacctctctgtattgcttcctatttccagttcactgattaaaatcaccaccccatttccgaacaacaacagtacatccaccactaccaccatcaccttagtgcaatcattttcaaaatatggcctccagaccaacagtttcagtgtcccttagtaacttgattgaaatgcatatttgcagcccctacccatgaccttctgaatcagaaactgtggctggggagtcccagcagtctgtgtctttcagtaagtcccccaggacatgctgatatgcacacacttccctaatgcttttaccataagtcctgtgtctccatataggaaaaataccctggattggaatatattttgtaaaaaaaaaaaaaaaaaaaaagggtgttgcttgttatggtcaggctagagagggtcactgataataatcacatactgattttaaaaaaagaaaaaaggatcattccctctagaatgttagtgatcagatgtacatcagtgaaacctggtagggtgctgggttgtccagatgtgagctctgagtgacttggagttaacctggctgtgcttccgtaagaagccctctcccaggtctccgagggctgtagtttatcggagatttgcaaagtgtgaaacttgaagcacactgcagtcacttgactgaatgatttggttgagaaacagtgatggtggttttgagtgtgcccacatgaccaaattgttttccacagaacttctgctgaataaaatttgaaatacgactgtcagcctgttttcctgtcttaatgaattccagacagtttgtagaatgtgggagcttccaaaacagaggggcggggtgactgcgaccagccagcctctgtttagtcgcatgttagggtgtcccgacataacagattgtccccctcattctgaatctcaccaggccatccttctctctagaggagagggcatggcaaggccagtgttatgtcaaacaagcagggcctatagggtagatctggacttcttacttaccaagaaattcaacctcttcttatttttaatccacctaaacccaagcattttgattcttttttttttttttttttgctgcatgctgatcttctccagacaaaaagccctgatgcttttttggcaaagaatcttttcttattgtaaactggttaagagctgtaaaccgtcgaagaagtctagagttctgggttcaaccttcagagtaagaaggatttttaacttaaatttcagtttgatcagctactagtttttttttcctctttgaacaagttattcctgtagcctctgtttcaacagaggactaagtggggtgagtggataatagtatgatctaagttgtaagataattgagtgaattacaaagaaatacttgacttaattccccagcccaaagcctgtgctcagtaaccaggctctcactgtgattccatctttgcccacagcaccagcagggtgcaatgcaatgaatttttgacttgaaatgaatttttactttgagacactgcactaagataaaatgactcaaaggcaatgagcaggaaaacaagagggttcacagaacagaaggggagtggggccagattatcttggttagatgatccagaaccatcattccgactcaggccaactctagccatattcttctgtagggttcttctgcctttttttgctcagtggagtcttatgttggcttgaccttgggcttctgaatctactaaccctgtgattctcaaaagtgaaaaattaaaaatgttagtctctcagtcatgtccaactctttgcgaccccatgaactttagcccaccaggctcctctgtccatgggattctctaggcaagaatactggagttgtagccatttcctgctccaggggatcttcctgactcggggatcgaaccctggtctcctgcattgcaggcagattctttcctgtctgagccaccagggattagcatgaggaactttgggagtagatgctggttgaacagtggtgaactccgggatgcctcacagggaggtatttaaagacagcacgtgctatttacgggtaagggattacttttgttgccagaacaatctttgcctttatcaacatgtttcctttcatcgtaatgataggccagcgaggtggaggaataaataatgaggtgcgctaacttaggtttcacaatgctgtgtagggcagcagccgaactccacggttgtgtccacacgggtgtctgtcattcccaactgtcacgtttcaacttggcctgtagtgagttcctgctttagcttttcacatttcacaagacagcctcgttatacagttacctttatccagtaaaagctgtaatacctcatgttctcaaatttcaatatctttgtatctttcactcttgtagaattttttctgtcctagtagcaccgcgtagctattttagagactaaatatccacaccaccatgatagcttgcttttcttttctttttctccagctttattgcagtgtgattgacaaataagaattttatatatttcagttgtataacatgatgctttggtctgtttatacattgtggaacaatcaaccatggtcaaatgacacgctttgcttgagcctcacagagtttctcccccagacttgtggctaaaccaaccactgggaagcagaaagggagattagtttgaagaacctccatctttctcaggaggaaaattcccattatcttgtccacataagtggatgccttcatcagttatagcttagacttgttacctgggtaacgagggtcccggcttcattggctggctgggaaggtttggtgaggcagtgaatgcttacctgtagtaatggcgcagtggatgctggctgtacctgctgctgtacctgcattactcttgctctctgcctcctgctccacccaagtgctgctactggtgtcattgccattagaatttaggagtttacacaggaaacagagaagtggttcatttgtacaggtgctgctgacactatcattgttttgttaccattaagcacatacagtcagttttcatgtgtttgggattcttccagtgagttttcaaacctagacttgcatttggttgtcacccaacagtcttttggaccccttaccccagctgttgcgtgtgtgcagaggaatgggaattagtttgattcccaatcagtgggagacatatcctaccagaaaccagacatatattcatacaaacacatatggaattctcaaggcagcattttttagggtatttgcagcctttttgtggtattgtctggactgtttgaaatttggttctctgctcaacagtccctttcctgaattttataaacagggaaaatgacagtttctctctttccatgtaattgaaatccaccccccctgcaccacatccatactcacacccccacagaagtgaaagaggtggtgagttggatacttgagggtgagatccagtgtgtttggggaattcctgagcatagcacaggatgaagcctgagaaggatggccagaaactgcccagcctgatggatttctgagctcctcattctagtgagcgaacaggatgaattggctgtttaggctggagtggaaaatgaagacacacataactaaagggaagaggaaatgggcaaggcagtttggggagttttcagagtacatttatgtcttgggtgtctcaacagatggacgtgaagagctctaactcttcctctattttcttagagtcatggtttgggaatgatttggaagatccttgggcaaattttcctttcccatgaggtaaaatgatattcagtaaatatttattgagtctactgtggagtctagagatgatggtgaacaaagagggtccaccttaaactgttgttgcttttggcacatgcgtggctgcccagggctaacacagaagccacagcagatcatcctgggccagaggatcccttcctgtgggggaagaaaggcgtgtacttgggctcagttaccctgtgaaagaaatatgcttaagtgacatatttattaaaggagagtagtgtgtcatttggggcttctcaggtggctcagtggtaaagaatctgcctgccactgcaggagaggcaacagatgcaggtttgatccctaggtcgggaagagcccctggagaaggagatggcagcccactgcagtattcttgcctggaaaaatcccgtggacagagaagcctggcgggctacagtccatggggttgcaaggagttggatgtaactgagcaactgagaacacacacacacaatatgttatttaatccaatatatccaattattaccaagtcaaaatgtagtcaatataaatattattattttttgattgaggtgtaattgacttataacattatattagtttcaggcacacaatgtaatgattcaataattgtgtatattggaaaatgaccaacacaagaaatctagttaatatccatcactatacatagttagaaaattttttttttctaaaaatttttttattggaaaatgaccagcacaagaaatctagttaatatccatcactatacatagttacaaaattttttttttctaaaaatttttttcttgtgattagaattttttaaagatttattctcttagcaacttataaatatacaatacagtattttttggttttttttttctaatttttatttaaaatttaattaaaattgaagtatagttgatttacaatattaaattagtttcaagtatacagcattatgatttattatttttgcaggttatactccattaaaagttattataagataatggctatagttccctgtggtatgcagtatagccttgttgcttattataatacagtattattaactatagtcaccatgttgtacattccattacatgacttacttatcttacaactggaattattttctctttgactaccttcactctttttgcccacccgcacaacccctgtgtctggcaatcaacattctgttttctgtatctgaagccactccccctttttttaaggttctgtatgtaagtgagatcatagataatgtaagagatcatgtatagtgtaagtgagaaacatattttaaactgatttcactgacgacagcctttagctgtcaccttgtttgaagcccttatttaaaaaaggacgtgtattttaagaaatcaagcatcttctacctataaatgtgttgataggaaatatttattttatttctgtcagtcacctgaaagaggccccaggaaacatgtaacttgtaaattccctgggcacctacaggatagtgaatgtccaataacaatttcttgaataaagaacgaccagtataaatgggcttccctggtggctcagatagtaaagaatctacgtgcaatataggagatccaggtttgatccctgggtcggcaagatcccctggagaagggagtggcagtccactccagagcatagccaaaaagaaaaaaaaaaaagattgattcattaacagaggagcctgacacgctatagtctgtggggttgcaagggtccaacatgacttagtgactaaaccatagcattgaactaagggctaacagagtcatgtctgaaacgagattatctaatacctgtgctttctccgtaagatacctcacagtcttctcattctcagcaccactagaggacagctcggcactagcaggggcttccctggtggttcagacggtaaagaatctgcctgcagtgtgggagaccggggttcaatccctaggttgggaagatcccatggaataggaaatggaaaccccctccagtattcctgcctggaaaaatcccaggacagaggaacctggtgggcaacagtccatagggtcacaagagttagacacaactgagggactaaaccaccacgagacttgggggttgttggtaaagttaccaacagaaaacaaaagaatgcaaatagcatagtgctaaatgaaccccacccccaccccaagacacttgtgaaaactgaaacgaggaggccgagtgttgccttgtttgacctcagttggaaatgcatgtgtgcgtgactcagatttctcacttctctgtccacagatgactgtaaaaatactgcaaatattaattttggggttacaagtaagttttagtgagtcggtaaatttgcaaatagggaatccgtgaatgatgaggagtggttgtattaaaaaacttctctagtggttctttctctgatctaaaaagcatctcactggggaacatatttttaaacaatgtctgctctgaaattgttgtggactaaacttgaagccacaataatgaaacttttccaagcatctgatcttctctttttatgagtttatttatcaataaaaatggtttatcacttccagatctttaaagttgggtggggctgttcagatatatattttgatatcattttttttgatataatttctgttgttctttagaagatgaagagtgagaatatggaccagggaaaagagtacagaacaatggtggcgaccactgctacagaatccagcagaagacaataagatggcttagaaattctgcaggcagtttttgaagttaccaagctcagtttagtcatggcctagaagataaaggtgatgcttttgacttcccagggtattgaaaattagcatattttaattataagcacagtcactattataaacattaattgagtgcttgttgagaatgcttggaattcttttaagaagggggaaagaaaagaattgttttcagtaggtccagtagtttcgagtggcacagcagatagatcatacagtttaataacaaagaaacacaaacaaaaacaataatagcagtagcacctagcattttcaaagtccttactacagactgtgtcttgtgtcagtgctgtaatctcatctgcattttggagactgaaacccactggggttaaagtaatgaaaattatagacaatagagttaaagtattgaacgttgccatctttttctgcgttccatctgtaccttttgcacttttataatgtatccttgtgtattataaaaagaatggcttccttattaatagtttgtgtgtgtgtgtgtgtgtgtgtgtgtgtctccctttgtctctctgtcttagtcctgggataaggaagttacctctgtaatttttttttgtatttttcatgtattagaaaagtaagaagccgaactagctcagatctagctcagatctagtttacgtacaagtttattgagacatctactagctccatttccaatgctttgtataatttaattctgtgaggtaagtgtatgtgtgtttagttgctcagtcgtgtctcactctttgtgaccctatagactgtagcccactaggctcctctgtccatggaattctccaggcaagaatattggagtgagttgccattcccttctccagaggatcttcccaacccagggatcaaacccaggtctcctgcattgcaggcagattctttaccgtctgaaccaccaagggaagccccataagataggtaggatcccattttatagataaacttaggcttggccattgtaagtcacttgcctgaagtcgttcaaataagggcagaaccaagacttaaactggaggactgtttgacttcaaagcttccccccttatctgccctgctacagtagttgctgttcagtggctatgtcctgcctgactctttgcaaccctacagactgcagcacaccaggtttccctatccttcactaactcccagagtttgctcaaactcatgtctgttgaactggtgatgccatccaagtgtctgttgtccccttctcctcctgccatcagtctttcccaacatcagtgtcttttccaataggtcagctctgctcaccctgctgcagtggttactgtgtatattgaggcatggaagggaaggctggataggaagagatcaggggcaacaactcatgttgactttggaagagaaacaggactaggtgtctgatgaagtaaagagagactctgggtgtggttgaacatcttaatccaagataaatagatctgtttattaaaggtgctcaccgaatgcttggctgccttgtcctttgttttcaaagctgtttctgatgattgaaaagaggtaggctgtgaaggcttcaagaaaggtagcaaaagatgggatggtgtgaacgtagtcattcacagggctgtggtgtgtaagttgtaaatttttatcattcccactaaagatcttctttgaatgaccttagctggtgacaggaaaaagtcttgtcttcatgcctatccttgtggtctcccactgaacacatatagttcctaacatcttggtattttctgtttgtctctctctctcttttccccctctaacttgacttgttaattgcttttcgtgtatgtctttatgaagttgtagccagtctattatgttctggagtgtttatctttgaatgccaaaggtcttgaaacatcgtaagattgtgtaatgaacataacttctgccttgacatgtgggtgttaagaacattagtcattgcaaagtattgagttaaatattttcaataaaaggatataacgatctaatagagaggaagaagttataaaaattctaattgatggctttaacgatgaaccatatacacagtgggttccagcagcaatgggttagagattctcagaatgaatgtaaaggcatttttactttttattagtgggagaggagaaaggccaacaataaaaggaaaaagcacttaattctcatgtatactaagaaaaatgaaaaccatttgagttttcagcgcttctgctcctgatttagtacctcacatgtatctttaactgccataaaaagtgttggagatttccatgagatgttatcaataaggacttctgggctgcgtcttgtcaggaagcccttattcttgcaatgatctgttttctggagagtgtcaggtcatccattgcaacaccatcagagagccagggttttcctgagcaaatgagctaggtaggtctttccttgttgagttaattttatgaagagttttggtcaacattagtcattatgaaactatgtgcctgctaccctggtttatctctgtagacatctctccatggcagaagatggaatccttgtctcttcatgtctctgagcatcagaagatgttagagttatatttgtctgtttcttgctagagagtgttgagtgggtactggtcttctctgaactaaacagggaacattgtttagttgagtgtttggttatcagcactctcttatttgggatcgagtggtttaaattggagacactgtgtgctacctgtcctttgccttgccagaaatattcagtcattctggtaaaaaacttctaagctaaataccttttctttcctagagaagttacatccaagaccttgttttaatttcaaaatagagagcgtaaattatgtctgtggctgctgttaaaagtttctcaacagactggctgtcctcaaagggtgtccgagtcaactatagcacttaggggaaaaatgttcatctccaatgtgatatcatttacaagtcgataattgtcttcaagatcaatatatgatattttgggtgttggagagtgtgtggaagggaaatctcacatctgtggtaatatttctggaaggattattgatctctggtcctcctatatgtgatactcaatttatttgctgtcattattcattgaatgtgtagataaggaggttgttttgaatgggagccaagcaacctgttgatgtaaagtctttttttaccttttatgattcccattgttagcacctctctccttgctggctggattccctgtcattttaagtaggcagcaattactggtttgttcaagaagttggctcctgctgccaacgatcctattaattatcacttcatctctcatttagtcttcttagtgttgagagagggtgcatgtaagcgtgtggccaagcagctacagtcacatctccgtaatcgtctcctttttgctacagttcagcagactcaatgttcagccaaagggctgaggcggccctggtgagtcttttcaactcttctgtaggttgttcggtcagttaaaacctcttggttggcatttgtgtggggagttcagacctgttccggatccatctgtgaactcagatgggacactgtgaaaatactgggatgattttctcagaagctgttttctctctctggggaaaaggcgaccatggaattgactctttgtcagtcttcaaagaaggtaatgtaaataataaccaaagtgacttagtttttacaagttcatgtcgttcatgaatgtttttttgaaaagtgacactctttgcgtgatgttgaatctttggttcttgtcactcatgaatagttaaattactttctgtttgtttccagaaatgtttactttacttgtttcagtgacttttttttttcagatattccactggatcctttgattagatttggagtgcttatgcttccttttccactttttctgttatttttggcagtgatggtgtttgaagctgttgaagtgattcactgcaaagtgaattaattttccacatcttcagatgtgttttccagttgcccccaagtttctttcccgccaccctctcatatgattccccatccgcagttctgtcattcttgctggatccattataaatgctgatgtcactgaatttcttaaattacagctggtggggattaacagaaattgtaagcgaataccacttcctcattttgctattttcttaactaattattgtcctttcaagttctgtaggaagctggggatttggaagtaagttctctgtcttgatgttaaaatagcacttttctgttattgttatttttcaaagatagtttgatttttaggatgctccctacctaatgtactctttcttaatctcagatagactttccccacttaggattttgcacatcgagttgtcttctatcctgggtaaagggttttgaatacttcccttaagtttccttatatagaatatttttactcaacagtccttcaccatctacagactgttaatggtactaggtgaagggttgtgattcattgattttttttttttttcctccagagtcttttgtcctttaaggaattcctgcctctgtccgcattgttttcttatttagaatctgaatgttcttggtgagcattcttggttgctctgtaccttcaaagatgaatttttctggctttgcagtacctgttctagcatttggagcctggagtccagaatgtcttgtcactctgtggcttgattgagggctccctgaaccttgtctaggagtctttgggacgggactttggaggccacctggatgtgtttgtaaatggtgctggagctctccaggtggcaatattgatcgaattgcagtccatggaaacagaaatagaaagggttcagcatttgcactttcctctggtggtgtttttgcttattttgtgtatttagaaaaggcagccgtatgcaaactgctgacttactattttccctggaatggaaaccatttggattatttcaatgagttttagctaagatttgtttgttcatagtagtagttttgatttctgatgtcctttctataataagacccaaatgtgtctttttactctatggaaataacgtgttccttggagccttgggattttgcaaaccatgaatttgaaaaatcatgtgtttccttcatagtcaaaatggaaactctttagtgaaaattatacgtagataatacttctttttgggtcagttactttttttgaagaaaaaagaaaatttttggctgaattatttaagatttcagagcagtcctttttcctgcttaactttcccactaattatttttttttctcatttttaaagagaaaaagattaaactgagaaattgcagacccaaagcacatttactccactatctgatgtaagatggtgactggtttttttgttgtctttgatgatacagtggatttagtttaacttttagtggtaagatttggactaggtttaaaaatagaacttccttactgtaagaactattatgcactggtttgagttcctgagtattaagataattgtttaacctctggaaaacatgaattatagggtctctgtaagcttaactaacacttccttctaacattgtgataagttctttgatgataagattcgggaatgatatagctatctgaaaaatatttcaaatatcactgtggggttgttggttaaatatgagcttttaaaagtttggataaatagaataaagagaaagaaagaatagttataatatgggtgaaatatttggaattaggtttttgtttttttttttcggtgcacagcatgtgggaccttaattcctcaaccagggattgaacctgcacctcctgtgttgaaagtgtggagtcttaaacactggactgccaggaaagtacctggagttaggtattttttttaaaaaagagtttttaaattatcagggcaatgtcactacatataatgggagttttctagtggggaggtagaagttgaaaacattatgaagtggtaggaggagtcacagattaggcgtcaaggaaactgaatttcactaggttgatgactgtgaatatttttgttcatcattttatctcagcagatggcaccattcagaacctaacagtcgctcaataaatgttgactgaatgcctgtattaggaggcctggttccaggcccagctgtgccattcattaatcacgtgaccctcagctaaccattcatgaggagccatggcagatattctgcctactggtgcaggagacacaagagacgtgggtttgatccctgagtcaagaagatcccctggagtaggaaatggcattccactccagtattcttgcctgggaaatcccatggacagaggagcctggtgggctgcagtccatggagtgtgcaaagaatcagacacaacagagtgaccacaatacacacacacacacacacacacacacacacacacatagagtctcctcttatgtttaatcaaggggaaggtctggacaatggtggctgtgtggtgctctgttgattccttcccccaactgcacctcagtagatgttacttatagtcacctctctttgttccatgaacctagaaggagccttgggcccttctgagttcattgctctaggtttccatgtctcactgtggacactagaggcaaaacttatttgctctctcagaagtatcttctgtctgaggtcccttactgtggctccttgatttggagttccttggtttgtttttgatacctcaatcccaagtacaagtaggcaacattctgtgaagtttcttggtcagcaggtgttcacttaaacaatgaaaacaacagtagcacacaccattgtccttcctttcaataactgttctggtagatttagcagataaatatagaacttaatgaatgagtctggacaatattcttccagtggaataagagatcaagaaatgattagcttaacagagttttccacgtttgttttctacaacccatttatcctttgaggaagggtttgttcagtaccgactgccttccaggcactgtgctagggttacaatggccagtccataagacatgggttctgccttcttgtaactcaccaaggtgaatgtgatgttaggtgtgtaattacagctttagggacaaaagatggaggggtcagttcctctgaggggagaagggaagagtgaaatctcatagaagaaaggaagtttaagtttgttatcgaaagatgatggccgagcaaatgagaggagagccttctagacaggacacttggaaatacagcccagcattttgccttttggacgtcgtaaacttttgagtgtggctggagcactagggagcatgggtggatttaagcagacggagagcactgtggctgccagatgaagagtaggctggagggtggccaaggtctggtgtcacggaggccagttaggatggttccagcttaatagcctttgtgagaaatggtgatgctcacacaccatttaactctgaagggaggtcatgactgtgagaggatacataccttggtcacagattttaagggcaatgaggacagaagtaagatttgtgtgtacactgtttactggtggcaacagtgactgctcattcattcatttatccatcacatcactgggtgcctgttttgtaccatatacccgggaagcaccatagcggataaagtagacatggtgtctgccctcaaaaagtcgatattctcatggaagacacagtctagtattcagatggttatagattattatgtatttataagttaagtgagaaaaattctgtgtcagttctttccatagacaccctctccttttcttgcagccaactcatattctgatcaacatgttttctgttccctatcggagaaggcaatggcagcccactctagtactcttgcctggaaaatcccatgggcggaggagcctggtagactgcagtccatggggtttcgaagagtcggacacgactgagcgacttcactttcacttttcacttttatgcactggagaaggaaatggcaacccactccagtgttcttgcctggagaatcccagggacgggggagcctggtaggctgacgtctatgcggtcgcacagagtcggatacgactgaagcgacttagcagcagcagcataggaacttttgagggtaaagttagataaacattgtattatatataccttgtatctcacatgcttacacacacacacacacacacactcacacactccctctctctttctctgattaaagacatctgtcttcattccagaggcagacaaacacttcaaataaggcatatgagagttcccatagtcagtctgctacaggtaaagttctggatacgttctgatattttctgaactctaatgttttacatacagtaatcctgtttgtttagttccagatccaagcagaaaagtctttgctcttgtgatctctccacacataactggatcttgaagctggctctggtggctgcttcatgtctgtgttccaggttatagcctgtgtttgggattcatgtacaggaggaagaatttgcctctaggcagcaagactagttgacatcagataagtggcttctttaaaagagatgttttggtacagaaatgacagtaacaacaaattcttctccaattagaactcttctctacattctccatctaactcaggataatgtttaagattataaggagtcaaaattcagctggatgggtctgataagaattccgaggaggccattctgggtttaagcactcactgttctttgaagatgaagcattctgacatgacagtggtaattgcaactggttttaagtggcaaagggattttctccattttgcatgagttggagaggtcgtgttttattagggctaagactgaatacagacgctgcgagcttcaaatcccagccacactgatgagcagctgtgtgagtttgggcaaaatgctaagattcttggtttcttcacctgtaaaatgtggcagctgttaagcaggtaagacctttcattaaacctgtctgtatttggactctatgtctactagtctgtgacactgagcaacttgtttaccctgtatcttgctttcattaatagtcataatagtaatagttactaactcttgaggaaggagtaagaattaaatgagataaggatttggcatagtacccaacacatagtactcagtataacttacttgttatttttcctgcatcgttatctcaagtgttctgaaatgttctgtaatgctatttgatgactaactgtattctttctgaaaattaagccatcaccaaacacattcattgctctgtgatttcttctttctttctctctctctttttttttaaatttaaaaaaaaatacagtttctgagtttggagtaggattgccagataaaataatggatgtccaggtaaatttgaattttgcacaaagaataatttttagtataaactttctgccaatatttcatgggatgcttatactaaaaaattattatttgatcacgaaatttacatttaactggacactctatatttttatctgtgagatcttgcaacccgagttttggggtaataccccttttatgctgtcatcctttttttaaattttaactcactgaaaagtatatgaatgcttatgcaaacatagtgagtttactcacttggaacatgagtttagaactagttacgcaaatttgatgggacatttcctgtctgtagtaaactctctcctcctaattctttaacagtagtgggaccatcacattgagattatggtgactcctgagtagtatgtagtgaggagttgcttgaaaattctgaagtgctgttgtgtcatttctccccagagggaactgggtcttaatcatgacacgctaatggggaggtgtgaattccagagaatcctgaagacctcatcattgaaggaaattacctcattagtcttagagttgccgacctagggatgatcgtacccaatggctggctggcttttacaaaataggaaaataaacacatggggtggttgggttaataacttagagtgatttcattatacttaaaactgaagttaatttttaagtaggtttggttcttaagctattagactagttggagatgttgagaaaattaaatccaagactaagatactttccgttcaaccagcatttatttatagtatctcttggttgtcaagcaactgcataggggtagagaggaattgaaaaagttcccccagatccttagtgttgagtggagcagtaaccattatgacacaagacagaataaataaagccagggtctgggctagtaacgccagatctcagatggttgaatgtaagcagtgattaaatctgaaaagcaaatggagtaggaatggatcctactgtattaagaagggcttcttggagggtcatactggagagaacttttcaaagatgagaatgatttcatttgggaaatgaagtgttctaggtgtagtcttagcatgcagcatgaaggcagccgcattttgaaaagaatgtgttatttagacctgacaaaaatatacctagcacctcttctcttttgtgagactgtttatggtctagaagttccagatcaggaacttgacttcatgtaggaggagctggacacagtccatgagggtttcctaaatatttttttgtgcacctgctgttgctgtgagtgaggtgacctgagagacccgggcagcgcttagcgactcttgtgagtcacttcaaacgcactgcaagtcactccagttaaatgtgggtttttcctgacaggaacatttccagcgatatctctggtttcaattgggcaaaaccaacagcagaagaattcaatgagaagctttttgtgaggccctctgacttgggggaatatttgcttatgtgactttggaggccagcttaactcatctcctgttgggatgacatttgtttactagacttggccatagtcagagttaatagccttaatggttttgaatggtcccaaatggttctccagcagtgcaccattagcaagtggggaggtttatacagatggcatgttataaacacacacctgcttcagcgtttgtgggtttaagagaagagctatccccatcttagatttaactatggaaatatggggaactggaaagtaagagttaccatttcagtaaatgctaggatctttttcaacagttcttttctcacaattttgctttttttttttttctttctctgaaatgattctgtatgaaattaatgctattaaaaaatggccctccctcatttggtgattatagagatcacccctgattctccaggaaattaattaaagcataacaggggattcacattggtaaacagatcttaaaaaggcatatcatgaagagcattggattgggtagcttgtccagtgcacaggagggcccactgagactgggaatggaaaactttagttttcagttatctatttgttgggctctctagaaattagcaaggtgtttagtgatccctgggatttcatgtttgcgaattagggttagcctgtgtctttcaagttcagacaggtagttcttggtggatgtttttgctatttcaggttctagtgggtaaaatacagcctggatgcaaacctttgttggattcttaaacatgaaagaccataaactgcttatgttcgcttgagtctgtctgaatgttgtcattgttgctcctttcttgatgagtgggccaaatactatgcagttttaatatctcaccttgattcctattgccttgtttttggctgttcttagtatcttcctttatatatctgtcattaagttataattgaagcttgatgttttatatttagaatgatgcatggaggttcagctgtgccagccatttaggcttcatggcaaatgttggttcatgccagaaagtttttgaaatctggtctcttttttgggatatccaatctgagcaaaccatccccttctacttaagctgaggggcacagggaagcaattcaaaggtgatttcagcatctctccatgtaagaacgtcttgttgctgataaaaattctggcttgttagttgcctttctaaccaggagtcatgcagcctcacagggacttgctctgacaagtctttgtgtcacttcgttcgtttaccgtccttcacccacagtatcagcggatgccagttctggagtgggcacatagtgatggtagatgacacccaggccacaggctgttgcccaggggctgccagaccctgtgaggcatttcacagctcttgaattctctgaatttgagcttcttttgaactccatccatcaatccatataaccagttattcaacatatgtttatgaggtttttactgtgtgccaggcactcatctaggtttgaagaacagagcagtgagccaaattgttgaaaatccttgtattcaaggagcttacatgtcagggaggggagagctgtagaaacaaatacataagtaagtaaaagacaaatgttaaatggcaatgcatgctatagagaagatacagcatgggtgggtttggggtgacttgtaatttagcattgtgtgggcaaggaaaggcctcactgagaaatggcattggaggaaagatctgaaggagatgagagagtggatcatgccagtatctgggggggaaagctcagcagacagagggaaggattaggacataggccctgggtaagagggtgcctgattccaggacagcatgactgtcatcttggctgagactggctgagcaaaggggtaagtggtagaaatggcactagaagaaatgagatccaaatggaggaagaccctgtagacatttgtacacactttgccacttaactcatgaaaaatggagggcctttgccaattccagctagaggagtaacatgatatgatttcattgaagtggcagcccagtgtgctagggaaaacaatgatctaagaactcagagatcatttaagtcatggttttgtcaccaggtaggggcattttcgttcagcattctgagcttcaaatttttttttctctccttatgaaaacaaggctggtggagtagataattgcaaatgaccttcctgggtggtttgatacagcttctctacgttcatcaattttctccccctccccatcatcttaatgtgtttgagtatttcctgtttgtggctgattacatttctgtatatgcagagcaggacctcagacatatgaagtctgatgctaccttttattcaattgtttgtaatttttctataaacatctcacacactgaaaaccttgcaaactatgaagcagttttatttattgatgttaaagatggcttgcagacttcttagcctgaattaacacgggttataacactttatcatatagccttaatactagtttttggttacacagcatagagctgatttattaatacctcactgttacagtgacctatcgattgaagtagagtgattaaccggagacagtttctgtgctcactgagttgaggaggaggagacaggtctggttaagaaagtaccgtgcaaggcggtgtacatgaaagagggcaggaagtcatggtcagcctggggcccgtgggagtcctctgcagacttaccaggtgaactttcagactagtattctttcagtttgtttgcaccatccagttagactttgtgctatgcaaggtgggaggtgccagaggccggcagcctctcttctacagccccaagcaacttgtctctgccccaaacttgcatcacactgtttaagagtttcaaggtcttacagttaaccccctttaggaggcaatataggaaccatcttttatgactggagaatgtccttggggcatctcaacctcctcctttctaccagaatatctcttccacttcttttgatgttttagcatcttacatagacaggtggccctgcgaggtgcatggctggtcagttgctctgtctcccttatggggaaatattgccccagccttggcttatctcaggcctcccatttgaactctttgtcaagagtcagttggagccccaggcatttttacccactgacacaatgtattcctggtgttctattaattggctttgtcttggacagtctagggatattgtaagtttccaggttgaggattctggatgcaacttcccaggaggtagcagggccgctgcttggccagagcagtccttccattgagtctccttgtgcgtttttgggagtgggttgctggaggcgcttctgccgccaggagttagcatagttaccagtgccaggactctgagaagaatgaggccatctctttagcaactaagctgtccctatggtggtgcttaggaggccgctgactgtgccagtgaatgctgttggagcgactgaggcccagaaaggtgaaacaactttgccaggttagtggctgagctggaactagagccaggaggtcttgactcccacggcactgcttccttttcatcttttctacctggtgtctttgcacgtattctttctgccatcttgaacactttctgagcactcctttgcctactgtctgctccactgttcagtctcaattcaaaggttgcttcctgagccacttccttgccccctcatctgaattagcttgctgtgttattcttttatggcttcctgatcttttccttcatagtagttacttacatactcaattacttacataatgatactatattcatccatgtcttcaatgtcttgtcttcccaatccatgaagtcagtgagtgtggctcttttgttcatcactgtgttcccagagattagcccatgaatagacattgtataaatatttgttgattaaatgagtccataaatgaaagaatgattaaaaggcagactgcattttctcttgtctattcatattaaatgtctgtgcctatcctggctaagggtaacaactgttattgactttgtatattgttgaggatgctgaggatgtgatttttgtctccagatgagtctgtggccttgtggaattttattaaagttgtctctgcaaaaaccaaaaacccagtgacacacacaaatcagctttctttaatttgtgtgggcctgacatgttaggccatgatttatcagtttattttgctgtagttgcattttttattacttaattctgtttccagaaatgaggtttaattttttttttagatactgctcctttctttattaaaaatgaataatgaaacaattgctttttcttaataagattcataatgtatttttggagagatttgtttgggtttaaatgatggaacttttaagtggataggaatggaacaccagaggtactttctgtagaagaaggagtaaagtttcaaactgtacaaaaaaaaaaggcaacaacagtagactttctctgtttttaaaaccaaattattcctagtgttcatatcgaaaagatggtcttttcccaagctaggttgtgtgtgtaatttatagagaaagcatgcattgttctgaagtatggactatggttgtacaggctcctggtagattagctcaaaggtacctgtgaatagtcacgccctagactatacgaactgaatagtttttctaacagaggcggaaagtctgatgcatactgtttcccagccattcatgcctcaggaaaggaactggggaggtggggagcgaaacccagcctttgccctttgtatcctccaatgtggcacttggctccatgaccctggacagctgagttaacttctctgagccacagaacctccatctgaaaaggggataaaaataccacttacttcagaattatttgaggatttcatgagatcatatatggaaagtttcacaatgcctagcacgtgataaatgccctggagatgtcattacttgggggatagtacagcggacatggtgatggtttaaaggtttatacctgggaggtcctggcctgggtgtgaatcccgaatctctgcagcttatcctctggaccattttgacctaataacttgcctttcatgtcaaagtttcctcatacgtagaatgagaatataataatacctgctatttcgggtttgttgtgaagatgaactgtttgtcagctcctgctacatgataaatgctatgtggatgtttgcatttgtgatcaagaaatctggcttctgctgacggatggtctaggattataagtaaggttccattgtgtaccagatatgcgactgtgaagaaattactaacttctctgagcctctgtttcctctttttttttgtagtatatggatgattctaattgcagtgccaagttttgttagagatcagagataatgtatattcgtagtgcttaacatagggcctggaccatgggagttcagttcagttcagttggtcagtcgtgtccgactctttgcgaccccatgaattgcagcacgccaggcctccctgtccatcaccacctcccggagtttactcaaactcacgtccattgagttggtgattccatacaaccatctcatcctctgtagtccccttctcctcccaccttcagtctttcccagcatccaggtcttttcagatgagtcagttcttctcatcaggtggctgaagtattggcgtttcagcttcaacatcagtctttccagtgaatattcaggactctctttaggattgattggttggatctccttgcagcccaagggattctcaagagtctcttccaataccacagttcaaaagcatcagttcttcagtgctcagctttctttatagtccaactctcacatcagtacatgactactggaaaaaccatagctttgactagacagacctttgttggcaaggtaatgtctcagctttttaatatgttgtctaggttggtcataacttttcttccaaggagtaagcgtcttttaatttaatggctgcagtcaccatctgcagtgattttggagcccctcataaataaagtctctcactgcttccattgtttcttcatctgtttgccatgaagtgatggtatctgatgccatgatcttagttttctgaatgttgagttttaagtcaactttttcactctcctcttccacttttatcaaaagtctctttagttcttccctttctgccataagggtggtggcatctgcatatctgaggttattgatatttctcccggcaatcttgattccagcttgtgcttcctccagcctagcatttctcataatgtactctacatataagttaaataagcagggtgacaatatacagccttgacgtactcctttcccgattaggaaccagtctgttgttccatgtccagttctaactgttgcttcctgacctgcatacaaatttctcaggaggtgggtcaagtggtctggtattcccatctctttaagaattttccagtttgttgtgatctacatagtcactcttgagagtcccttgggctgcaaggagatccaaccagtccatcctgaaggagaccagtcctgggtgttcattggaaggactgatgttgaagctgaaactccaatactttggtcacatgatgtgaagagctgactcgtttgaaaagaccctgatgctgggaaagattgagggcaggaggagaaggggacgacagaggatgagatggttggatggcatcaccaactaaatggacatgggtttgggtggactctggcagttggtgatggacagggaggcctggcgtgctgcggttcatggggtcgcaaagagtcggacatgactgagcgactgaacaactgaagtgaacatagtcaaaggcttaggcatagtcaataaagcagaattagatgtttttctgggaaaaaaaaaaaaaggcaaaatcgttgtctgaggaggccttacaaatagctatgaaaagaagagaggtgaaaggcaaaggagaaaaggaccatgggaaatactcagtaaatgagaggcacagcaaagatttttgttatcattgttatcactgtcacttgattgtttccattaaaaagtttttatggctaatatgtttctgtcttatataaaatgtttattctaaagtgaattccacaaaccctctatggaaatcaacgtgattaatatgtggaaaatgacgttgaggtctcttgttgatatatttctataaatggagctgtttcagcaaattgaaaatactcagtaaaagcctcgtaatttcgtgtttacaattttctgggtcacgaagggtcaaagttagtcagggtcaatgttaggtggacagttttatattcatggaaaatgactcacaggaaacattaggaactaaaatttccgtaataaaaaaacaaaaaagccatctcttaaaccatgtttaaattgagtctgtgtctatttcatatcctaactggcattgtgttcataaagttttgacattgtttgaatttctgttgttaaatctcatttagggctgataatcatacattgtaacacacgtcaccggaaataattaagtactgattccagtgctggtaacattttccacttgagtcatctgggtcactgtgtctacagtatccatatttacacctttgtgttgttttgcaatagatctttaagttcaacttcctttttttaaaaagaaataaaaccttaaaaggtagggaagcaacaacgtcatttgtaatccagaactataaatgggctttgagaaaagcagggtgttttcttatgtttgacctgggagtgcctggtgtttcagtggaaggtgagaacttgcagtgagcagtcagatgtggggagaaatgcagatggttgtacctaggttgtagatcctctcaagtcaaagtatggaggtgctaatagaattcctagattctggaaggatgagtaaagctattcaatcagaaatatgtgggagaacgtcttccagatgtgtgcggatatctgctgagagtgttagttggtttgaaggatgcaacctggagagaaagttaatttgagttcagtgtcaatggaggatcttttaagccataattaggagggtggtctttattcagtggccagtgaggaggcttgaaaaagttttattttattttattttatttttttggaaaaattttaaataggagccaaaggatcctgtttgtgtttctgaaaaggctctgtggcagggccatagagaatggattgcagaaggtggtgacaaagaagaccaactgaggagttgtgtacgttggagatgatacagtccaggactagcgtggcggttgtagagatggttggggctgagacacactggggttgaagaagcacagccctgggtgatcagttggacataaagtggagagagtgaggaggaaaagatggcttttagatttctcacatgggcaggtgggtagaacactagtgctgtttacagagatgaagctcttggaagagaaagagtttggggagagtggatattcttctttgtgcatggggtatgagatagaatagctgacacttgagagagcacggagacaggcatgattctagggatagagtcggtatttcagacaggtttacattctcatgcatgaaacgcaatcgccagctaacagtcacctaaacagactgggatccatttgtctcccgtacaagaaacccaggcctctgtgacccctgccattctttcagtaattccgtgatgccaggaccatccttgtagtgatttatcttggcttttcttctgttgcttttcatctggtgactgcaagatggctgcttctcctctgggcattcagaatgaatgccagagtgctcagttctgtcctactcttgtgaccctgtggactgtaccctgccaggctcctttgtctatgggattgtccaggcaagaatactggagtgggttgccatttcctcctccaagggatcttcccaacccggggatcaaactggggtctcctgcattagcaggcggattctttaccactcagccacctgggaatcccctggtggtttatgggcaagttcaagtgccaggaattatattttgtttggatgcttcttgtctttcttgcccatctgtacagtattaaattgcctacatcattagagtctgcaatagagtcatcgttttaaaaatcctggttatttttgactaaacagtttagtggtcaggtaggaaagatgagatgccctatttaactacagtatccctagtcaaatatgtacatagacacactcagagaagcccaccgtttcctattaacatgtagattatgaagtgtgtttcagctttaactatatttttgtttgttaccttcaaacacatataactctgaattgtctttaaaacataataaacataccttttccttatctgattaaaattcttaacctgtggaagacttttgttctcagatttattccatatcttcctaattccttaaagctctctctcagtggacccctttgggattagagccaatgaggaaaattctgtttggtattcacttactgatatgcattgcatgtaaaagcagggagtgtgtgatggaaaatgtcatcccctttactatgacttttgtatctgtgaaggatataattattctgtgtttaaaactagagaggaaatgtttgttcactcttcctgaaggtaaggttattgagggtatcataagatgcaaatatttgtcctctattctcttccagtttaactcaagagagtctccccatctaatatatgcagaattctcctagtgactgctttagctcagagtggttctgagaataaggaagttttctgtccctgaagtagggcagaaggtgcagagattttggaaaaaggcttctcaggcttaccacgatgccatgtgatgttgagaatagaatttaacctctctgaactgatagatgctatgaaatttgggatgagagcaggagatagttgtatggtccctaccacataagtatagaaaaaacagctgcaacaagaatggccgggtacactgaagatgcaagtaatatctagtggagagtaggataaggaaactgggagactgctgggagactttaagaaggccttttggaggagaggactggaagctcatgtatttaataggagaatgcagagggattacaggatggtggaggatggccccaggctgagcacatagacatggtgtgcagcgtgtgtttgatgctttcagagactttctgttttcaatgatggacaaattgagaagagccttggaagtctcgctgagtttggactttgctttctaggtgatggggaacaaccacagacacttgaaaaattcatacaagtttaattttgatagaagtggattttgtgggtcaaagaatctgtgcatttaagatgtccatagattttaaaaattaaatattttgagatcgtggtagattcctaaaatgtgtggttttaagaaataacacccagagatcctgggtacttgcccagttttccccagtggtaccatccaatacaatatcacagccagaaatccactgaagacttttgagaacagtccacaatatgcctgaatctgtgttttaaatgggtgatcatggtagtgatggcctggaatggattggaggtacaacgtggagactaggagatcctttggaggttaatgatctaaaagaggacctgaagaccatggtgataggattggatgggaagggacacctgaagtagtaataataggatttggcagtcatgtggggttgataagagcatttgatgccttgtgcaattgctcagcaagtaggtattgaggactaattgtgtaccagtctctgctaaacatcgggttgaaaggtgagctgacaagagaacaggcactgtgactgaggggaggtgggctggtgaagctgtgttgcttgggacaggacagtgagcactttgcagagggggtaaccgccactctgcttctcctggttatgaccatgtgggaatgtaggtccattgtgattgataattctggtttctcataagctagaaatctagatttttatatgagatctcccaatttttaaatattacctagtacaacttggaaaaaaaaaatagcattcacctgtgggcttgattgacttcattattgccagttcctagcctctcttttctcagtgggatgtttagagcttatgtcaggaatgtctagggtttatttcagttatccactgctgtgtaacaaaatcacccctgtgtgttagtaactctttgggaccccatggactgtagcatgccaggctttcctatcccccactatctcccagagtttgctcaaactcatgtccattgagtcagtgatgctcaaccatctcatcctctgctgcctccttcttctcctcctctcagtctttttcagcatcagagtcttttccactaagttggctcctcacgtcagatggccaaactattggagcttaaacatcagcatcagtccttccagtgattattcagggttgatttcctttaagattgactagtttgatctccttgcagtccaaggggctttcaagagtcttctccaacaccacagttcaaaagcatcaattctttggcacttagcctttatggtccaactctcatatctgtacatgactactggaaagatgatagatttgactatacaaatgtagtagtttaaaactatggctgttttatctctcacacttctaaggggtgactgggcttacctggctaatttttctgctggtcttgcttggggtccctcatagaggtactgtttagttgtagacatatgatggtcagggctggagcaatctggagatctgtcttgggccctgatacatttggaattttgtcttcctgcctgtagtttcacagcctctggtagcctttccctgtggaaaggtaactggatttcttacgtggtgactcagaagatcttcagagtaaacgttccagaattgaaaggaagctaacagtctcaccgaaattaggtccaggattgccaaagcatcactctttttcttagttaatgcaagtctcaggccagcccaggttttttgtgggaggaaactacacaggagcatgaacactcaggcctgtttgttcactgactacggtttttagagaccacctacaactgaagtctcaatacccagatactggagattgtgttgatcaagataagttggcagatcagggcaaattctcctgcttgccagcccctattcctctgaagtttttgagaatttcctgatactaagtttcttttatggtatcggtgattctggagaaatttacttttcagtatgacatactttggaaccataactcatttgtagttatttgctttctagccctttaaaaatactgctactactaagtgatgagacagactgattctggttttggttgagcatgtgcttttcagatatgcaaccagtttattaattaatgttgattttctgatcatgtatccttttaggaaggaggccctcaaataaagtccattgaataagaatcccaagtctttactgtccaccagtagggacagctgtccattattatgacacttctgagtattcctggaagcagcaatacaatttgcaggacctaatacaaaatgaaaatgtgagacccctggttttaaaagtaagaattttaagatggtgacagcagatcatgaaactaagcccaggcccaatgcactgcgtacctgtgcaccaggctggccttgtgtagccccttgaacatgtgtgcaaatgttgcattaaagtatgttttcccagaagagaaccattgactctaatcaaattctcatttgattttgacacgcagaaaagttttagaagcactgcttagacaaatcagaaaaagtggaagctttgtgtctgaacagccctctgctcccaagcaggcactataccttttggccacagcagccggtcttggctgacgttaggctgaacattctgccacgcagattcctgaattccagggacaccagcgtcgtggggatggtctatgtggctgagcgtttcacaggttgtctccctttttactgaactctatttctgaagcatacaaaatagattacctgtgcaagcgatgggcatttacattcctttgaaacagatattagccccgtttgttaggctggggatttggggatcaagatttctgggaggcagccggtggactccagataaggctgccgcattgcccaacttcatagggtttatgcctttatgagagctgccgaaacacggtgccatggactgagtggcttgaaccagagaaatgtgttgtctcagttctggaggctggaaatctggagttgaggtgtcagcagggctgtgctctccccgaacgctccagggagggatctgttcccggcccctctcctgtcttccggtggctccttagcttgtggtgacataattgcagtcttcacctggcttctctctgttcacctttcccctcctgtggaaggacactggtcatattgggttagggacccattctactcccgtctgtcttcatcataactaatggtatctgcagggatattatttccaaataaggtcacatttgaggtgttgggacttcaacataaaactttgaggggcacacagttcaacccatataaggggtattttccaattgtgatttaggaatggcagctccaggcattctgtaccgctcagcccaagtggccctacatggagggcttgccctggaagaacctcaatagttaagagaggtgtttgtgaagctggcttttaataatacatgagccactttgaattacttgtttgggcccttgatcgggagcatcataaactcttaaattttttttttttttaatcatccctgtcaatcagtggatgcgaaggtcaaattactgtcatgcctacattcctgacccttataatagaataataataagctaacatttattgaatgcttattatgtgctaagaattgcatgtgttatctagttttatcttcacaacaactctattagatagttactgttattcttccagttaacaggtgaggacgctgagatcaggtgtggttgtgtgacatgcccatagtcacatagctaattaaatgacaagctgagatttcaatccagttctgtctgatttccaaatccaagcaacattgcagggggtgcaccctgtatttttagaggaatgtttgcatgtaacagttcaccatttaaagcctgttttatcatgggccttttcttttttctagatcatcctaatgaaatattctccatctatgtttatttgactcaggattcttaacctttttcagagtgaccatagggccttccataggttgtatttctatctacttcagtaagggtaggaattttccatttgaattaattgaaattacaaatggtaaacagtagaagagattatattttagctatgttttttaagagatccttaaaagaacataaaagttaactcatttccttgacattggtgagaatagagtcctaaacctcactagagaattccctagtactgataaggaaatttattctcatctcatttatgctgctttcagtataatgtgctatatggtgagagtggagacaagttctctcgaaaaacacatttttgctttcttccttctttcccaggtagcaactgaaattctctttctctgtcagagtgatagtccagttaaatccatgcatgtagatacatgggttctttcctccaagtgtgagaacagtgctgttttggaagcagagacttggtatcctctgatggtttattttattcttgtttagttgttaagctgtgtccaactcttttgcaacctcatggactatagcccaccaggctcctctgtccatggaatttcccgggcaaaaatacgggagtgggttgctatttccttctccaaggggatatttccgacccatggatcgaacccatgtctcctgcattggcaggcagattctgtaccactgagtcacctgggaagcccctgttggtttttggcaagttcaggtgccaaaaattatattttgcttcgatgcttctcatctctcttgcccatctgtacagtattaaattgcagacagtatgatagtcatcttttttttttaatccctgttatccttgactgatagttcaagtcaggcaggtaggaaagaaagatgaggtgctttatttgcttgcagtatacctagtcacctgtttacatagaaacacatacatatatatgtattcacacatacatatacatacacacgtatccgcataaagtctttgttaaaatggcatgtcagctagtgttgctttcagaccgtaaaggtaaggtaagtaaagtcactcagtcgtgtctgactctttgcgaccgaatggactgtagcctaccaggctcctccctccatgggattctccaggcaagagtactggagtgggttgccatttccttctccaggggattttcccaacccagggatcgaacccgggtctcctgcattccaggcagacactttaagtttcagaccataagaactgaatatttcccgactctagttgaattatttatcagggtctgtgggataacttattatacttatttgcaaggtttggataaaggctgtcttgaataatccagaatatgtttcaccccatgtgtctaaaagcaacatttcacacagtgtagtcccaggatcacctgcttcaaaatctttgggggcatggtcaaaatatgaattcctgggccctggtactgcagcctcactggtcctggtactgcagcctcactggtcctggtactccagcctcactggtcctggtaccccagcctcactggtcctggcactccagcctcactggtcctggtactgcagcctcactggtcctggtactgcagcctcactggtcctggtactccagcctcactggtcctggtactgcagcctcactggtcctggtactccagcctcactggtcctggtactccagcctcactggttcttccactccagcctcactggtcctggtactgcagcctcactggtcctggtactccagcctcactggtcctggtaccccagcctcactggtcctggtaccccagcctcactggttcttccactccagcctcactggtcctggtactccagcctcactggttcttccactccagcctcactggtcctggcactccagcctcactggtcctggtaccccagcctcactggtcctggtaccccagcctcactggtcctggtactccagcctcactggtcctggtaccacagcctcactggtcctggtactgcagcctcactggtcctggtactcgagcctcactggtcctggtaccccagcctcactggtcctggtaccccagcctcactggttcttccactccagcctcactggtcctggtactccagcctcactggttctttcactccagcctcactggtcctggcactccagcctcactggtcctggtaccccagcctcactggtcctggtaccccagcctcactggtcctggtaccccagcctcactggttcttccactccagcctcactggccctggcaccccagcctcactcattccgggtttccagggaaccattttgtccggctcctttgtgactcttcaccacaccgtcgtttgagatccatgatgtgaaatgtattaacaggagaataaagagtaaatttaattttctctgtcctggttcattttcctcttttgtcatcctctttcctgtcttttgtcttccaccccctccgtcaaatatgttaaaagtatttcaagagctattctaatggtgtactttaaaaaaattgttcataaatgtcttgtttattttagcaatattacgattccatctttccttttgtggtgtgtataaaaggagccattggggaagagtgtttgttttcttttaaatgccctctattctccacagtaaatctccaggaaggaacaacatgctgtttgttcttttctcaggatgaaccgtggctttctttgatagtggatattgtcatcaatggtttcagcaacttatgactcgtcctttttataaatcccagaatttagtgcgtgcgtgtatgctaagtctcttcagttctgtccgactctgtgcaatcccatggaccgtagcccgccaggctcctctgtatgtgggattctccaggcaagattactggagtgggttgccatttccttctcaaggggatcttcctgacccagggatggaacccgtgtctcttaagtctcctgcatcagcaagcagttctttaccactagagccacctggaaaacccgagtttctagagcgtgctttttggggtgagtgtaaggaatcaggattctctgagaaatccttttgtggattttctgggatctcagaataggccgtcacaactccctcagtgtatggtgtcaagaacttaagcctctaagtatatgaaagagtcgtaaaactagaggttttaatggattgttagtaataggacgtttttaaccagaagtattcctgacaggtgaattccctcccttcctctcccgtattagagaaatccctttgttgtgaagctgaacgagcaagattgtctccactttaatccgtagtaaataacttgttggattccaagagagtagaaattttccaggtgactcagatggatgcttctaaaggtatccagacagtggattatccactttctaatccagacagtgatgttagaagcagattcttctataatattcttctttattataaaaggaaaatcatcacttatgtgttacaaagtggagaaactgtgtggtgtttccttctgaagtgtcagattcaaggtctgtttcctcttagagaccctcaggttaatctccagcattttgtattccagcctgggaaagactggcctggactgtgggctctagcacctcactggttttgtatgtttggactggttaatacaagtgaccacttgttatttttttgtccaagtgctgtggttggatttttctcccccccaatggtacaaatctcttatctccctgctgtgtctctctgatgaaagctttgtactggcagagaacccttggtggcagagctgggctgatgaatgtggccctgactataatttgagttgtcccgggaggggtttgagcgtttctcatgaggactcaatggcagtgagtcaccgtgtgctggggtactggtgtcgtgaaataacagctgtggcagcagcaacaatttagtagcagtcgctggttgagcatttattgatgctcccaccttgcccgtcacgtgtgttaaatagcacttaaattggcagtagtcccatgaactcagctccatctatcatctccattttacacataatcgtctcaaagacaggagactagtaagaagaagaagtggaacttgaactctgatctcttgggtggccacacgtgtccatttaacagccacactacattctttctgactgaagtacacattgttgccagcttccctacccgctcttaaatcacatcatagtcagtttttacttagcagttttttttactgagtaatccagggaccgatgactccctttccttatttttcatttattttaagtgagagagaaagttcaaccttgggaaactgagcatgaccttcagcctgagaccatgtccatttactgaatcctcgagggataaaaggaatcttgtcagggggagggttgggtaagagaggaagaggtagacaggtagacacatccagggagatttgtatctccttagaggagcaggagggacattaagtataatttaagattatagttcagaggtcagccaggtaataatgctaagggacactttatgcaaaaaaaaaaaaaacagttctctggtcaagtaaatttagtaaactaccttctaacatccagttaaaaggcaccaacaaccaaaacaccaagagcacctcacacttactaaatgcttcgtgtgtgcacttttaagcacttggttgtaccagtactataaggtattattttgatcccaattttactgatggagaaaggtcatcctgctattgggtggcaggggtgggagcctaaccaaagcagcctggcctcaggcactggactcctcctcctagtacctcttctggtgacatctcctgagcatgaatatatgtgccagcccccagccttagttgctgtgtgtgtttttgtttacctgtttaaccttctcaagcatcataatgtgcatcagcatattaaaggttctgacgtgtccagcagtcaacacacttgttagtctgtgtccagtgtttctgagttacttcactacaggattcatctgcctttgtcgagcaggaggaatgaagggaaaatacctgcgtgtgtgcacttggggaaaagacaaccaagagaatgattttattctgactttgcttcctccccagtgcagttttgagacatgatttattttcaaaacagagcagactccctgagaatgtggctttattatctaactgcccagtgtttggtgaccttcatcagggtgccgtcttgcttcccccgggggcatggatacctgcttctgtctactttatgggaatcttgacagtaaatgaccgtaaaactctttgagctgctttaaagaaagacactattgaagtccaaggtcttcatgatgtcgtatcaaatatccagacttccttcattttggttaactttgaaaaataaatgtgtgtcctagcaggacagattaactagtttagctcatcagagggagggaagaagatagagctgcaaaatgtttattgctccccagagtcaaatcttcaggcccttatagcctggcacagagatgcttggttacaacaggagcaatgttgatgttgagttccccataagactgtgggagccttatgtttgtgtgactgactttgtccttccgagctccaaatatctgaggccagagacccaaatgcatatgtctgggcatgcatccttggtagtgtatgcttttttaaaagttttgttttagctgtatgattgtaccagtaaaaatccatttttatcagtgtactaggtaaaaatccatttagctgtaaatgacaaaatccagctcaagcaagaaaggagatttactggttccttgaggtgaagagtgcaggtccttttagggttggtttgaacttaaggatggttttgacccataggcctggtgttagtatcatgggcttgatttctgtgcatctactgtgccttcatggtgacatgtcacctttagtctttttttggttctatctcatgtccagatgtctaccagatattcctgaggctactaattccctttagtttatttttggttctacttcatgtccagatgtctgccagatattcctgaggcagtttattccttccacatccagagatgagagagattgagagattaggtatatttctggaggctgtttctgaatagcaagaaagaagatcaaaccttttttattacccagacttagatcatgttcccatgtatcagccaatgcctctgatgaaggaatggctttagactgattctgccatgttctactcctgcgttctgaggtggcatgtaactttgcaaaggaggtatggaaaatcagatggtttccacataagtgagaatggatgcagggttaaactttgagactcatgacacactttacctgacagttttctcttatacactcatgttagcagttacatgtgaaactggccagttaatgaataaaagacctaggtcaagatttaacttacaggggatttagtttcaagctctctctctcttagtaatacaggctacaccagatcaaattgagggattctcttctttttagcttgttgaacagtgtggtgttttggcttttaatttgtaaagcattaaattgagtctctgtctgccagtggtttttaataccaagtgcgttttgggtgagtgaatctgaggtttcattaaggcaatataaatgaccctagctttattattctcttcttcctattgagctcagtgtgactgctccttgcttttgacattgaacttcaagctttactaaataaaggatatttgtttccacattggtctcctggatgcctgacattacattttatttcataaaaattatgccaccattaaaaataaaatcattaatattgagaggcataaattccaagattgatagtagtagccggaagtgtactgagtgctgactgtgtgacaggaaggcactgcgctcagtgctttatctgcagtgttctgtttgttcatctcagtagccctgggagatgctatcattacttgcattttatagttggagaaactgagattaaataacatgtacaagttcacatagagaggaaactgtggagataaaatatagatcttttgactctgagtcctgttctcttgatcactattccctccactattttcaaagccaggatattacatccaatgttaatttggaatgttgggaaagttgcattatgtgtatgtctttctgaagttagtgcttctatagactagtcgtggtagaggattgaaaaagagcatttcctagcatggatcttggaaaaacaccaaagagttcttcataaaaaatgtgcattttccctgatagccaaaacaattttgaaaaagaaaacatttggaggactcacacttcctgatttctaagtctgctacaaagctacagtaatttaaacagcatggtaatggcattaagacacacagattgagcagtggaatagaataaagagctcagaaacaaaccctcacatttatggtcagatgatctttaacaggggtgccaagattataaaatggggaaagtctttaaccagttgggttgggagatgtccatatacaaaaacatgaagttgtgttttgccatatgcaaaaatcaactcaaaaattaagatctaaatataagatacagcactataaaagtcctaaagcagaatatggaggaaaatcttgatgacattggactatacgatgatttcttgagtatgacaccaaaagcacagacaagaaaaggaatgataaactagtgggactgcatcaaacctaaacccttttatgcatcaaaggacataatcaatagattataaagagaagctgtggaattatagaagatatcagcaaatcatatatctagtagaggttaatccagaatgtataaagaatgtctcgactcaacaacaaaaataatcaacccaattaaaaaatacgtgaaggacttgaatagagatttctctaaagatgacatacaaatgaccaacaagtatggaaacagctgtttaacatcattagtcattaagagaaatgcaaataagtcacagtgagctatcacatatcacctgttaggatgacttttactaaaaacaatagcaaacaagcagctacccctcaccccttaaaaaaaaaaaaaactcagaaaataacaagtgttggtaaggatgtgaaaaaatttagatatcgtgtacactattagagggggttgtgagacggtgcagatgctgtggaaaacagtatggtggttcctcaaaaaattaaaaatagaactgccatatgattcagcagttccacttctggtatatatccaaagtaattgaaagcaaagtcttaaagagagattttcacacccaggtgctattcacaatagccaagaggtagaaacaactcacatgtctattaatggatgaatggataaacaaagtttggcatatgcgtagaatggaagactatttaaccttaaaaatgaaggagttctgttacatgctacaaccttgatggccactggtatgtgaagtgagccagttacaaaaagagaaatagtatatggtttcacttatatgtgataactaaaatagtcaaattcctggaaacagaaagtagaagggtagtaaccaggggttggaggaaaaaggggagttttttagtgggtattaagtttcagttttgcaaaatgaaaaaactttggagattggttgcatagcaatgtgaacataattaacaccactgaacacttaaaagatggtaaattttatgatgtgtgttttttaaatcagaattgaaaaaaattgtatttgtcttctggtactgatttaagtacttaattgagttatttgaacatcttaaaagttataaaccctgagcctacaggctgaatatggatcacaggtatattcatatagactcataatctttttttttttggaggggataaaatgtgaaccagtggtcatcattttaaagaattaggaaatttcatgttaaaatctctgcttctaagcttctcttggagaactggaaaatctgaactttgggccttgtctagtcaacaaatgactggaactaaggagcagccaacctctttatagacagggcatgaaacagactacattttttctcattcccttttttttccccttatatcaagtccaagggctcatgtacagttgatccttgaacagtccagaggttaggagagcccacactatggaaaacccatatataacttaaaattgcccctctgcacctgcagattcattcaaccgcatatagtgtagtattccagtatttactattgaaaaaaagttcaggtggacacatgcagttcaaacccatgttgttcaagggtcaactgctaacttcctggtctgtttgtcggttttaaattaaactccttaatccctaatgccctattactactggtgttgtaccgtgcatgctgtgcatgtcctccactaatcagtgtctgccttccctaagtagcctcttctgttttaggtctgagagttctgatctcttgtctttaagaacaatatagactcggtgctttttttttttttcccccttttttcctttagctgttttgcttgcagcaaatgtcctaccagtcatgttctaaatatagatgtgttaaatttcaaatgtgaaagtttttgatgggtctgaagccagtttgctaatcagggcaaatgctatgattggcgccagtgtttacagaccctgggggtattgtgaaatccgccttcgccactgtgattcagctcgggggtggaatgaagctccctgacccctggaaagttctccaagttgtttttcttctcaatagtggggtgattcgttgaatgtcataacttagaaaagtacgtgttccttagttcattttactagtgctggattactatcaatagtatggtcataaataatttttgcaagcaaaaacaaatcatatttttttctgatcttttcatgtacaatcagtaaggaaatgtctatttattgaaagaaatctagagacccaagggcctgcctcttcatatgaaattaaaaatagttacttgtgcaaagtgtaaaaattttggttattggaaagttcagactgatccaatttttaaaatcttgtatcttttaagtctaattatttactctttaaagatagggctagtagtgtccattgtaaggaggggcaaaatactcaagaggcatcagttgccaaaattttcaaagctactccctgcctaatattcgtgtgtgtctgtgtgagtgtatatgcagggagcactattagaaatgcctgtatgtttcatgctgggtctgttttgtttgtgtcatagaacttgaaagattcattttcgtgtgttgaataatagtgagcagcagtggaggaaccttagtctccagtaccagtagagtggaggtattcggagaactttctgataatgagaattaaagtaattaagttgctgtgccctgagactctgaatccttatctccccttgccagaagtgaggctgtcatttagagaagtgggtgtctctgttactgaaatgagatatgactgtagttgatcccatcactctctggtgcagaatttttcaccccgagcagcagatcagagaaatcaaacagaacaagccagttaaaccacactgctttgctggctgaagggacccaaaagtaaacaaagtgacagacttttggagttcctttcccaaatttgatttccctgtttttatccattaaattggtcaacagcagcactcactggtaaaaaacaggaacaacagattcaagttttgccgtcagctacactgtagtgttgttctctctcttttttccttcccctcttttctcttcctcctccctttctttgatctttctctccctccctcccttcctcagttcaattttctgtatatatatatatttaaattccaaaggaataataacataaagaaaaacatgttaattttcttcctcaccatcttgaatccagccctgctagagaaataatattaataatttgttgtgtatcatcagtcatttccttgctcaggcaaataagatccgtagatagaaaagtttgtttgaatttttagaaactacttaatctgtttatttttggctgcgctaggtctttgggactttgtgcaagctgtctctagctgtggcgagcaggggctgctcttccttgtggtgtgcaggctactcttgctgcagagcacaggctgtaggtgcatgcatgggcttcagtagttgcaggataagggccctagagcgtgggttcagtagttggggcgcagggacttagtagctgcgggcaagtgggatcttcccggaccagggatctgaactgatgtcccctccgttggcagtgggattcttatccactgtaccaacagggaagtcctattttttgaattttcacagaaatggactcatgttgtgtgctgtaactttactcacctgacgctactttgtggctatctctccaaatcagtacctttacctaaaaatcgttactttcagtgtggtatatttcatagtatgattttatcattcttcatataaatcccccattgattaattcagtttacagattcctcctcaccccccactaaacaaatagcgttgcttattttaactgcatatatatatatatatatatatattttttttttttttgaaaaacctttaccctgtgtgatatttgaagagggaagttatagggctttttatttttgttatttgtttttcttggggctagtagttactttatagtgttgtgttaatttctgctgtacagcaaagtgaatcagttataggtatacatatatctactctttttttaaaaaaaagtatatatatatctactccttcccacttagatcactgcagatcattgagtagtgttctctgctatacagtaggtctttattagttatgtattttatacatagtagtgtatatatgtcaatcctagtctcccagttctcctccaccattgcttggtaaccataagtttgttctgtacatcttgactctgtttctgctttgcaaataagttgatttgtaacatttgtctagattccacatataagtaatatcatatggcatttgtttttctctttctgacttatttcactctgtatggcagtctctaggtctatccatgttgctgtaaatggcattatttcattctttttatgactgagtaatattccattgtatatatgtaccacatcttctttatccattcctgtgttgatagacattttattttgcttccatgttttggctactgaaaataatgctgcaatgaacatcagggtgcatgtatctttttgaattatgtttttttctccaatatatgccgaggagtgaaattgatggatcggatagtagctgtatttttggttttttaaggaacttccatactgttctccatagtggcttatcaatttatattcccaccaacagtgtaggagggttccctttttctctacaccctcttcagcggtcattgtagactttttggtgatggccattctgaccgtatgaggtgatacctcattgtagttttgctttgtgtttctctaataacttgtggtgtggagcatcttttcctgtgcttttggccatctgtatgtcttctttggtgatgtgatttctctttatttttgctcatatgtataccataccatattatatagaacagggttgccttacatcataaatcacatacatttcatcacctttgtttatgaaataattttaattatcttgttattttcaaaggttgaatttagttggtattcctttgaagagtatggcagttgttcttttcaatggaaaaaggagatacgatctgacaggattttttctttcagtgccttgaggaatcttttgaaatgattttccaggtagtaaaacctttaatgtcctttggattcactgtagtttgtgaagctgacaaacaacagctctttgggatggttgtgaaacaaggcctgggacagactgacttgttacttagtctgcatctgttgccttgacaacaaactaaacatttaaaaatacttcggcaaatgccataaacaagtgatgcttgggggttacactattaaagcagaagcaccaagaccacatttagacaataaaggttgcaggaaaaatacccactttttaggagatttttattgtaggtttttctgtctctgataaacactagatgcattagcaaagagaaagtattctgctctaagttgagaaattactttcaattgcagtatgcagcagtttgcactgtattttggcccaaaggataatgcacacctcttttatttggctttcctcaaagcaatttagtgccatgtgaatgaaaactggattagatctgtcacagcagctgaaggttagggtgacacagggagagataaaacgccaatctttgtgcctaagtattttttgtttaacctgtgctctcacattctttgtattcacagaggtacttgttgtctgggtggtgatatctacaaatcctgtaaatgaatatttgttatagcatctactattatactaagaatcattcattaaataatttgggggagtgagtaatttataggaaaaaaaagggattcttttggccaaacaggaagagtattcaattttgctggactcagtgggagggaaaaacaatcctgttgcagatttctgtattttaagggatgcagttcatgatagttgaataattaggaattcaggaatcctcgctcacgcttttctgttttcttaaattctcatgatctaacattgttctgtttggctataagtaacatttattttcagtttgattttgaaatgctgatactttcagtgtaagtgaaagtcgcttagttgtgtctgactctttgtgactccatggactatacagtccatggaattctctaggccagaatactggagtggatagtctttcccttctccaggggatcttcccaacccagggatccgagcccaggtctcctgcattgcaggtggattctttaccagctgagccacaagggaagccctaaaatactgaagtgggtagcctatcccttctccagcggatcttcccgacccaagaatcaaaccgggatctcctgcattgcaggcagactctttactttcagtatacaaatagtgaaaaataatacaattccacatatggctttcattgtcaagatcatttcttctgcctatcttggtggaaatattcagtattttttcatctataaccaaggttatctttatgagctgtcagggctgtggtggcatatgtaatgatacaaatctgggactcccagtgctgtgggtcagagattacaataaaaatacaagtgtaaatttctgaaacaacgtgtactctagattttccagaggcctttaagcagattatagatacagcagtgactcacagttttaatcagtctctatcttgattgaaagaccctctcaaactttgctgtcttcactgcattcagatcccacttctgtggcttactgagctggaagctgttaatgggtctcctttatgcccacagctgacctgcctcagcctcagtttccccatgtgtaaagtggtgatgctgctgcccatattgacaaaattgttggaaagattcaaaacccaactgctttttaacatactagccctctttctggcttcttaataatggatatttttacattatttttatggtgaataaactgtgttgtgtttgttaatctgcctgtggaagccaggcagatttattcagttcctcttgtatcacatatcagaggcatggaatctcatcgaggtcagtgaactccctctgagtctcagtttcctcaattgtaaaataagaatactaatatttaccattcagagttgtgaagaaaaaagaccatgtttttatagtatatagcacaggtctggccatgtcataaccatttaccaaatgatagcttctgttgtcactatcattgttattatcatttttattattatttgacaatatgtatatatcgcagaatttctgccgccatttctatagcctagctactgttatctctccctgggttgctctcatagccctttaacccttctcctgatgctgggatgcagaccctccatcataatctggccttgcccttcccctcccacctcagatccccacattgctttgcaacagatctttctgtgctttggcctccacagactttatttcttttcacatattatactactttcttgcacagggcccttgcatatgctattttttccttcttgaactagtcctctcctcttttcccattcccttatacttctttacttccctcctcatccccttattaaataccttcataggtacttatactcaattctttaagtcacttgtcatgtcacatttttttgtgctcacttagtgaattccatccctcaccctcatcctcaactacaggttctgagagagtagatactgtcagactgggatcaccactggctcttggtttagttccccttcatacgcatttgttgtgggaggcagtggatgactggatgcatgactgagatgggaatagaaaataactgggcaatatttgaggaagcagaggcagtcgtagggtgtgaggttcacccctggggaattcaggttagttcatggtctggcgcgccaccgaggaagcgcagtgtgtttgtgcagggaggaaaaaccgtgcaaatgaagaagtgcagagaggaaggaagaagcttagcaggaaatagctgtggaggattggaaagaggaaataactgagaagtgacttgatagaaaattgtgcatgtatttcctctgctgtagttctcatttttctggtttatgcctttggtcttgttttctgagtctgatttgtagcgttctcttttctttcccccttaggatgccatatcagtttatttacacagacaaacggatacaccagaaatgagcacacagacagtggcaagtgcagacttgtcgttttcccttcggacgatgaactcttcctcctctttgtcagtttctttctctatctttgtatttcttctgtcaaaagtgcacttttgtgtgtgtgtgtgtgtgtgtgtgtgtgtgggtgtgtgtgtttgtggttctctactctgaaatggatttaaatcccctcctttggctccccttacccatttctaatgtttaaagattcagcactgacttctcgtttcagctgttcatgtcactaatgacagagcgatttttcagagcagaaagctctgctgagaccgctgtcaggtattgggtggttgcagggatgaagaactaactacttatttttgagtgtttttcttttttagtctccaacctttttttctagtgttaggttaaattaacatataattcacagaagatcaaatttactattttaaagtctacacttcagtggtttttagtttgacagcttgtgcactagttaccattatctaattccagaatatttccattatctccctaagaagccctgtacctttcagcagttaattccaactttcctttcccctgccccctggcaaccattaatctactttctatggatttgcctactagatgtttcatatcaatggcgttaggcaatgttcggcctcttatatccagtttctttcactcagcatgaagttgtcaaggttcatctttaagtatgtgtcaggacttcattcctttctatggccaagtaatactccttcataggactgttccacattttttttctttttcagttgatggacatttgagtggcttccactttttagctgttatgagtaatgaggctctgagcatttgtgtataaatttttgtgttggaacttatttttcatttttctcaggtagttacttaggagtggaattgctgtgtcatattgtaagtctgtgttaaaccttttgatggactcttagactgttttccacagcagctataccattttacattcccactagcaatgtactaagtttccagttcccagtttttccatattcttgccaatgcttcttattttcatttttttaaaaaaattacagtcattttagggtgtgtgaaggggtctttggacttccctggtggctcagatagtgaagagtctgtctgctatgcaagagacctgggttcgatgcctgagttgggaagatcccctggaaaagggaatggctacacactctagtattcttgcttgaagaattccatggacagaggaacttgttgggctacagttgatgggattgcaaagagttggacacgactgagtgaatgtctgactttttaaatgatagtttctggtgggactcccctgacccccacactgtctctttcatttaaaaaaaaaaaaaaggttattgttcttgtcatttttattagaattagattttgaaatgaacctttgctagaactgagggaatcatgaatagtatttgaaatactactttataattgggaaacagcatgcttacagaaggtaactgaactggaaaatagcaattatggcctacaaattaggatttttttctactaaagtaagcctcaagtaaatattctcatgtataaattatagaaacctattattatacagaaaagtcaaaaaaagaaatttggtaataaaactgtgtgtgtcttctggtttggtttcttttctttgtataactatttttttaaattttaaattcttattcttcatatgctcttactatggtgatttttcatgtacagagtaatcttctaagatcttttaaatcctgcagaaaaagctctgctaatattagccaacccgattttttttctattgtttcaaatggaagtatcatggccaagggcccagcattgagaagcttaaacaattatagattctttttccttccattcattagatgtaatttagtatttgaaaaaataaaatcgctcaatttcagttgaagttcagctgtcttaaccctttctcatgttctctatttggcttttcattgtaaaccttgacagtgtcaaatcaatagaaatatatttttgttattctctagtataagatcaaaaccatcacccataaacatgtaatgagacttcttttatgtgtggaaaccaatctctgatctttaggaacttacagctgagtacagagcattgatgccagtaggtgctacagacacgaagtgtttgtaccatatatcaggcaggaggcactcagtaattttaaggatggaagaggcagctatgatataattgatatggaagatataacttacacaggattttaagacatcatttccagatttcgtgcagtagggaaacacaccgaactctgattattctggggaaagaaaattaggaaaacattggaagcgtacagatacttgttaatggcctactgaatgacaagctgtgtttggagcttgattccagagtatggtaggtgagagcttgggttcgggcagtcagatagcttcagtttgtttcttggatgtgacagctttcatttgtgtgattatggtgaaaatgagtgtccacagtccatatgggtgttgtgaggattgaaggggattaatttaaatgactccctctatttggtttctgacacataatgggcactctaataatatttatagtcttcttgtcagatttttttgtaattacagttattttacatttaattattacaaccgttacttaagaaaagtggtattaacacatttaaaaaatattgatttatttatttttggctctataacatctgcattgctttgcatggctttctctagttgcagtgagcagaggctactctctagttgccatgcacgggcttctcttgtttttggagcacaggcttgaggcatgcaggctttagtagttgtagcacgcaggctcaggagttgaggctcgaagactctagagtgtgggctcagtagttgtggcacatgggctttgttgctacgtggcatgtggaacttcccaaaccagggattgaacccatgtccactgcattggtaggcagattcttatccattacaccatcagggaagtccaacacacattttcaaatgagaaaaatgaggcttaaatcatcaagaatttgcctacaacagtggttcttacctggggatgatttttgacagcatctagagacgtgactttggttgtcaccactggggtacagcgtgatattgacatctggtgagtagaggctgaggacagcctctgtgacaaaagttatgcagcccaaaacgttgatagtgccaagatgaagaaaccctggccaagagtcacagagcttttaggaagagaagtaggatttgaaccaacttttctcaaccatatgtttctgttttcccccgaaacttctcttcatgagaatacagggagtgacataaagtgagttttgacaagtccctttaagatggggtagtggcttgagactcaaatacagcttcatgagaaggtgacaaaccaagtccagagaaagtgaggtgatgtgggagggaaccaccatctgtttattctttcactgttcattcattcaagtattgatttgctagtcatgttttaattcatgtgtcagtcattaattctccacacgcttactgagcaccgactctgtgggctgtattctcatgcaacttctattcctctagccagacagcttggaaatggaagagaacatttctgaaatgtagtataagaagtggaaaaaaaaaaggttcagtattagaaaatccagtttatgaacttgtctcacttgaacccttacattaatctatttgtttgttcatggactgctcaaataaatgcatgtatccatggtatcttcttgctaggaactgtgttaggtcctggtacttatgctcaagaaagtgtgtcttctgttgtgtgtgtgttagttgctcagttgtgtccgactctttgtgaccctatggactgtagcccttcagggtcttctgtccatggaattccccaggcaagaatactggaatgggttgccattcccttctccgggggatcttcctgacccaggtatcaaacttgagtctcctgcattggaggcagattctttaccatctgagccaccagggtgacctttccataaatctttatatagccttcagaaagaaactgcagttttatcattcttattaccagtaaacatctttttagaaacagaagatgtattggtctgtgtttcagaccgcttttgaattgaggtttttgctgggggaaggaagaatctttcttggatatcaaatgagccttgtggtttactcttaataattattttagtatgaaagagtttgctgggctttatgggaagtatcataaaatacctaatttccctcaaaaaaaaaaaaagcttcctgacttataaaaaagattggaataaaacaaatgtgtcttttaaaaactgcctgtattctgatggaaattcctttaatgacaaaatgaatgtacacacgtgtacacacacacactcttaaagggatacatcaaaagccttgattcttgttttttttttttaagttataaaataataatatacttacaggagacttggaaaacacagagcaaagttacacatagttctactacatattacatactatttttagtagataagaattttttggagtttcaatatcaagctctcaaaaatcaatagaaagaataggaaagtagaaggatatagtagacctgaaaagcactatgaaccaattcaacataattaagatttatacagttttttttcacaacagcagggtacaaattctgttcacgttcccatagactataaacgaggagacattgaaacatatccagggaaataaagcaaggtgcaaaagtttcatggtcttaaaggtattgaaatcatacacagtctgttctctcattactgtggcattatgttagaaatcagtatcaaaagatatttgaaaataacccatatattttcaagtataatgtgacaaatttaccaagagaaatctttgacttagccattgaaagcctcaataaaacaaacaaacaagcaaaccttgattcttaacagtttgtacttttataccatgaaaaagcaagaattactgcttgcattattattaagaatttcattgactgaatagctcattttttttttttttaagtaaccacaaattttcccatagtgatgaagaggcggacagtttctggatactgggaagtcccttcttagaagtgtatatttatcatggatgagctaggctaatatatatacataatatatatatatatatatatatatatatatatataggtttgtttctgttctaatttatatagaagaaagagtctgtgaggcagatgtaccctgtcccatccagaaggaaggactgagtcagcaccacggagcagtttcattggtcactcctgggtagtctgagctgtttaaacagtttaaaagtacatgcactgaacggcttaattcttcactatgagatggccaactctacgatttttctggaattctaaaaatacgttaccatttgtcgtgactacggtattttattttgcttcttgatcaatttttgccagtttggtttgttcctcctgcccctcatgtcaacagttaatctctctgaactctctgcacatttttggggttaagcccccacccaccacccccctttttattttgagtcccctcagacctttccccattatttactacttacctttttttccttctgtggttcttccattgtctaacattgaaaaagttgttgttgttgtgtgtgtgttttttaatgtttaagtctcttaataaaaaaatacacattagcatttgatatttttgtgtatattttttacctggaattttgaaaagtttatatacacatgtgtagttaacagctgatcgtttcaaaacgtggtttgcacttgtagcctatgagggcaaggtttaatggtacaatgacatataatgtgtctccttgcaaattctttttcttctgcttttctagagcccctgaaagctctcacaggggctgcaggcgcagagaccatccttggggaggaagtccagagtccacggaagactctggggtgttggctgtcttgtggagggatggaatggtgttctcctaagacttcaccatgcaaatcttattccttgaatgtgaaaacttgtgaagcaactttgttctacttattagaacagggaaagcacagtggggtatacatggaggcctcagagctgtagtacatgtgtactcctgatgattctaaatctagttttcaattaaagcttgccagtttctaggtatattgtagagacagatgttaccggaatcactctccgacttttcaagcttgtttcatttaagctaccaagaaactgagtctataaaatgacataattttatcttatacctttttctgacctgataattttccttttgccttcttagctcaccagttcaaactaaaaaaatcattctattgccacacatgtaacatcctctggatttcttccccatgtgggatctttttttgttcttgtttagaaactagaagtaatattttaacaaatattcatgattttacctatagtttttgaagatctgacttagtattttattttattttatttttttaaaataaatttatttatttatttttaattttttactttacaattctgtattggttttggcatagattgacatgaatccaccacaggtgtacatgcgttcccaaacatgaacccccctcccaccccctgacttagtattttaaaagtacttcaactaagaacaagaagctctctatagtccccaggaacgctgatgatttacaaatttattctccttttctggggtgaagggaaaaagaatgaggcctttccttgactccctgatgctgtactaaatcacagcttcctgatggtttctttcaaagtgattaagaatatctgcgatcatgtattttcatcatttacttattagcttgtgtattgtcatctcttccacttgacagtacatgctatgctggcaagaagaatgttaattttattcactgtacagtaagtcccttacaaatgaatgcgttcatgtaatataagttagttatgtgaaaaactaccttgcagaagcaaattttgggtatagattatctgcttgtagtactaaacatttttttcttaaactgagggatttagattttatatttttaactgagaggctttttcttttttttaatgttgaattcatttgatagtaaaatgttctttacattgagggtcaagaggcagtttataatttaaagctaaagattctatcttgagaaaatgtatttagtttgctataaatttatgcatgtaacaataagattaaatggacctttatatgtaggtccttgaactcatatgcagaaaattcaggcttttctctctgaagctttgtataaataacaaacctctgagagtttgaagatggaactcttttaaaattctgtgagcctatggacttgtaattaaaatcacaattattgttagattggttctatgtgtaattaaggcaggaagaaaatacaagccagtaaaatgagtaatgcaaggaaattctgatgtcctgcttccttttgaagagggttttacacattcatccctgtctcgttctctgttgaagattcttatcttggctacatggattgttcagaattttcagcgtaaagaaaaactattgaagtggcctgccttttcttgaggaagctcctcccaaaattatttctagccgggccagattctgtctcttaacatatatgatttcccccagtgtgttgattggtttcttatttcctgacttctcttttatataaaattcctgtggtgcactggagctctctggagctgtgttagggatgccataacacacctcagacctgaggaatgcttggatgttattttattgcctttggcagtctgtggatctcttacttctttcagtctgattagtggggaattcagagctatagtcaggagatagttcacctaaactgttactgctttgatggatttaatgatcaaatgctggctagtgcccaaagcagatatttacatgccctatgcttaattctacatttcccttgtcaaagatggttattcaacaaaggccttttatattggttaaagccaattaatacatggagatgtaatttaatttcttcctcactatggttgaatgtgaggagtcttgattgcctacaatgacatatatacagacaacaccttcgtttactaagtgtaataattaaggcagaacattttttttactgcagttctgtggtagaaaaaccactttgatacctttatttgggtcaaagtgttctttatacagtctttgaggtacggacctcatcaaagcagttgatcttccagtgacccattttggaataatatggacacaatggtgcttctctagagttgatctgaagtattgtgtgtttagtaactaagcaaaaatattctcagtgccaaaggctattaagacttggctatatctttgacagttgtctctgtttagcagtttggtatgttggaaagctacttagtagatcttttttttcttgatatatctcaagattacattagattttatactcagtagtagttcaatcagtattcattgattactttatatagctgttgtagcagtagttactgggagttcagtgatgatcataacagacaacaatatttgttttagtataacagggtttttttggaaggtaaaggtggtacacttaataattattctgcagcagcaagaactgggaatattccacgaaaattgggactaatgggttaccttagttgacacaggcatggtctctgtcctcatgtggctggtaatcaagaagatgatagttaatccaataatcagatattaagtaccaattgatagttgtgaaaaaattatagaaggccatagagtaagggaatttgacctggtcatggggttagggaaggccttcctaaagaggtaaaatttatgctgagttctggtagaagttctagtagactatttcagaaggaaaaagcatgtgcaaaaagctttagggtgggaagagagtgtggtgtgtttcaggaacagtaagacaggagggatgcaagcatggggctccatgtagagtacgtgcaggatgaagctaggaagcttggtagaagccacaccacctggggccttgactgccctggaaggatttagatctttaccccaaccaaaatggaaagctgttatagaatttaaaatgggggggtgtgtgagtggggtcaagtaggtagaaggatcatatgatcaggtttggattttgaaaagatccttcgggctgcagtgtgaagaagagattgagcagggattgccggggtaaagcaaggctaggggcaagaggaaaatctggggacagtggtgaaatagtttctgtgttagtccagctgagagataatggggactttaaagtgaatctgagaggtatctaggagcaaaactcagaaggacttggaaacagagtcttacgggcactgaagggtgtttggaattgttttgtgcccacctgtgatgatacacagttctcttgtgtccactcagcctgttttataaattaaaatcagcagcactgagcagaaaccacagaagagaaagagctagcttcaccgacttctgagaagtgactggagatagtccctgagaagtcagagactcagaaaatatcttaactatttggcatcatcagcgtactctgtagtgtgtggtggaatgagctgtgtgtgggggagagtacagttccttacattcttatgcaagagttgagctatagaatgatcccaaccagtaatgctgtgtcattgacttcttatccggatctctcttcaattagcctgtagggcagcatgactaaggtatcatttagggtactagaacaataattttctaaataataccctggtgcattgaaggggttaaagtaaggatgcctagatgcttcatctatgatcagggtgctggatcagattagaccctggacccaactggtttatcacgtggttcttttacaaggctgttgctcatcttaaagtgtgatgtaacagagcttatgaattaaaaataaaaacccacagggtcatgtgaatgtgtataaataccagggaactaagtatatctttctctgtagaacataatgtgggtagaagacttttgcttttgcatgtggcataacaccaggctcaagtcattatttatgtatttgcctgatgacgaaatagtagttgttaagtagcagtttgctcttttgtacactctggattatgtctcattcattctgcctttattgctgatatgtgggcatatttttcttagcaacagcagaaccaagccagtttctggggccatcttgcaaaatcttagttcagatactgtactgccaaaatcagcaataatattaatataagaaacattatgaaaattttaagatggtgtcttgaatattcttccaaaaatattgtttcaattagtcaaaaagcacaggttcttgcatgggtttccctttagtttttagctctttaatctcagcaaattatgagattttgctccattttatgcaagagatcaagtttctattagaagttgttttttttttttttctgaaaagggccactatgagagataaatagcatcattcattcatttgtttgatcaaatgattagagatgaggaaatatgttaggaattttcatttcttctactgttacctcctttttggttttcttttatttttagagctgtgtatattaagcaacttcatttacctttggtccttcatcctgagcctggtgttggctagccaggagaattttatgttgtttttcaaaagcttagtccagattttgacagcttcttgcagggtttgatattgaaaacaaccagtgtttaggaataatttaggtgtctactaaattattgactactgctcaccaacttattcttttactaagctttgagtcatattttagattaaacatggttaattttttccattcagttcttaaaactttacacactgagttagatacgtggcttgagtttaaactatgtttgccataagtggagttcctggattactgtccagagtgaatttggactgtcgaaagatttatttggtggcagtatgctcagattttgaaattaaataatagagctagtattcaaaatgactttttttaatgtatcagttttttcaaaagaattattgaaatataattgatttacaatgttgtattcatttctggtatatagcaaagtgattcagttatacatatataatttttcatattctttccataatggtattttaggatattgaatatagttctctgtactgtacatcatgtccttattgtttgtctgttttatatgtagtgatttgtatctactaatccccaactcctgatttatgccccccaccgtctttcctcttgggaaccataagtttggtttctatgtctgtgagtttgtttctgccttattcataagttcatttgtatcatactttagattccacatttaagtgatatcacatggtatttgcctttctctttctgacttatttcacttagtatggtaatctctcggtccatccacgttgttgcaaatggcatcatttcattctttttatggttgagtacatttattatgtgtaggtttttaatcatggtcattcagaccattttgaactgatacctcattatagttttgtttgcattttctaatgtgcctattggccatctgtataaaataacagttttgatgtttgttcaaaagatcagtgttgattaattctctgaaaagacatgtaattttcacattttctgtatgataagtggagcacatgtgtcactctgactgtattagagtcttttcttagcttaaaaatcctcattaatgacaaggaaataataatgcccaccttcaagggccactatgagagataaataagatcattcatttatttgtatgatcaacaatcatttgttaagcatcaacagtgcaaagtgctgtatgggatatgacagagaatggcaatggagcttataatctacttcatatttgttaagaatatagatgaatactacatggtaactaattgttgatatctaacttttgtctaaaacttgtgatctaaagtgtgttgttaaattactatttgtctgattttgaatttggattagagatgttgaagaatttctgtagatatatttgcacattaattttaggattgtaaagcagtgattctgaactctgcatattagaatgacctggggagctttttagtagctacagaaccagtgtcaggaggttgccctcagagattctgatataattgatttagggcaggacatggggactggcatttcttaggaagctcctcagatgattttaatgggcagctatggttgaggtgtactgctttaaaggtaggtatatttcatgagtgtttatacattgtggttaatgatagatttgctattgacttatcaggatatttagcttgatgtgagcgagagctctgtcattaactatggattgaccagttttgatgataggtttcagagtaaaatatgtggcttcaaagaatcagatatgtggactgtaggcatgactgccacggtgcatctctgtggccttaggtgagtcactttaccatggagacctctgtattctcatctttaaaatgaggaatttggttaaatgtccgtactatcattcaacaattgttataatgtagtactttaatgccccagtctatgaactacctgttgccagaatggttccctggcctgccatattgttctttccctttcccatagctaatcaaaccagtggtggacacccaatcaaagtcggccgggccataatctgacgaaagacagctaactcactcttgagagagtctgagtaaagatatgaatgttattacagtctgtgaagcatggaaagatgaggaaggggtaggggagcttggtgattaccttgggccatgtgtagactgaggctgactgtgtaaagtgagacgaactggggtgggtgtgtgcagcgaagcacagatgtcctgagaatgcagtgagacgattcatgaaagacacagcaaagagagctttgtctttgacctcatcccagttccagtccccagggacctagctgtaaaattgctgttctcaggtatctgtgatgtggcctgctgtgtccttattctttctccttccttttactcccctcagtgggtttctgtccctggtaaccccatatgcttctgctgctgttaagtcacttcagtcgtgtccaactctgtacgaccccatagccggcagcccaccaggctcccccgttcctgggattctccaggcaagaacattggagtgggttgccatttctttctccagtgcatgaaagtgacaagtgaaagtgaagtcgctcagttgtgtccgactcttagcgaccccatggactacagcctatcaggctcctccgtccatggggttttccaggcaagagtacgggagtggggtgccattgccttctccatttggttagtagaaactttggagaaacaaatggggcaaggataaaaatagaaatggggtaaggagaataagcaaaatagtgcaatattgtagaaagaatgaggatagtaagttagagtaagttagagctctgtcccaaaatagctcggtgaccttatccaaggtacttgacactagcaggttggtctaaaatgggaatggtgcagtcccataggcatggtgtaatgaaagttagattacacttacagaaatgctttgaaaggtaaaggggcatgtcagtgaggggctagcaagttttgagatgtttgccctcagagacaagaggtaggacagaagagaggccgagttataaaatatgcctgaacgaccgagctttttggtatttgacttaactctcaatagactatttcttgggcctcccatgtggcggtagcagtaaagaacccacctgccaataaaagagacataagagatgcgggttcaatccctgagtaaggaagatcccctagaggagggcatggtaacctactccatggagatatgggtcacagaggagcctggaaggctacagtccataggattgcagagtcggacacactgaagtgaccgagcactcacacacgcaaactatttcttcccttctgtcaatttttaattttcacagcttaatttttcttttgctagttattacttcgttcttagaacttctaaatttttgttgcctaaattgtctgatagggttttttgatacacatttttaggtatagttcatttttttcccattaatttctgtagcgaatatgggtaaccattctgtgtattatgagttaatgataaagttactgtttttctttgggttcagtgaggagcaaggattgggtcatgcgtgcaaaggatttagcttgttggtttccttcttatcctcagttggcacatcctaaaatcgttttgttgtctcccactcagtgggcttgccagacagtgggaaaggtttacgattggaatcggaagggtgtccagagttcatgactgaggaaaattggccctgcagtgaacatacttagcctggcacagacaggattttcccatccttccttattactctataagataactttccattgacacagttgggtaattaagaaagagtaaaataaaaggatgattgggttggtagtaggtagaaggtgtacaaagtctttcctgtcatttatatacatatttacacttagtgtgataatttttcccatctggaagtactgttacctttcctaatatatttgggcatgaatatcattcctttcttggagccacataaattcagtttatatcagaagcaacattgggatttttgatagatttttttccctatgccattttcccttgcattccagattgttttctgttgctttagcagaaaaggaagatcaccaactgctgttcctggatctgacattggaccacaagtttcttgagtcattagcagcttttatggagttttctcattgccaagtatttaaaatttctttaagaggtattaagtttattatgtccagtgaagtatgagtggactatgcacacagcttctttttaaagactttctggcaagttgattagagtttatagaatgaagtgtagtggaaaatcagttattttcagagggtgcctttttttggttagtgttatgagcaaaaagtgaaaatacttaaggatcatagataaagttctgtaatagggcactggaagaggatcgctgactcgttcttttttcagaacacattaactacagtaacttgatggagggctattaagtatttaactgctgctggaagatattagatgcttatcaacattgtgactgagtattgtttcatttaaccgtctgtccatgggttaatatagtatatgattggctcctataaacaaggaaaaaaaactactgaccatttgtcatcattgtgtaacagggcagcttcctaatttccctctcaaagaatcaattctccatagacttccaatcatcttcccagtgtgatgcttttgaaggcaatggcagcccaccccagtgttcttgcctggagaatcccagggatgggggagcctggtgggctgctgtctgtggggtcgcacagagttggacacgactgaagtgacttaacagcagcagcagccttgtggtatgtttttataaagtatcacttaagtactgattcattgatttattcagtaagtcttttcccttttctctgtagtctaaaatgttggtatctttatatccaattgtgccagctattaacttactagttcgtgtggaaacaagtgcaagggactttcagtgcaagggacacactttcaggtgtcccttcccatattgaaattcagttaattttccagcaacagtatgtaataacacatacaaagtgttgccaactgaagatatttacctgagccttggtgtactggaattttttggggggtcatgttgtgcccctgtgactggtctcagttgctctgactttaccctactcctcccaaagctccaccttccccctcccccagcaaaaacaagtattcaccctaaatcacaaaagttagggaaaaaagtttaaaaaggtaacaaaagttaggaaacctcttctagggtaaagttttctggtaaactgtatagcatagcccatggctgcaggcatacagagagagatgatcatgccaagacagtgtggcttaagacctcagacagacagttcagttcagttcagtccctcagtcgtgttcgactttttgtgaccctgtggactgcagcatgccaggccttcctgtccatcaccagctcccggagtttactcaaactcatgtccattgagtcgatgatgccatccaaccatctcatcctctgtcgtccccttctcctgccctcaatctttcccagcatcagggtcttttcaaatgagtcagttcttcgtgtcaggtggccaaagtattagagtttcagcttcaacatcagtcattccaatgaatacccaggactgatctcctttaggacagactggttgggtctccttgcagtccaaaggactctcaagagtcttctccaacaccacagttcaaaagcatcaattcttcagtgctcagctttcttcacagtccaactctcacatccatacatgactactggaaaagccatagccttgactagatggacttttgttggcaaagtaatgtctctgctttttaagatactgtctaggttagtcataactttcctcccaaggagtaagtgtcttttaatttcatggctgcaagcatgatctgcagtgattttggagcctcccaaaataaagtctgtcactgtttccctatctatttgccatgaagtgatgggactggatgccatgatcttagttttctgaatgttgagctttaagccaactttttcactctcctctttcactttcatcaagaggctctttagttcttcactttctgccataagggtggtatcatctgcattaagcacactgtgccaagggctcagaggttatctcctagaagccagtgaaaatcaatccagcagacagacctgcctttgaaatgtgcagggtttgagcaacccaggcctgctgagttaagtctctcctgcctgcaggtctagtaatattttatttgatgatcaccattgtgagtattacactattgtatctttggattttgttaccttaatttactcagggatcagattgattcttttgatgttgttttaatttttttgtgagagtagatcttgagtagtcttcctgtaggccttgtttattctccagaatgaagtctctactgaataaagcaggtgttggatgaagtttttccgctcgggcaggttggatcttgattgtttcccagtcttttgtgagctctgaaagctgttttgcttatagcttcccagtagatgttttttttccttgtagtcatactttggtagctagtctttgctcagcccgacagagtttgattctctgcatttgtgtattaactaaagactcaaggagatctataaggacattttctgggtttattattattattgcatagctccttcctttcctttactctgtcctacatattctacccacctgattatccccatattccaaactttccttctcagctcattgaggctctactctgcctaggctgcccctctctgtctcacagtctggaagatacttctaggcagaactcttaggtggttatatttctcatctcatttgatcctcttccttcaggaatcacagtcccaaattgcttattgtttattgactgaaaactgttgtttcatatattttgtctaattttctagttaattacaatgggagagataatgtagtaccagttcctctgcatgattgaaaatgaacttttttctaatgttcagttcagttcagtcacacagttgtgtccgactctttgcgaccccatgaatcgcagcacaccaggcctccctgtccatcaccaactcctggagttcactcagactcatgtccatcgagtctgtgatgccatccagccatctcatcccctgtcatccccttctcctcctgcccccaatccctcccagcatcacagtcttttccaatgaaccgactcttcacatgaggtggccaaagtactggagtttcagctttagcatcattccttccaaagaaatcccagggctgatctccttcagaatggactggttggatctccttgcagtccaagggactctcaagagtcttctccaacaccacagttcaaaagcatcaattctttggcgctcagccttcttcacagtccaactctcacatccatacatgaccacaggaaaaagcatagccttgactagatggaccttagtcggcaaagtaatgtctctgcttttgaatatactctctaggttggtcataacttttcttccaaggagtaagcgtcttttaatttcatggctgcagtcaccatctgcagtgattttggagcccaaaaaataaagtctgacactgtttccactgtttccccatctatttgccatgaagtgatgggaccggatgccatgattttcattttctgaatgttgagctttaagccaactttttccctctcctctttcactttcatcaagaggctttttaactcctcttcactttctgccataagggtggtgtcatctgcaaatctgaggttattgatatttctcccggcaatcttgataccagcttgtgtttcttccagtccagcgtttctcatgatgtactctgcatagaagttaaataagcaggctgacaatatacagccttgacgtactccttttcctatttggacccagtctgttgttccatgtccagttctaactgttgcttcctgacttgcacacagatttctcaagaggcaggtcaggtggtctggtattcccatctctttcagaattgtccacagtttattgtgatccacacagtcaaaggctttggcatagtcagtaaagcagaagtagatgtttttctggaactctcttgctttttccatgatccagcggctgttggcaatttgatctctggttcctctgccttttctaaaaccagcttgaacatcaaggagttcacggttcacgtattgctgaagcctggcttggagaattttgagcattactttttctaatgtagtgtttatgtaatagttaagatcaggagttgatgcagatgtcaagtttagtctccagcttttactatcttttgatctttggcaacttgttaacatctctctgacttggttgtcttatctgcagaatagacatagtcgtatctaagtcacagggttttatgagcattatttttgatagtgcaagtaaaatgcttagtatagctcctgacacatgttaaagctcattctatgatgatgatgatagtgatggtagtggtattcagctgtatttgcgccattaagtgagggtgttacatgggaagaaaatgctgttaggttagaaattcaagatattgagtttcttgtggcagttaattgtccctgaagtgcgataggatcaaggagaacatggacattttccatccctctgcttgcagaactgtcgagaagttacagaaaaatgcattaatgatttgtaggtatggtagtcacatgagttgatgcttgttctgaaactactcgtatagggatgcagaattcctgaagaaaattaacctgattacatctttttctaagctgattatatctttaatgttttatttcttaggctgtgtgataaggtgtgtttattatatttgtcttcatttggtacaactgatatgattcataattataaaaacttgtcttaccccttcacataatcttgacatgcttttttaaaaagctatagaattaaacacacaaagtgcagtatgatgggtaagataggtctcacttaggtcaagttttaaaatatgggcagaacattaccatgtatttataatgaatgtgggtttgtgtgtatgtgtgtgtttcactgtgtgtgtgtgtgtgtgtgtgtgtgtgtgtgcatgaaaacactgaaagaaaacagcggtttcaagaaagcactttctttctaaggagagaattgggtgtgagggagaacaggtaggggtagaaaaaagccttgaattgaatccctgatgctttgtttctgacaagaattgaatcagatattggaatgacatctaaagatctgaatggtgcttacaccagaatttgttacagtctttgttcgatatttatcttaaaaacaaatataataacaacagtgttcaagttggaactaaaactctgcttcagtgtcttagtttatgttttatcaagactttggggaatgtttccaggaatatgattacaaaactagatatcgtcttactgcgggacaattgcagaatataaggttaggctttgaggccagaaatattgctccatctgtgtatatacttgcagaagttattgttaggataaaatttgttaggtaagtgtacctcagtgtgaattttcggtattggagtacagggactcagtcctgggctggtccatgcgctccatctaatctcctctcctctgagcagttagaatcttcagactccgagttggtgtctcactcctaggatgtagtctgtacaacttaaagggacatatgaaaccccccaactccctgcgtgcttgtgtggttcggtcatgtctgactctttgcaaccgcatggactgtagcctgccaggcttatctgtccatggaattctccaggcaagaatactggagtgggttgccattcccttctccatccaattccattgcttctcctaaacatcatctactgttttttttttttttttttttttttgccatccagccacactttgcttgttttcttcttcttctttttttggttatctcttagatttcctgttcattccctggcttgacatgtgactacttcatctatttccacttaatttcccccttcatctgtaatttcttctctgtttctctcagttttcttggctgactcccttatacatgcctcaggtctttatgtatgtatgtgtgtatgtacctatgtatctatccatttgggtttccctgatggctcaatggtaaagaatgtgcctgcaattcaggagactcaggagatgcaggtttgatccctcggtcgggaagatcccctggaagagggtgtggcaacccattccagtattcttgcctggaaaatcccatggacagaggagcctggtgggttacagtctgtgaggttgcaaagagtcagacatgacttagcgattgagcatgcacacacgtctatctgctatctatctgtctaccttctttaatttcttgcctccctccctccctccttccatctctctcatctgtctgctttctataattccccaagattaatgctcaccttctgactgttattactttcttattcatcttccagcttagattttaaactccactaaggagagaccatgtttgttttccttttccagcacctctgtagtatgtatgtagcgtctggtgtaacgtagccactaaataaatatttgttgaatgaatacatcaatgaagtacagtttgagcttttggctttcatattctcactagatatttaaagttctttaatggaaagtactgcattttaataaagtatttgtgaatattttatgactattttcataaaatattaagagcatttggagtcaaaggtatattttaaagtcagagaagtaatattagaatctgtgggcattaaaataggttaattttcttttaaaaattgatttttaaattttctaacaactagcacatggtttggaaaaaaaaatcaaagaagagtgagtgtttcaaatgaaaatcagcattcatcagctttgtgttgtttctaatcctgtgatattaatagattaaaatttcagtaagattcaccttcaagaagaaatagatatatatgtatgtacatcagaagactgcagtgttctcagaaatgtgactacagttgttcagttgaaggtatgatgggaataaacagttcatactgaagggactttttaagccttgatttgtttttttttttttttttaatggcatatgaagggcacagtgcctcttccagtgttagcttgtgtttcctttaaccttcttcttcaaaggcccatcctaaaaaagattcagccctggttttttttgccctcctctctttcaaagacagtatctcaaaaatggtactaatttaagccctgctaaatgtccagatgcagcacctgggaaaaatgaagttcagaagttcaggatttggaacttgcttaagctaggagaatcttcttgctgtggttgcatgtctggttctagaagctggtaacctctttctcgtgggcatcgttccattgtaacagatggccccaagtgtggacgtgtcagagagtgaagcccaggtgtgaacttgtccaagaagttgaaacactgctcagaatatctctcctgccaatgatagctttgttgttgcaattagaactttctggattggaagagtgaacttaatgaaacataagagaagcctttagagctctgttgtccaatatggtagcccaggccacacatgactcttgagcacttgacatgtgactatttcaagctgaggtgttctccgagtataaaatccacacctgtttttgtaaacaaaaacataaaaacatgtaaaatatcacagtagtaatttatatttttgattgatgttgaagtactctttggggcacactaggtgaaataagataaaattaatttcacctgcttttttttaaaatatggtgactagaaaattttaatttacatatgtggctcactttatatttctgtttggcagtactgtttgggctagactcttaaccagggatgtacatgaaacttgattccatttatactttgacatgactgtttagtttgatatatgtcagttcagatctggaatgaaaatcttggactttctacatttgtttcttcataacttgcagtttaaatggagcagtaaaagcaggagtaggatttttttttcagttgtacaagaaatttctagagactaagagctttgcagagctaaaaattcattcccattgttttatttttaagctctattttaagttcctgccaggacgaaaatgttcattcccttttgggttctgatggcctggtaaaaacttctttgtaaacccaagggatgtgatggaattggcacaggagaaaattaatttggttgggatccatgagtggaatggaggtaatgtgcacggcttgcggagtccatcgtcatcaatcactgcagagcccctgcagcaacgccgggctgcctagcacccggccccttggacagcagcagggcaagatacccgctttcccgaagagccctactcttgtgccgtagagaaaagtgttaacgtagagtatgtgcacaatgatgagccacacatatacacattcaataaagttgcttggcatctattcctgtgtgggtgcatttttctggaaaaatgttaaatggagttttccataactttttttttctctcctaaagtgtgcattgtaggatattttccaacaccacatgtttccagtaacttaagctcaaagctcatagcaatgaggcactttcttgtcaaaagtgagtcaaaaacaggaaccttttaattctgtcacatgatgccggatgttataaaacagtaagagcaaggagttcacttttcccccttctcaatcctcagagttttagctgcttgccttcttcaccattgaggaagccaggaattcagaagtgtgggtcggatattctccgtagaaaatgcatttaggagcgtacactttaactggattataaatagtatctgccctgacaatgctgggattttctcagcttctggagacattgaagtctttgtttcatgggtcactgctctctcccccaccccctaagcttgagtcataaagcttgacaaattaatgaggttgctgaaacttcaaatctagtgggtaggacgtatgggaaacaaggagagacggcagcaaccatacacttggcctcaagatggcttctctcttgctgtcctgaacttgctcgctttgccttttattgcttcaggcccttgaatttattgtttcccttcaacaggatcaacttagattgaaaaaattagaaaaaaagtgtcaataggtagcagcaagactaatattagctcctgaattctctatttagaatagaaaagaaaaaaaaaaatctatccatgaaagaagtacaagccagattgctttgatcttgtgtgtgtgtttgtattagctatggaactaagaatggtttttacagtgagtacttgttctcaaccacttaagggaaaacaaaacaaaaaaataggcaacacgaagtctaaaattactagtgactcttggtttacaatgtgtttgctgtgtaacacttgatactgggtatataatcaatcaaattatatatatataatcaatcaaaagccaatataaaaattcctttcttgggttgtgtcagttcaccgaaaagatatttcttgagtatttgtttcattcctagcactgtcctagatactggggaaataaagtttaaaaaaagagagacattgctaccttcacagagcttaccttcctatggagaaaaaaaaaagactaaacactaaccaaatctaatggaaataagaaactggacaacggagtctcaggaagagaaaacagctaagtgaggtggagagtaacagagcagcttctatgcgtctcagcctctgttcttccttccccagactgtgctgcaaaacagtgacaaagttatttcccagattttgaattcacccccgacccactgacataaaacattctttgcttgtccctgtgatttccttactagtctgttttatttcttttcaaaagtctctttttgccccagatgaaattgattattcagctcaggcgtattgagtcctaaattaggttgatgttcacaggaagtacttacgttcattctgctttttcagtcagcttttctgcaccctcctacttaagggtagttgcttgtatgctccatacagttctgttttgaaccttagtcttacatgcttttttctcccctcttctggagaggtttatgattattttatttctgttagcatcagggtctttctccagatctgatgttccctcaaaagcctgcatgttgtgatctgcaccaaagtgagttattggccagtgtttgctcatatcctttattttgaatctttcctgttgttggaatcattcataacactacctgatcattaatcctctgctctgaggatatgagtatgatttttttttctggttccaaagatgcactccagctttgcattttggttggcaaaatgaccagagcttggacaaaaggccaggagtgacacacaaacacaggcctgaaatgatcatattacagaacagttaccacgttcgtgtgaatggctaagcaaaggtcaaaaatatgagcaacattatttatggctcagagagtgatttgatattcaaagtctgtcatcatttttcagaagaatggtattagcaaaactgtgccaggctaaggactctctaaaaaatgatttgagacaagctcagtatacagtaaaaaaaaaaaaaaaagacagtttaggtgtatcccaggagacaagaactctgcacctgatgtggaagtagttctgttatcctgctgttgttgtcaggtttgtttgcctcttgacaaagaatttttccttcttccagatcagttttgtcacctttagccagggcagttcttacaggatgaagttagcacctgtggcttgcatggacagtgctgggttatgagaacttactgcagttgcttgctgtaagatgtgttctagttatcagtttattgtctctgaggtcgactttcaccctttattgcctgctgtgtgaaaatggatctggactctgcagatgtttttcttttgccagttggcatgatgttcagctttgtcaggagagggcgctggagagacgttgcaaggtgaaggagttttcctttctgcagcaggtgtgtctgctcatcacagtgtctctggtgggccacctctctgtgaatagtcttcccaggcactccagaggatggagttcaataagttctgtaagtgtaggaccacagtgaattccttcccatgctgagagctcctggatctcatccctggggaggaggaccctgagccctaagggtcgtgacggctccttatgtctgctattcctatattagagtttacttcttattagctaattctctgtgatagttaataattcctttcttcattcaaatttctctggtttgtctcctgattggatcctggctaatacagtgttctatcatcagaattaggtttcattcttgcactgcatgaagcaggtaggtaggagagtctaatgaatttgtacaaaggagcatgaaatctgaatgttataagctattgttactttctctgtgttcttctgattgaatgaccaaatcttaggaaaaactgaaagtctgcaattatctgtggtcaaagtggaggctgctggtgccaatgtgtgctctcagtcgtgtccaactctttgcgaccctgtgaactgtagggtgctgatgatcctagagttaaaaatccacacaaggctttgttggacctgttggccattccgctttgtgtgggagcttcaggatatgtgaacaaggctgctgtgggacccagtggtgagtggtttaattcagtgcctggggattgtctaccgagctgtaatatctacatggataatcagaggtctgcttccttctacccttgtatcatgtgatagggttgcaagcggttcccattttctgagtgaatgctgcatcagtgtgatatgagcaagagtacagctcaggggaaaaaaaaggactagaatgaggtgccattgaggattattgggtctgatttcttccatttttggatgaggaagctgaccacaggtgaggttaaatgccttcctgtcaagagtgtgcactgagacagcaggggaatacaccaagacagattttttttttaacttctagtcagttgttttcccccaactccaatttatttactttcagatctctaatgatttttctttttttaaataattactttataattgaagtacagttaatttacaatgttgtgttcaagtgtactgcaaagtgattcagttatttatatatatatacatatgcattcaggttattttccactaatgggttagtaaaatatttaatatagttccctgtgctatatagtaggtccttgttgtttatctgtttcatatatatagtagtgtgtatatgttaatcccacattccagatttatcttctcctctccctcctctattccctttggtaaccatcagtttgtgttctgtgtctgtgagtctatttcttttttgtaaataaattcatttgtagcatttatttttagattctacatctgagtgatatgtgatatttttctttgatttatttcacttaatatgttaatcgctagcttcatccatgttgctatagatggtattatatcattcttcaaattatttattttcttatatttgaacttaagatttctaaagcatgggaaaatatagagtgcttcattaaagaatatttgagtctaaatacattaaaaggataaagcagaagatgccttaaggaggtacatcttcttttgataaaaaatattttattgaagtgtaatgtatgtagagaaaagcatacttactttaagtgtatagaatgatggcttttttttggtaaattgaactcctgttatccagctctcaggtcaattaatcagatgatccacagatgctcccttcttgtaccctttagtcatcaccccgccctatagtagccaccaccctgattcataactgcacagattaattttgcagttttgtgctttatagaaatggattcagtcatatttaggcacttgcctgtgcctggcctttattcatcatgattatgtttgagaaattcatctgggctactgtgcatagttagagttggtttttttcatgattatatggtattccttcaaatacatttttttttttttttgaggtttacccattctcccgttaatgggcatttagggagttttttggtttggggcatttacaagtatgaacatttgtcttcattattatcttttaatgttttgacataagaagatagagaagtgtgaggtttagggcaaaagcttgaaattagacaaacatactaactttgatcctagtcaagttatttacatccttaagtctgtctccttatttgtaatgaccatcgtgactagtgtttcagaattttggaaaaaaattgtgtgaaatgatggatgctctacacagtgcttggtatataataagctctcaaagaatagaagttgttagtatttttcaagttaatgttttttaaattgtaacaaagcatcaagataattcactgtctgcattctgttgcttgtgcatcatgtttttcagagcttgcgcttgtttgtttgcatcttctttatcttctctcttcctttctccacgctatatgcattgcctgcctgttataatccaggtgtaggggcagggattgaagaagagtttttagcagatttcattcttgagttatcgtctcagtttttgccattgtaggctcaccattagaataacatttgcttttttttttttttgctctgcccaaagatgcaaaatccttgcaataagaggtttgtatgcctgagcctcagtgacctggaggaaatgagaaatcaacagtttccttctgtagttcaataaccatttactcttcctgccagatgatatgatagaaacgctgtggatcttgaaggcaactgtcttgaatcccacctctagaaaattcctgttaggagtaccgtcaggattgttctcgccttcatttataattggcccaaaggtagagtctacttgcctggatgcctcgtcagtgagtactgactttgggtttagcctcaaataggctttcctctggaatgtactaatccaatgtttagttggacttgggggacaatcattaactcatcctgatttaaggaagctttgtgaatgactagaaatttcaggattatgtttatatagtttcaaaggtcatatttttagacaaaggataatttaagaagattggctagtatccctcatcaatcttaagctattttaatgaaaacaggaaaggacagcctgtttacttcttaggagtgtcatacatctgttttgtttataaattatatttaatcctattttatttagattatatgtatgtatatatgataattttcaaataggtaatgttaacaaacttaaaataggttaaggaaaatatttgtggcccaatgtttttttggctaaatgttttgtttatcattttagtagcatttttaaaacctctttatactagtttggacaataaatatgtttctgtaaagctgcagatacaaatatagaagataaatatataaagacaatattttataaatggatttaatgtaaaatcaccatcttatttaaatacacgaaatacatctcattataatcattctacataatataggatctgttataaagtgaacaatctttctaatttttgtgcttaaatcttgggataattttaagtgaggtgtagtcagcgttttaatgtattcttggagttagatattatgagcaacatggacttgttaattttatttctagatagttgaaataagtatctgacagaaatgtattaagaagcagaacaattatttttctctatcagctgaaaagcaaatgcattattagcatctgaattgaatgctggaatctccaacatacatgtatgtctatctgtgtgttttgtgatctgagtcttgctactgaaagtataatccatggattagagtggttcatgaactgcatgtcagacatcagtgaactgtgaacaggtattgagtgttcaaaaacctttatagcaattggagagagtgattttaggtctcttgcttctcatacggatttgggcttgtgtatttgtgtgtgtgtgtgttttgtttttcatttgtcttagaattcaattttattgtagtttacaaaagtattggtctgtgttggatttgaaataaaaaaaaaaaaacagataaagtgatgcaaaccacaaattgcaaatggtttgagaaacattggtgagaaacctccatgagaggtttctaccaaggcagaaaggtggtataatttctaatctttaaaaaattaattaattaattttaattggaggctgattacaatattatggtggtttttgccatacattgacatgaatcagccacaggtatacctatgtcccccatctcaagccccctttccaccaccctccccatcccatccctctgggttgcccagtatactggctttcagtgccctgtttcatgcattgaacttggactggtcatctatttcacatatggtaatatacatgtttcaatgctattctctcaaatcatcccaccctcgccttctcccacagagtccaaaagtctgttctttatatctgtgtcttttttgctgtcttgcatatagcgtcatcgttaccatctttctaaattccatatgtatgtgttaatatactgtattggtgtttttctttctgacttacttcactctgtataataggctccagtttcatccaccttattagaactgattcaaatgtgttctttttaatagctgagtaatattacattgtgtatgtgccacagctttcatatccattagtcttccagtgtacatctaggttgcttccatgtcctagctattgtaagcagtgctgtgatgaacattggagtacacgtgtctctttcagttctggtttccttgttgtgtatgcccagcagtgggattactgggtcatatggcagttttatttccagttttttaaggaatctccacactgttctccatagtggctgtactagtttgtgtttccaccaacagtgtacgagggttcccttttctccacaccctctccagcatttattatttgtagactttttgatagtagccattctcactggcgtgagatggtacctcactgtagttttgatttgcatttctctgataatgagtgatgttgagcatcttttcatatgtttgttagctctctgtatgtcttctttggagaaatgtctgtttatgtcttttccccactttttgattgggtagtttatttttctggtattgagctgcgtgaattgcttgtatatttttgttattaatactttgtcagttgcttcatttgctattattttttcccattctgaaggctgtcttttcaccttgcttatagtttccttcgttgtgcaaaagctaagtttacttaggtcccatttgtttatttttgcttttatttccattactctgggaggtgggtcatagaggatcttgctgtgatttatgtcagagtgttttgcctatgttttactctaggagtattatagtttctggtcttacatttagatctttaatccattttgagtttatttttgtgtaaggagttagaaagtgttcattcttttacaggtgattgaccagtttccccagcaccacttgttaaagagactgtcttttctccattgtatattttcttacataggcatgatttaggacatggaatgctgagctcttgttgcatcaagcttttctaatccctagttaaccatatcccctaacatttccaatgtagctgttctctctgtttaattgtaatgttttgagcctctgattttttagagtgatttgcaaagaagtatttatttctttgcaaataaattcaataaatttatttgcaagtaaattctttggacttagtttgcaactaagtccgaaaaatttaatcattcattcagacactttttatttattgaacatttaactgtggaccagatactgttctaagcattgggaattcatcagtaacaaaacaaaatggaacaaaacaaaaaacaatttctgttctcttctagcttatatgaaaagaattggaatatatcaatatatgtgtacacatttgtatacacacacagacacgtatgaactgcaaggcggttgattgtgtccaagtgcacccagttccccttgggctatgactgcatgcattcctctactctatggatattaaggtcactattgatgtagttttgtgtttgaaccctgtgactaccagaaagtccccaggggacacatgtatttggcttctctcagggctcttggtgcttgagcatgacctccccaaattggtgaggataatgaagcaagcaaagcctcagagcctggaggaaccttggtgcccattgtcctgaaatgctgtccgcctttgggatgtcattaaatatagagtttttccaagctgtttctttgtttcagctggaggaactacgatctcctgtaaaatgttgttcagatccttggagtctaagacagagatgtcagctttctgaaattaggacaggtgtctagggtatatgtactttttgggatgaggtcttctagctttcttcagcttatacaagtaattcatgaccctcaaagctgaagaatcatggatatccagtggccaagagccttttgcagtttggatcctgttatttcatctggttgtgtctcttcttttctcccttagtcttttcctgcagtgactagacctgcttcctcactgtggctccagtgtggcctggccccacctgagatgcttgacctccaaccatccacagagctcatctcctctcctcctttaagcttttgccctattgttacactctgggcttaccctgactaccgttcaaaataacatccctctcctgtccctatcttggtccttagtgctttatttttatcctggcagttgctgtctttaacagatgttgctgtctttagtgtcttagatgacttggttatttactagctttattgtccctatgccctttctcacccaaatgttgcatagaagtagaaacttttgtctccttgttcacggttgtatagtgacttccctgggggctcggacggtaaaacatctgtgtacaatgcaggagacccaggttcgatacctgggtcgggaagatcccctggagaaggaaacagcaacccactctagtactcttgcctggaaaatcccatggatggaagagcctagtaggctacagttcagttcagttcagttcagtcgctcagttgtgttctgactctttgcaaccccatgaactgcagcatgccaggcctccctgtccatcaccaacttccggattttacccaaactcatgtccattgagtcggtgatgccatccaaccatctcatcctctgtcgtccccttctcttcctgccctcaaactttcccagcatcagggtcttatcaaatgagtcagctctttgcatcaggaggccaaagtattggaatttcagcttcaacagcagtccttccaatgaacacccaggactgatctcctttattatgggctggttggatctccttgcagtccaagggactctcaagagtcttctccaacactacagttcagaagcatcaattcttcagtgctcagctttctttatagtccaactcacatccatgcagttcatggggtcccaaagagtcggacacaactgagcaacttcactttctttctttcactgttgtatccctggtgcttcaaacagtatctaacacatagtgtgtgttcagtgtatatttggtatacattgaataatatgatgaataaatatggaatctgattcttcctttcaaagtatacaacatggagtttcagttcttccagtttagctgagattccttgtgttgctctatgtgtatttcagtcctgttggttgtggtttcatgaatctcagttcttacgttgccatatattaactttcagtgttttcaatattttatttttctttccatgtgtcagttattcccatgaggcagttttgtctttttcttactgattttcactgtttgttgaatcttattttatgctggaccctccaagtgttcatggttaagaccttagacaagctagagaggccagcaatctctgtctctcagtttcttcatccgtataatgggaataacaataatatctaaccttttaagattgctgtgaggatgaaataagatgatccttgtaaaatggaaaacactgtgtctggcataactattgattgcattaattctgataacagtgtaagtatattatggctcagcataatgtctgcatgtggcaggaacaaagtaaatgacagttcttaaagttattatgtttttccctcccattgttaccaccactaatccactaatgatgcagtcccagacaatcatcaaagagcagagcattaacgttctagagaaggttaaaggttgtcctcccttctctttttctctttttcttcctctttattttctatacactgtttgcctacgctttccatgtgatggaagagctttcaggtttgaaatttattcttcactatgcaaatctgatcttggttgtcaccatgataacagtactcagtctttttttggttgacattctatttgaatggatagtaataggtccttgagatgtatttccacatacgtatttcacaacagttggactttctggcaatggtttcattttttttttctcttggagggcatttcaaggagctgccttgtaaactctgaatgcctgggttatttgcgttgtgtcttttcatcctcaatgccgagttaataaaactccctagattcgattcttacaagtaatcaaccagcaaatgtttattaagtttatatatggaagacttttgtagctgcagattggcatggtgaaaggtgagctttaggaagatcagtctgggggctgtgtatgtaagtggtggtggggatgttgcaaatccagtggagaagggaggaaggggctatattgtgggaaatggtgagaaccaaaagtgtagcagtgaccttgggagtggaagaggaggtggtgctctgggcgtgtgtatttctgctttcttaggtaccaccaacaccctcccagggcagttgccccaactttcatttctaccagcaggggctaagagttctcagtggcccctgttcttgccaacacttagttactattgctgcataacaaatcatagtaaaacacagtggttgaaaataataactatcatctcattatctgtcatggtttctgtgggtcaggcattcaagggggctgtcctgggatgtcctggctctggacctctcatcagcttgcagacagatggtggctgccagactttctgaaggaggaaaccattggtggtcagcgcatgtgtgaaagtgaaagtgttattcgctcagtggtgtctgattctttgtgaacccatggactggagcctgccaggctcctctggccatgggatttctttaagcaagaatactggcttgggttgccatttccttctccacggaatcttcctgacccagggattggacccaggtgtcccacattgcaccagattctggtggcatctgaaccaccatggaaaccccatcaatatataccttttctaacaatctcttaatctcaaggcatagggccagacaaaggtgagtcaagagatgaagttctgacactgccaaggaataaatgagcagttattgagtatcaaccgggcacagtcttatgcaaactgctctactatgatgaggttatttccttcagcatgatctttcctcagtttgcttcctagacaagcctttccttaagaactctatatttaaatacatgtccttctttatttccatcttgtagttgatctttagttgctaagtcgtgcctgagacttttatgaccccatagactgtagcccgccaggatcctctgtccaagggatttcttaggcaacaatactggcgtgggttgccatttccttctccaggaaatcttcctgacctggagatcaaacccgtgtctcttgccttggcaggcagaatctttaccactgagccatgagggaagccatttccatcttcattgctcaacttatcacctccatagcccttttttttctatttacactctgtgtgtagttgtttgcctatttattacctcacttgccttcctccactcctgagtgctagactgagggttcatgatgacaaggactctgcctctttcatatacatcacatatatccagtaaaacttgagtttcagatcaaaatgagtaatattttaatataaatctttccaaatatgggacatataaaaaatgtgagtatatctcaaatacttaaaaactatatctgtaaaaatgtatttctcaaatgtggaacatgctatactgaaatatgtctgttttatttgaaactcaaatttaatttgatatctggtagttttatatgctacctttggccactgaagtacttggtatttagcacagtttgtgacatataatagaagctcaaataaatgtttgagtcaatgaatgagcaaatgaaagagttcatatcttttttcaggaaaattttttccagatagatattattatttaaaaaaaataataaaagggaacccttctacgctgttggggggaatgtaaattgataacagccactatggagaacagtatgaaggtgccttaaaaagcaaaaagtagagctaccgcatgacccagcaatcctattccgaggcatatacctagagaaaactgaaatttaaaaagatacatgcaccccagtgttcgctgcagcactgtttacagtaaccagggcatggaagcaacctaaatgtccatcagcaaaggattgcacaaagatgtggtccatatatacaatggaatattactcagcaataaaaagaacaaaatcatgccatttacagcaacttggatggacctagagattttcatattgagtgaagtaagtcagagaaagacaaatattacatgatatcgcttatatatagaatcttaaaagaaaacccaggtacaaatggaacttaaaaacaagtagaagaacgaatgtaggaaacagacttatggttagcaagagatgacgattgagagaataaattgggagatgggaactgacatatacatactacatatataaaaatagataacaaataagaacctactatgtactctacttaataatctgtaatggtctgtatgggaaaagaatgtaaaaaagagtgaatatatgtataactgattcactttcctgtatgcctgaaagtaacacaacattgtaaaccaactatgctccagtaaaatttttttaaaaagaaaataggatttgtgtttgccttaattttttagtgtgctattgttgttgttcaattgctaagagtattgagtctgtactctcaggaggcactcaatatttgagtgaattacagcttagttctctgtgtggtgggatttttacatgtgactttaattttattcataaacattttaaacatttcttaccatgagccatttttattaaaaaaacattttcaaaacttggtaagtaactggaagaaaacctatagtgctggaatcctttatccacagttccaaaatttagaagtttctgagtattgaatgatttttttaaatctcatttagaagaattacctgacctgaaatgacacgagggtatttatagtctttattatctcacttaattgaatattcatattttctggcagaaatattagtacatttgattatgagccattgccctaatctctctagggatatcacactctgtatatactttaatgtgttacaaaatctagaaaattctgacatccaaaactcatcagtccccaggagttattctgaagaatgtttgtgtgtgtgtgtatatatacagatgtgtactgtgtatatagaaatttctgaaacgatacattgaatattgttaattgtgattatctctaagagaagggattggatggggatgacagtgaaagatgaatttatgcttgattatcttcttctttagtatttctaattataataacaaagtgattgcctttttcaatgaaagagtagaattgggtggaggttttatttaggaaggtagtggtattattcatgttaaaggctagtttatcaaacaggctatgcctttacaaattagttcagtatttctctctgctggcagggacccagaaaacgttatgcacacaccatgcagcctattgccttttggataatgtatacatggtctagtgacagagaatttacatcagcaaaaatactaattttgcttaaaaaaataaaatcaaggcactcaaaaatgtgatgagtaaatgaatctactgttattagtgatggttttggcacgttttacgaagtctgaacgattactcatcctctgtacgtttgcagaagtggcttcaacaaaagccagatgcatacgtactagcaggggtcagtaggtggatgagaggattaaaccccgtgagtttttggagccctggtttgtagctgtttttggcttgtcgacaggctactttactgagtcagcctataggatggcttcccagggtaagtctgattttgcttttctgagtttaaaatatacgtggtcaaggagagctgactcgttgccttttgcactggattgcttttgttaacagtgcctgtgtttctttctgtgagaaagacatttatcttattccagcatattctggtgttcctgctactggtttttatggctttacttcacctccctgtagtttttaaagtgaaatgtcttaagtgctgaaaggatttgcaaggggaattgcaaaggtcatatgtaagttctacggctggcgtatggagagcagtgtgattgaaccagagccctcagtgaccctttcttttcaagaggatgtttctaataaattagcgtagcatgctgtatgtgcctgtttatgaccttaaaaatggtttagttcttgctgagtggctattactgatgctttatgacatgttataatggtttcgacttgcacattttttttggattaaaacaatgtcatgcatcagtcaatgtgaagttcatttttcctttttttttcttttaaagggactcaggagaacattcaacattagaataagtccctggattctgacctcagagaagggttggttcttgaggttagaagaagtaaggattcgccaagctcttacaaatgagctttgtagtagttgctggtgaaattataaaacattgcttttcccactagatattaaatgccccttttcattagctgtagtatggggaacaaaagcatgtgatttttctttttttaaatgtttaactgtagctacttttaaaaggcagttttcattttgtggctggttattttttttgtttttttcttccggtatctagcacagttaaggactttatcttttttgtatctttttaggacactctggtgaatgatggggtctgaatagctctcttaatggaggagggtaccgacaagcctgggctggaggggctggaggagcccagttgcatctctgcccggcctgcttgtggctatattgcccatgtcccttcctctccagctctcgggctggaggaggtcactgtgatgtgaggactggggcatgtccagggctgagagcttttccgagtggcagagacatctctgtgggctcagaaggcgatgtgcctcaagatttctgtccattaatgtttagtacccatgaaggggaaaattgatctgctctacatataaccctttctcaagaaacactgatagataaaaaggagtaaaggggttggagttgattttttttttaaacatgcacattagagctttaaaaaaaatcaaagcatttatgttcttagtggaagtctgaaacctcgtgccaagggctgcatggggttggaggttaatatggcccatctttttcagagcatccatagttctcaaatatttgggatacaggcacaaaagcctcaataattcaattagtcagtaacttaagaactgtttcctgccgataaaagcaaggagatattagagagcagaatgtgagataaaatgtgaggctgcctggagacctctcccttgctgatgatggtgaactcagaccgttctcctaggccttccttccaggggcttgcaaggatctggctcaaaacgtgctttggtagaaaagttatggggttcacgtttgtccctttgtaaacgcagtctttccaagactgcttctatgggtattcaaggtgaattggtatgaggtttgaaaaaagcctgggggcgagctggaatatttaatccaccatgtcacacacacatgggtactttaaaaggaacaggaatcttgactagaggcttagctcactaccacctggaaatggctatcataataagacattggtcctttttcaatgagagagacagaaaagcatgaagtgtggtaaagactggcacctgagtatgtaaccctgtgacctttgccaatgttccctccctcccctggtgtggaacctgaatagtggtttagctaagtagtcaattaaaaaaaaattataattgttttattttaaaaatgttttatagataggagtaaaatcagtgatttcagagcacattatgtgtctggattatctcacctcttttgagttttgtcccttgttgccctcatttcttagtctttctcagcatctcatcaactgacaagatgcaaccccaaacagctttccacacctagttgcttgttagctaattcaacttaaatatatagaatgacatatatgtttcaatttgtgggaaagaaactcaagaaaatatatacatatacgtacacacacatatttgagcacagtctttgatgcacacacacagatatttaggtgtatctgtatctatctttatcttccccgtaatttactcaactcttaaatccatcatcacacacgcgcaaaataaaatcttaaaataaccttcctggaagaaataaagagggaaaattagtaggcagtcttcatgacattttaatatgtgtatttactacttagaaatattcaaatacagctttgttttgtatcattaattctggtggtacaatatttgaaaaggtgacagatacaagggcagaatgcaattcttaaagctgtaatttgcagccggctgataataacaagtccattttcttttccaaatgtgctatttatataatttatatttttaaccaatcttagaactaggtcaaaaatagtaattaatcttaagggtaagaaatgttgcaactatgccagatttggaaactttaagaaagtctctggatggctaagcccaatctattgagtattctaatttgcatgtaacacattgctcagcagatagtgcgtgctcagttaactttaaataattgagtcaacttggccacactttgttttttttttttaaagaaatgtacagagaggcctggcgtgctgcagttcatggggtcacaaagagtcgaacacgactgagtgactgaactgaactgaagcatatttagttaagaagtggcaggccagttttaaagcctagttaagataaacaggccaggcgaaacagtgcatgtggcaaggatagtggtgtttatatgtgcaaagagaaaagactgaaaggaagaacatcgaaatgtttacttttgatgatgaatgatttctattttttatacagtttttttgctttcatgtatttttccaaagtgagcacatgcatcctttgaaatgtagtcatttcatggcacatattaggccttacataataatttgttaaatgctgagttaatttataatgaaaatgatacacatcagatgtcagtgatgttgcctggagttgggcaacacgacagctttgaggaaaacttacattctagtgaaatcattttttctttctcgaataacatttagtatcccagtatgatttgctctaacaaaacatacacgtttctaaaaaagacttaaacaaacaaaaaccactagataatgggaaatcatacaatagatagtacagagtctgtaggggcccctatagtctataggtgcacaatactcaaaaacttcctcaagaacataaaggaaagataggaaccttagaaaaacagagttttacacttgctaaatggttaagcagcatgcaaatacaatacaacttctcaagctttgccttgaaaagacctagtatttttttgtgaagggagttgcgggaagggttgcagcttgtatactctagtgaagcggtataagtaggcttgtctgaaattgagtgggaagttgtagcaaagtactgggtggttgtggtctgtaatacacatggtaactgaagtagcaggcagatgtttgcagtatgtacatcttgtgtatttgtacactacttgattcagtagggtgtggttttctgtgttcacttactgttccttggtgaccaaaccaagttcatgtgggttatgctcaaattgccctctgatgtatcagtcatgtttgagcagatttgcattttcaaaatgagcatcgtaacagaactagctctatatgaaatagataaaatcaagttgcaccagttctaggcatgtcaagagcctactttggaacccaactgcccttttagcaccccagtgattccggggaccatcattgtgtggcctagagattgtgtgtccttttgttcgtgacctggaagagatataggacaatttgttgtttgttttttttttaattactttttttgtggaaacattttgttgtaccgttgtatccttccttggcttgtggctggtaggttcttcaacattcgcaaacttcagtcctattactagatagactatctggtaaagcaaatgaccttgaacttaacaggcacctcattccaggtcctcaccagggaatctaaccttgtacatgatgctactcaatgcttctcaaattgcttctgtgaaaaaccaacatttatggattaccatctgaaggatagaggttcatctgttactctgaatactctgaaacaatgaggaaggagggcagtgtcgttaaaaaagccatttcacaaggtaacttttagtttgatttgtcaaataacataaaagaaaagcatgatagttttatatttctcagaaagattcattggttataaagtaggtaagggcagtctactgtaatatctgtacctgaaataatctagactagcagaatctctaaacctgagaatttgtcctgcccccatttccccgtcaacctcagcagttagttttatttcacgacacttagtatttgatactcttaaccccccggaaggtcatcatgaggtataacccatgaatcctgattgtatggggtggttgtcttgtggatggatattccagtgtcttctttatgaagattcttggaagaagtgtctctctggtttttataccacaaatgactgtacttctactcaactttgggtttttgttttatggatacagttagtcatgtaactgatcatgtcttcttcctctttatggccacaggcatgttttctttaacccatactttttttttttaaccaaaagaaaaactagtttgccagaactggaaaatgagatttctcacaagtttgtttggatttccagcatttactgaaaaatcagatctggcagtcctgggatcacgtgtctccatggcaaccatgggatccaataaagtaatgccatttcccttacaacagagcaggcactcttacctttgttttacctccttactttaactgcccggcctgtgtagaccttggactctgcccggtagctttgaaagcaatttgtgacttacctttagaaaataggcaggctcctatttgccttttgggagctaatgtattcctagggtcatgtaattttttttttgaattttctttcatcttgttttcttcatccatgcacattagttttctgttgttttatattgtggggttgtgtgcttttatgtaagctgccttgagtctttgacggggggaagaaacaaggtataaataaagaaaaatagaagagtgactttccccctcagaacatcttatttttattttttgcctggtaagaatttaaaacaatttcagctcttttctgacctattttagaatttccttgattctagtaccattcagagctctgcagttccttgttagggttttgttttgctttagtagctcttcacagagactctgagaaagcattgtttttacctgattcattgacttcccatcatggtgcattaggaactgaaaattttctgttttgaaaatagattcatttgtatcattttttaagattccaaaaattccaaaatagaaacagattcacagacccagagaacaaacttatggtttccagggagaagtgttgtggggatagattgggagtttgggattgacatgtacacactgcaatatttaaaagagataagcaacaaggacctactggatagcacagagaactctgctcaatattctataatcacctaaatgggaaaaaaatttgcagaagaatagatacgggtaatgtataactgaatcactttgccgtacgcctgaaactaacacagcactgttaatcatcttaacttcagtataaaatttttttaaaaaagaactgaaaagttagctaagtcagaatatttgttcatgcagttctaagagggaagattaggccaccatgaaccttctagagtttatctgccaagtgcaaagaccctgagaaggtgccattcagcaccctgcctgtggcactgctgtgacttccggggacagggtcagagaagtcagtagtctttgctagtctggggaccttctgttctcaatctggctgttagatgttagtgtagcctgcatagtgttgaaaacaactctggaccaatcaaaatgtgtcattaatttttatactctctttagtgtttacatattcctttgaaaaatctggagacccaaacatatgggccagcattcaccctgcatggttgtacgtctagttcaccacaccctcccactacctcttgtctgggtgactctgacgatgaatgccatgtgcccagtgtctctccatttctctgtatgggactgttgttgcttaaagccatgtcagtgcaccaccctaactcatctgctgtttagcataaaccacgctgtggcatgttttcctgctgcggtagtcaccttcccaagccactcagctctttccatggcattcatgtttcgtgaattgaattgtgatcactgtctctcttctccccagtctcagaattgcaaacttcctcagcaagaatggtatgctattgctgctaagtcacctcagtcatgtccgactctgcgaccccatagacagcagcccaccaggctcccccatccctgggattctccaggcaggaacactggagtgggttgccatttccttttccaatgcatgaaagtgaaaagtgaaagtgaagtcgctcagtcgtgtctgagcctcagcaaccccatggactgcagcccaccaggctcctccgtccatgggattttccaggcaagagtgccggagtggggtgccattgccttctccggcaggaatggtaggggtgtacctaaaagtgtagttcaaaagatcactgtgtttgtgcacccaacacatttattgagcacctactgtgtgccaggtgctgttcctgtgctaggcatagagcagtgagtgaaatgggcgcagatacatacctactggagtttacatcctgttaggggtggtgataagtgctgtgaagaagaaagccaggaagagttcctgtttcatttggggctcataggctagagctcaattcttaggtcccttttaaatagagatatgaattcactcgctgaggagtgtagaccaaggggatagcagtgagagtaagatccccgaggaggagcatacttgcatttggtgttaggcatggtttttacttcagtgctgcgcttcctaatggtatgaattagggtcagttgcatttgcctctggactatatctgtgcattcatctctaaaatgcaagactctatatgaggttcacagacataaactactgtacataaaataaataagcaacaaggatttactgtatagcacaggagttatacccaataatggaatctcattttcacacacacacacacaaaatgaattgctatgctgtacacctgaaactaaatactagtattgtacatcagctacacttcaatagaaaaaatcagattaaaatgcaagtttccacatttaggaaggaacgtggcttcctcattagtctctccccaaggtcaagtctggtctttgactcttggtaaatgttgagtaaatatatatgcaattaacagatggacacataagtcattatagaaggatttgaaggatctcaaaagcatagtcttagctaagtgtatttcacaggctcacagattaatgacaatgaacatgaccagctctgaagcatatgtgctgagagtttctctttaatggtgactccacagtttttatgctcagcaagctgcatctacagagtaccactgaggaatatgtatgacggaggaaaggggcctgaactgtgtctgtgttgttgtagctgttactattcattggtatgtcctgactcctagaagagtctctgtgggcttataggaggaccttaaagaacatttgttaaagagtgaataaaatcaaagccggcatacattttcacttctttcataaagcagtgttggagtcacactgcattctgcctgttttcttcccaagaaagatacactaggtccagagaagatgagaaagaccacagcaatgtcaggatcagactgagctttaatgtcttacttgctttgcttgaactcatttatttacgttcttcatttgcagttgggaaatggaagcttagagctagtggcagatacagctagtgtgagtccagggcttgtgttcttactcatggaatgcatcgcttatagggaagaataactagcagatacagaaacagaggtatgaaaggaattcagttccactatattggcgttagtaactgatgacttttaatgctattggaagtttcatatatgacaggtttcagatggagagaggggtctgctttgtaactcacacttacctagtttgtgtatgcctcagagactgcgttcgtgcagtttctggaggattgatcaggttttctgaaagccgtgtgggaaccccttcctaacgtgaatccttgttttgttccactaacgtgtggataatttccaagtgtgacagttacatccctctttcttcatagcctatcagctttcgctatcacattcatatttaacgatgtgctagcaacactgtcctcttgtcagcctcgactcctcccttctgtccccagttcatgaacaaactcttctactttagtattattctagggcagttaggttttttactgcttatttccattttcagtggtgtgaaatgatttattacttttgtgcttttgaaggagaacagatttaaaggtggaaggaagcttggtgaatttctagccatctgttgagtttgggaaggaccactggaacccctctgttttgttttcctgtgtacgtgtgctttcaaatgaggggaaagttgtgatttttgtagcaggtgtcagcctcgatggcaaggggaagcagatatcctggccagctttctggggaagaggagaatggttgtgtattctcatgacttgatttttccagtgctgactgtatggcaatatcattctggcaaatattggctggccgtggaacatttttaagtgcaagggtttaataaatgttctgtctattaccatggctgaggaatcaaaacaaaatactcttcacacagttcctcgagcattcatggatgggttccagggtattgcttttacgttagctcctctatgtgtgaagaatctaaaataaaatattactgaaaacacattgattaagaagagtagggtataattttttgtaccatttcccttttctatacagtaatactgtgccaggaaaggtgatacagatgaactgcatgcagaaaggctttgccagaatttatgtcttcatactcttgttatggtaatgatagtgttgacaataatatgtaatgtctgtgtgtagctgttgataatctctgttctcacctaaggaaaaaaagctaacactggtaatattaaaaaccaaaacaaccccctccccccatttatcccaacagttgtcagattttgtttcccccctactctatagtgtgcttctcacgtatttatgtgattaatgagaatgagtaattgagtataagtgtataaggagtttataaggacaatattttactagtgactttttgcactggggctgtatttgggcagagattcttctgcagtgcttcatgtgtcttaagaatgtagcagattgtcccagacatgaatcagggagttcatttctgacactattttggaggagttctctgtgggagtctatgtttgcgtcaggctggggtgaaaatggcagtgctgatactgttaataataatggctacactgtattgaatgctcacacatattcattgtatcaagtacacaaggtgcattgttccatggattgtcttacaacacctgtgaagttggggctcctcttgtctccattttacagacaaaaaaactgaggcttagagcgatttgattatcccctggctgtacagctaatgagaggggacagaccttcattttgactctgttctttccttcctctctctcctctttttccttccctctctctttctctcccttttcccctccctccttctttctttctttctcattgcaggggactttataggcaaatcttgttttcttgtactttgatttattgcactttgcaaactatatatatatatatatatatatatatatatatgtataatatttttttgaacaaactgaaggattgcagcaaaccttcttcaaacaagtctatcagcactattttcccagtatcattttctcactttgtgtctatgtcacatttggtatttcttgcaatatttgaaccttttcactatttttatattcattatggtgatctttgatgttactattgcagaaagattttggctcactgaaggttcaggtggtagctagcattttttaacaatacaaaatttaaattgaggtttgtgtatatttttttagacataatactattgcacacttaatagactagcagagtgtaaacataactttggtatgcactgggaaaccagaaaattcatgtagcttgctttattgtgatatttgcctaattgcagttatttgaaaccaaacccatagtattgttgatgtctgcctgtatttgtatatttttattagtctataacataactttcgtatatatagtgttgtatttcagcttctgtatacactgcagtttgctcaccactaaatgtttagtttctatctgtcaccatactcttggccactttacccattttgcctctccctgtaccccatttttctctggtaaacactactctgttctctgcatgtatacatttgtttgatttggtttggagagacctagaggggtaagacaggggagggaggctcatcaaacacacacacacacacacacacacacacacacacacacacacacacacacacacacagagtctctctctctctaagatgtgaacccagttctttctcacacacacacacacacacacacacacacacacgagtctctctctctctaagatgtgaacccagttctttctgaccccagagcctggtcgggtagctcattctcaccacatccttcctagaaataggaaactcttacctggaatattttagcgatctgctacttatttccctgctttcttcctctttcctttttaggtctttttcctgccaccagccttctgatgcatgcacctcttcattgaagtcccccttccatccttcctttcctagtgaactcttttctggacttccatatcctgagctttcttctctgagttctcacaatgctttgttcctttattaatcaaaacactttgcagctaatagtcagctacttaagtattccaaggattcctaggcccccagcgttcagttttgtgtctgtgactttgtgaatgttttttcttaagactgtccatagttttcatatgagtctcagaaaaatatttgatcaaaaagttaagatattatttataggattctctgtcctcctctaagtaatgaccacctagaggggaggagcatatctgatttgtatttattttcttggatggctataatgatccttttttttctttcccccgagtacctggataaatgaatgtctgtaaaagtaggaccatggaggtatggcctggaggttaagaacagaggatctagagccagacagtgccttggattgaatttctcctctgcaaacagtctagccagtgatacagtcacctcaaaaacctcactcttctcattggtaaaagggacatcataatcgtgttgctgttagagggttgttcctgaggaatacctcaaggtatgctatgtaaagtgcctagctcaagagtactttgcatactacctgtaattagctgctattactattattactgaagaactttgacatggctagagtatgagtttctcttgatttttctagttactatcatggtgatattacaaaaatatttttcatgccactttgagttttcagagcttaaaatcagcatgctttctctagtcaaagtgacaggttcagctcagagaactccctgaaatgttgctcttgggcatttcctttccccctggcctcaactctggctgtttagtgtcttaggttcatgaagtgccagctaatggaaatttgtgatgtgggcactctgccccccgaggatttggacatatgcttctttgtgttttaatcaacagaaaaaagtgcagctctagccatccttctgcataatggttgcagtagcctttttccttgcatgttcttggaacccctgagtgccagacctgtcacttactgtcccctctgtgtgtctcaggtaaaagtccagtaggtcagatgaaaggcagagaccagcagggcataatcactagtctacgtatagcactgatgagtagctggacacagatcacggcttacatgttatttatagtagtgtggccatagggtcatgttggcaagaagcagcctttagaaaagtgctttagttggcccattaatggtcactaaatatagaaaaagtagttagtgaaatctctttacagaaaatgtattgtgagctgggtgcattgacatgaggaggaaaattgttgactcttattttctctttttttttttggaatgtatactttgtctttacatctctggtaactgtatgacctttagtgagttatttgcaaatactcttaaaaaaaaaaaagtcttaaaaagtatggtaactttattcacaatcaccaaaatctggagatggcccaaatgtcctttcacctggtaaaggacacgtaagccattgttcatccatacagtggaatattaacgtgcaaatagataccaatacctgccacagcatggattgagctcagatatacttgttaagggaaaggagtcagactcaaaagtctatgttttaaatgatcccatttatttgacattctggaaaagacaaagctgcaggaatggaacaataagtgtttttcgggggactggggttgggtgacgttctgactccagacgggcagcccaaggaatgtctgaagtgtaagtgcaatgggtcagtgtactctgtcctaatggctttaaaagctgtctggtaaacaccctgaaattttggtttatttatttgacgtttacgagttggagctcctttgtctcccgtctggcagagctgcttactttaaaatagttccttggcctcagcaatattgaacattgagggctggattgtctctactgtgggggctgtgtgggacccagtaaggtgtttaatagcatccctagtctctacgtactagatgctcataacacctgtcaccctagttttcaaaaaatctgtattgaatttgttacgatattgtttatgttttggtttttttggccgggagacatgtgggatcttaactcccaaccagggatggaacccctgccccctgtacttggaaggcgatgtcctaaccactggactgccaaggaagtccctgtgtccccatttgtgacaaccaaaagtgtctccagacattgtcagatgtcccctggggacaacagtgtctcattggagagccacaattttaaaagattaggattcagtgaaaaggcattgagttaccacgactgacaggtgagaatcatcactgtaaccttcctcttgcttccctgtggccccatccgggctccaggttagatagaggaatattctagtcggttggcaggggaccttccctggtcctggagatcggccatttcctcttacaagtgccttggccatttgacctcgtgccagtgagtgctttctctccgctcagggactgtgagagcctagaagtagtatctgtgtacttgccgctcccttgctcttacccctcctatcctagaggtcaactttttgggtctgatgagtcatgcttactgcatttataaattgcttccatttctcccaaagcaaagaaaaaaaattttttttttggaaatcagtttaaaaaattataataaatacttgttaataaaccaaaattaaaagtgccagtgaactataagatgatcatatttcagatatatttttacagctttgttaatagtttgatattaatttgggcttaagagttacgggaaataggcagagtggtaaaatgatgggatcttttgatctttaaaactttgatcttcaaaattttaaatatatttaggtggtacatggttctcccataccttcttttttttaagattttatttaattggaggataatgacttcacaatattgtgttggtttctgccatacatcaacatgtctcagccccaggtatacatatgtcccatccctcctgaacctccttgccacctccctgcccatcccacccctctaggttgtcacagaacactaggtggggctccctctatcacacagcaaatccccactcactatctattttccatatgataatatatatgtttccatgctcctgtcaattcgtcccaccctctccttcccccactgtgtctacaagtctgttctctatgtctgcatctccattgctgccctgcaagtatgttcatcaataccatctttctagattccatatgcatgggttaatattttttcatgtccagcacaaacctgtgtgtgaatcccaaagcattataaagttggctccatctagtgtatgaaagtattatacagctagagggggagaaaaaaaaaaaaaacaactccattctggagatctcctttggtacgtcattatgaaattagattaaaaagttaaacgaaaacaaagatgggctataagctatatttgtgccccaggagataatgcaggccaaagtgaccttcacagtgtgagaggagaggtcataatacattgaagcatcaacatccagcatgcctgacattttgttctaacagccttgccttttctttttctggacggaggtcttgtttacaggcactatcaacaattgtggcttgtccacttccattgtgatactctccgtcctccttggcctggcccctggttttcctgtatggaatcctatctgccagtcatgttcatttcccacagttaggaagcgattagggctaggcccatgtactgtgatttcagagccctacatgatttcctttatcagactggaattctttgtagctgtttgcttttcactgcaatagagtagccactatttgtgggttgtgtttgatctggtttccacggaagggttctggcacattcttcatttctcttagtcagggttcccaaatttgagccatactcatcctaacttcatgacttttgcccccacattccatatgatggcttaaataaattaaaaacacatattgaaaggaaacgccgtattaaatggcaatgacagatggatgcatgtgtaaaataaatataatgaaattggaagaaaacagttcgatccttattggatgtgttgtcaagaagggcctgagtctgagatctgaactgtttttgttacaaagggcaagtattgcaagattgaagacatgttagcatcaaacagacacttttcgtgggatgaaaagaaatttgaaagggtctttctctctgggtaattccatggtcatttaatgtggagtctgtgtgtctccatttgagatcatcctgtatcccgcacgttgagaaactttgctcacaatttgccatcttttccagaggagtttgtcatgctcccccaaagtccaaagctcgtctccccctcaaaagcctttttcaataattctttattttctgagcactgctatacttctcctattaacaagaagaaattgtgctgatattcatattttctcactctctttcccaactagattaagttaattgaggacaagcagtgtgtctttctcttctgtttctagtgaatgccattactttaactcatgtttggtataaatattcagggaagcctgcttcatttcctgcttgtgttttttttaaaggtagatcatagtcagaagtgatcagaaaatgcaccataatcaatttcattattcacttaacccgctgacaactagttattgggttctttccctggatctggaattgtgtctggttaaagaatgaagagggaactaaacagaatgggttattccttcttggaattcagacaccagtgtcgggtgtggggtgcagacagctaaagaggcgactccagtgcaaggctctaattttaggattagtttgcttttgtgattgttgagtggctcacagaaacttagagcagggaaccacagtgagaagcgtgtgggctctggagttttcaaacgctgaatttgcagttcatcaacatcttgcttctgagcaagttactcacctcaatccctttccctctgtttcttcatttaaataaacatgaggtacgatatgcaaagaaaaggcacagttatccgtgtgatgatatgatgaattctctaccttctctcttcccctgtctctttttttttaaaaaagaggcagagacatgatctcatgattttttcagatttttcaaattttctgcctggcccactaggaaatgaaaatgcactgatccttgatccagtattagaaagcaaatgtttttgttaatgggaatgtcattgtagatggtactttaagatggtaaattcatgcaatttccaaattacctatttaaattagtaaatgatttgagcattcagagttactccaaaacacttctgacttcataatctaagcgccatggtatatcattaatgtatctcaagcatattcagtagtgcttggaacaagtaggtactcaataaagacttgttgaatgaatgagttttaataagaattttttgatttttctagcttttattcataattttgcccatatgtatgttttttctttgttctgaaatttttaaaattttattattggagtataattgctttgcagtgttatatccttatcttttaaaaataaaccagtgttacttgatatgaggagcttattaataagcttgattgaaagtggtggtgattctctgcatctccatcaccagcctcatctgtaatacctggcaggtaataagtacttgataaatgtcaaagcaagaattagatagttctgataggcactattttttttaaggacttataacttaattttgtcaagcaaagatgtcttttttcctttgtatcactacatagcagtattacttgaaattacacaggctattaatttaaaacattggttattttaacattttactatcaacataaatatacactttgattataggcaagactccttagagtataagtcagatgcagaatgctattgtgtatcaagtttattgtgattgattagatttaatcaacatacaggaaggattcctgtgcaaatattatttttctcatttcaaatcctatttgttcagcataactgaaacaggatgtcattagtgtaagggtaagtattgagatgctttggaagtttgggaaattttgactattgacataaatttaacctatggagatctttcttttgaacacagaagtttgatttgttatattttgcttatttaggtacgttatttccttcatgacttacgaatatgtttataaagttaaaatacaaattaaaaaagtatttgacacattgtcagaactgaagttttcctgggctagcagttttgtctgtagctaagacaaccattaaaaaggcatcaatagttgtacactatcagaataagtttcagatccccatcaacatcttagtttttggttttttattatgaatgaatatgttatccacaaatatctctggaccttttctgagcttacatttgttttcaatctgcacaccatcttcaaatgccatgtttcaaaaacattttcacttctgtctctttataaataatttatttacttggctgtgcagggtctttgttgctgcccggacttttctttagttgtgaagagggggggctaatctttgttgcagtgtgcaggcttctcattgcggtgacttatcttgttgtggagatcgggctctggggcacgtgggctcagtagttgcagttcccgggctctagagcaccggctcagtagttgtcgggtacaagcttagctgacttcgtggaacgtgggatcttcccagtccaggggtcgaacctgtatctcctacattggcaggcggaattttttaccactgaaccaccaggggtgccctttcactcttgtctcttaataataacttttatttgtcctacaagttgaagttctttgaggcttcaaggactcacttctcgtgccctagtgttctgaaagtggccttttcccttgcataatattgatggagtgcaattttttttgcaggcactgtgctaggtacttttcatacctcacttcatttagtcacataccctactaaacaggtgatataatagcgatctccattttacagatgtagatttcgagactcagaaatgaagtgagttgcccagggtaaagctacgaggtgaacatagtgcatggggtatgtgtgtgtctgcaagccaccgccacacaatgctgtctccagctgaaagatgatgctaagtttagatcgttaagcaagagagacttgagcaacgattcacttatttatgaaatagtggacccctcacaggctaaagaccctgtcctggattcttaccacacgttgtacagataagagttatcacacctggcacactttcataccaccgtccaccatagtgttgtgattgtccatgagaaaaatctatctctacctttagttcagtttttataatacaaataggaaacctccgtgaatggcacagaaaggctaattggcaaagtgcctgtgtcttctctgtcttcttcgcttttccagttccccttgagccataaagggtcaggtggttctttcagttgctgatgccctgagtgagaatctggggaagggtagactcatctgcctcagtagccaggacctcagcccagagggtgtgtagaggccacttgtcagagctgaatttgtcttgttttaacatatttgaatatcttgactctagggaagaagaatgaaactgatgtctatcatgatgaccacagggtcgcaccctcctgtttccatcctcaacaccattaggataagcagagactctatgggcttctttgctattcagtttaattacttaaaaaaaaaaaaaaagagttactacagtgaaagagaaatctgtatttttctttttaaataagttaggagttcaccactgaattgagaggaaaacactcaaagtgactttaaagtcctgaagtggaagatttgacttattataaaatcctagtgtgaataactttgcacccctgcctccatggcaacagccttatctttttctatttatttaccttgataaggaaagtaattgcatttttactaaatttcttttttgagaaaatgccatcaaagcggcataatctccatccgtgtttccttcctcaagtttgtgttgcctcacgaacttggcttttttttgtggattatgttctgcttattgcaaataccccactgccattgatagatagcaaagaaacagcctccgaattgcctttaatggagagcaagtatttcttttgaagtgaactctaacagataatatcagagagctcaaggtaaggaactaatctcttgtattgattatttatgaaagaccaactattatttcaaatattgctcccttcattaattgcttaaaaatttacttcagccagcatttgaagtgcctcttttttgtagattatatttgtattctcaggacagagttttctaaatagtttggaaaagcattattttttttcctctaaatctagagagttctttgataatggcaacaggagcctagattaaatttacctgaggtcatcttggtcttgtgtgcattttccttttcacccttaaagggcttctttgtgagctcggtacaatgagcagtctttcagaagatgctgtcccatcattgttatagggagattctgttcttggtaggattaaaaaaaaaaaaagggaaagaaacaaaatgaaagagataaacttgattgagtggtactgaacacttatttctgcagatacatagtcattaaaaatttccctcagtcctgctgtgagtgttttcaaattagaactactgggctgccagttcctgtagctttgtatcctcgtactttatccatgaaaataagttgtgttcagcaactgaaagcttccaaatgaaaagtatacaatcatgagccccactactgcctgttgacttcctaattaattaagtgctgtcatcaaattatatttcataactccgtccttacctgatctttttttattttgtcactcttcttctgttcatctttccttccactcatccatcattcactgaacaaaagttttttcagcacttatcatatgccagacactgagaatgtaatacatacaaaggaccctgccctccaggatgaacgacaaacaaacaaaacaaatgattaggagtgggattaagtgctacaaaaaaagaagcatttgctgagagagtaagaagcagaagtggatgttgcttctttaggtaggatggggttggggaggaagccctccctggggaagaggcacaaaacctgtgagacctcatctgaaaggtggagaggaacccctgaaactgccagtctgtcccccactcctaactcttaaccatgggcctgtgtatgtgagtttggagtttccctggggtgagccccagagaagcaaaagctctcatatcttcttctttatcttccccacagcactgagaaacatctctcaaatgctggccacatcagtgaatgtttgagtagaagggccttttggtgacatctgactttccaaaatgtgagcatgatggcatgtggggaaaagagccagatgtgtttgttactctggacagaagtttttgagttttgcagccactttcacgatacttgttaattacctcataatactttcacttaacattcaaagcatatccattgtataataattccaagcggacactttacaacatcagactatacaagtaaagacttcttatttcaacagataaagggaacttgagaatcttgggtattttcctgtcactcttgcagagataattttcatagaacatattatatataattatgtatgttgaaatacggtatatagcagtggttccgaggcctgacttcatattagtcttttatgagaatctttttaaaagattggaatttgaaacaatgttttggaaagtctcattcagtcatttatttgggggaagatctttgacatttgtatttttaaatgctcctgagttgattttaaagggatgatgggggcagaatggtccctaagtctttctgatagaaatgcaggtttggtgaaccattggctgggatcataatgaaacattatgggtagatgcttcctaaattgtatgtagcaggtagttcatgagtcagtatagtgtttggcatgtattaaatgtcttcagctgttaattattgttagggtgatgagaagtagtttactgaaaaaagcaatagctatcagaaggaaagatgtaagacaatgatgtgctttggggaaaataaaacatttgatacccaaataaaataagaaggattctaactgtgttaaaagagtggttctacttttcttcagctgagttttggacaggataacaagtaaaacctcttatctcttctctaactcattcaacatagtgattgagtttttccttccaaaaagattgaggcccaaagttagttaaaaaaaaaaaaaaaattggctgtcacttggatgtttgatagttttaagttccatttttgttacagttgtctttggagaaggtcagtaagaattctgatgagtctagttgatttgctggaatttggggcaaggagtagcagttaagatttgaattatatgggagtacaggtaatatttttattctacactcagtgtttcatgttaaaagtattatttttcctttgtctctgttaccagttcttattttgtattaaacttttagggtttgtgtgtatatatgcctttatgtgtctgtgtgtatgcatacatatacatttatatgtgtatatgcacttaggatatatatctgaatagtacatatatgaacaagagagttgcttacacattatagattaattcattgtcagtgtatttattgaacatcaattgtggattgtttattctactagcttctagggatacaatggtaaactgaacagatatggttcctgccactcagaagacatttgttaaatgattgtgtgactacttgagggacaggattgtggaaatgtatgtaatgtttcatgaattttatagcttttgtcagaggtgtatgtcaagctttattccatttgctgataggtatttcattgctatgttcagggagattccccaagaacatttgcgtgatataggtatttctgaaggtaccatgaataagttgaacacatgccctgtgaaagtaattttacttaaaaatttatgtaaacagtcaatggatagcctccttgggttggtagattgtccaggacaaaatatcaggcgatgtcattggcagaagctgccaggggagaatttggcaccatgtggtgtccctgttggaatggccggaattgatgccattggtttcacgatgaacatctgagagcctacggagggcacagattttccctgtgtgtaagcatgtaataaatcagggtttcatttcaaaaacttactgggaaccgtgtaacttaattcagcttcaaatagtgtccaaggtgggagagagtccagcttggtcttttttaaaaaaatcatcacttaaaggttctgatatggtaatttcctaacctctctgttttctttgatcttcaaatttctcaatttcctcgccgcccccccccactctgttgaatttccattggttctgtaggttagtcggtgtgcatccagatagacagtttcaatcataatcataagagctactttttaaaatgagagcttaatatgtgtcaaagaaggaagttccactgtggctggagggcagagagcaagggtacagcttgcttccttagactgtaccatacatgttacatatgttcatatattatttccttcagttttaacaataacctatgggatagccatttatcatttcccctttcttgggtgaagaaaccggggcatgggaagtttagtaaatttgcacaaggtcacagaattagtaagtggtaggatttgaatctgaataagttgacaccaaaacttgtgttcttgatttatctgctctactgtgctagagggagaaaaagcaaggtgtggagcaggttagtaaggggaatggtgtcgcatcttagtcacctgttaacgctagaactcagtacaatatccagtctgtggaaagtcctcagtaacttgttaataatgagcacgattattttcatcagggatctgatttccccaccccacccacattccttctacatattggtctttagcattaccagcagtctacctgctttcatccacttgtctccactcttgtccattttcccttatcgcctcccctcacctccatgaagtatcgtcacctctgcctaggactatggcagtagctaatcttgttgctcctctgggtggttctcaatacagcagccagagggacctttctagaaacacacatctgagcctgcttacaacctctcaatggtttcctcttcatcttggaagaaaatcagtgactcttcccttgtctcccaggtcccgacggtctgacggtagccactgcttcagtctcatggatacccatgaatacccttgctatctgacctccagccacagtggagcttccttctaactccccacttcagggttcttgcacatgttttaccactgtttagaagactcttcagagaaggcagtggcagcagcagaagactcttctcccgttccccgcttcacacccagaatccataactgctacccccgactcacatcgaagccccaaggtccctgcttaagggaagcctttcctgacccttacatattaagctttcccagttccttgttgtatttatcacaagttacattaaatacttgggtgattatttaagatgtgtcccgttagacttgaagctccaagactttgcacagtgcctgggatgtagaaggtgttctataaatatttattcaacgaaagaaaaaatgaaaaatgaacaaagaatacaaagggccaggaatagcttgtctgagacttctggctggatatttcccattattaaagggaaactaaagaaagatcacttcatcacatgaaattcaagtttgagtatggcttattgagattgcactgttttccacctgtttactttgaagacagtctcaggcacagagaagtgaagtaacttgtccaggatacacagctagtccatatcagatgtctttgttctgacctttgaattgtgtgtagggaggaacagacattttcataaatctccaggacatttttaatgtgctgagtctgtaggagctgcatcaatatttgatattattgacgctgtcatgtcagaattttaaagtgtcttttgagggtatctgttattattgcagtgagttcagagtttaattggatgacaatttaagaatatgcagaggtatgagctaaagatgtcctaaaagatactgcccacagtaagaagcagcttgtgtctgatttccaccaagactgagcaagggatagcactccttatattcttggggtctgagggtaaggaatgctgcccagatctcgaccctgtcagcaggaaagcatgttcagtgagcaacctccagttccaaaaatgcttttgcacggatgcaaagcagctcgagctgtgtgatgagctgctgccagaggtgtccccagttgagacgggaacaagctgtcccacagccctcctggattctgtggttcttttcggtgttagaaattcacctggatgtaaaattacctctgccttcatgttctctaataacacgcagtcactgcaagcccccaccggtacctgtactggtgctcgagagggctaagtgagcatcccaggtatcgcctggctgctggcttgggtttccagtggtgccttggtccttgtgaagcccctgttgcagggtgaggcagcagttttttgtcctgcaggtacagtaggtactggattaaacaggtctgctgttgcagacagacaccgggcaccgttgtagcacaagctgtgtttggattggagtttccagggccttatcaggagccacccctagtgacacagccagtgccagaactaactttgactttcactcttcgccaagggcttgcagaacaccttaaaggaaaaaagatggaggcgcttagagttcagatgttcatgccttgttcctttgaaagcttttatctgtaagtggagttttattctggaaataatcctgggaccacttggcaggagttttgttttttttattttttgtttttaaggggagaacagagaaagggaaggttttatcgggagttaaaaattctgggactgttactctgtgatgtggctttaatcggcttcagctgtaacctctggtaggtgactgtgacaaggataacaactaatctgtggggtggggggattgaaatgctagtccattagctctgctttctcatttgaaatggaatgttggtcttaaattaatcatgcccccaaaatgactgctcgaaaaatcacagctctgagtgagaacagagcttgatttatgattactaaggtagtctgaagctgggctttgcgatgactaaaaaaggattttcttcaggaaaacgggtgtgcttagtgacattggtcagaattgtccccttgcagacactggattttttgctttctcctctcccctttaccccacactgtggagtagtacacttgcattaataaacatttcatttgcatttctttatattgatttttttttcctctttgagaggaaaagaaaacatccaaacatcagaatcatctatctggcatagaaatgtagaacgagtttgaaattggcactttcaaagaaatactaagatggagaaatgctaaatggatcacagctttctcctatcccgcccccgccaccatttcctttaatatttactttcaatgttaggtgataagatttgaaaacaatactaaaagccatgtccctaagtgaataggcattcaagcaaatcaacttaagcaaaagccacctctggagcttaataattatttactgaacgttcctgggtcatgagagaggttctgattaagtcagaaaagcattatgttcagcagcttgtgaaggtgtgtttaaagacggcaagaataatggaaaaatactaaaagtagcagaactatttttagaatttgattcttaaaaaataaaattcctgtaaatgtaattgtggtaaaattcctaatgttcagtggatacatctttaaaagactttataattatttaaattgttttctaatgtcttgttctatttttgctgtatggtttgcttttatagatttttaaaattgtatatgtcattaaaacagtttaattactcatctctctaaagtgatagaacattttatgaacagagtatatacattattatgtatttaaaatgtcatcaggttagaaatgttacaattttatcctttgtaaatcagatactagttagttctctgtggttcatatcacacaagaatgtcctccataacttagtaatttttgaaatattatttttaagcaaattaatggatgttataaatggataaagcgtgccatttagctttaggatagtagtgatgtcatccttgaatttatatccaaaataatgcttaatttcaactgcttttgcttaattgatttcttttttttttctggttgactaaaatactggccataggaccatgcttccctttacaaagtctcagaatgaaattcttagctcatatctttgacaaaacttgttcactgagctgttgctcatttacttcttcttgcctcttctttcagggagggtatactctgtgaattaattgtttcttttgtattttccactaggaaagcaaagaaacattatagtagaaggcaaccttataagaatttgggttcctagagaataactttccagttttcaatagttccaagttattagaaagctcagagagtaccaatttgggaattcaagcccagcacagaagaatccatggcctaacatttacttactgtctgcagggtgtgctgactgctgtcctaaaaatcttacttgcattaccatattcagttctcatacttgctctttgacaaaagtacttttctcctacctccattttgtagatgacaaaattcaggtttgggcaggtgaaagatcctggccacgtcttatcgctgagaaacggtagagctggaatttcaacagaggtattctgggtacgtggtttctgctttcctcttttccactcaatggattttcatttcagatactgactgaattgatgtttcttcctgtggccttttaattgtgtttctccaatgctcagatttctgaattatccaaactgtacctcctttgtgcttttgagtggctatgactaatccagtgtcacagtatttgtctatcacatgggtttccttgtatctgatttactattgattataagatgactgcttaggggagaagacaggtctactaataagaaaaaaaaaatatgtgtatatatatatgtgatctattctgacttgagaaaccttaaaatatggaggaaaagtttgtcttataattaaactaatgcagttggtctctagaactgagatttttgggaaaagactgttctctatcactggatgactcaggcagtggtttttattaaaggtcttccagcattaaggttctagtgttacctgattttaggaggtgggttatttgttaggacagcgataccaaattaactctttggatagatatttatttcatcccactatgtgctaaatattcttttaggtgctgaggaatttaggtgctgctgaatgaagcatagaaatctctgccttcatagagctagctctatctggtcatgagggggtaggagcgttccagctctatccttaagtctgggtctcatcttcatggtccaaagtggctgctagacctgcagccattacagctaaattctaggagacatgatggcaaaatgggtatctctttaggaagaatctttgaacaaaccacgtgatctttctgctgaagtctcactagcaaaacttaggcatgaagcctaacactagaaccttaaaaccctgaaaaggtgggaaatgtgagtggcagtgtaccagccaaaagaagggcaaaatagaatgggtagctagattgtttgagttgtagctcttaggccaaaacattgatttttttatttttaacaaataactgatattttctaaaatgacatgaaaattgtaccatggtttaacagagcatatccaactggattaaacagaaatggagattgagagtcccttgtacatcagtgtatcgggtgtccagggttataaggcttcagggatggtttgatccagatgctgtttgtcatccacatgctggcttcttctaccctcctccttctttctaggccccggttccttcttgccgttcacatcactgtttcctctagtttgcctttctttccacataggtccaggaagttccagatttatatcctaccgtcttttcaaaccttagtataaacagaggtcttttaccccagtagtcgtagtcagaggcattgggctgcctcttattggatcattttagagtacaagcccattcgatgggtatgttgattgatcaaacccacattgtgtttctaggtctggagttagtagcaccaccataacctgcctcatgaatggaaagtgaaggggctggtttttcagggtggaattagggtactttctaaaggaaatgagacagtatggtgagccagcataagtaacatgtgaccgtcataaatcattaccactgtttgtaaggctggcttttagaccatgacaagtgcatatactcactgctcctgagatcataattggtacttttgtcttgatttttacagttttgcaaactttgcatcttggttgatatgtcctagacatgtagtaattgttaagtgatggcaatctaaggcttttgaatcttctctcacctgttgtgatgctatcttgacacatggacagagcatacctgtgactggggtgattgttcgagtagagatagaaggctttgagtctttaaaaagatccttccagttacttcacactcatgtctgaattctttcattagattgtcatggtggtttgatggtttagtcactaagttctgtctgactcttgtgactccatggaccatagccttccaggctcttctctgtccatgtaattttccaggcaagagtactggagtgggttgcatttccttccccagggaatcttgccaacctagggatagaaaatgggtctcctgcattgcaggcagattctttaccaactatagttttggataaaagtttgttccttttaaattgctctaagtgggctatattgttatgccatatcaattacttataccttgtaaggaatggatttttcagagtcttttaaaatatggcatctagatgtgaatgaggttccacggttggacagtgtaaacaggaattctagagtgtgatctaatgaaatgcagcttgataggaaagataggattgagtgtggggctgtctgctttatctgcattatgaccttttgataggctgccagaaataatttcttagaaacgaattgagagtgaggagtgtggaaagccgtggtggcatctgtgggaaatggaggacagttgtggccttaaaaggaggaaatggcaccctcatatccgtgtttaaaaatagctttcagtaacagatactccttggttggagtgtatagaagtaagaaaatcaatttgggaggggtgcatataatcaactttaaaaaaatctgatggtgaatactgcctggaagaacactgggttaatattatagaggtctcaaacattttgggccatatctcctaaagtaagttttttcaagctggctctctcaacatattttaatttacttataaatttcatacatgtgtcactatactgatgctatattataatatgtgtgtgttcattgcttagttgtatctgactctttgcaaccccacggactatagcctgccaggctcctctgtccatgggattctccaggcaagaatactggagtgagtagcctttcccttctctgggggatcttctgaccagggatcaaacctgggcagattctttattgtctaagccaccagggaagcccaatattataatatacaacatgtataaaaatagaaaataaaaatgatgggtaaattttatataaatttcaatctttttcttcctgtactccagggaatctttttgtaccctcttttgaagaatgttgatatattaggtgtcttattatgtttctttgaaaaatactgatataagtcttataatgcttctttttgatttttatctcatcagttattgaagttactcttactggtgcctctggaaggtccagcttaaagagtattaatcctaaatagattcagagagactacgattctttcaaactaattggattctaggtgttgaaaagtgacgattttggatttttaacttgcatatttttaacttggcaattcttgcttttttagaacactttcctccttgtgcacaacaaagagtaaagaactccagaggatgggcatgcagtcctctctggataccaagccggcctcatgtctagcagaacaggcccttggaagaccttcagatatttgttgaaggaaagaagaggagaaagacaagctgcacttcgcaagcctttttatttcctctgtgccagaaacctgtagcatttattgtctgagctgatagtgttaccaggaaaagctggacatttggcatgttttcttttttttttcttgaccgctgcaaccaaggttggtgatggctgaagtccacaagatttccacttttgaagccaaagtatgaaatctggtactttcacatttacatgagttatactctcagttattttaagtgagatatatgtttatcatatatatcatttatcagatacaccatatatttcttatatttatatatatatatcatatagacaagtatcaatatatattcttattggtacttgcttctaccatacatgatgaaaaagtcatctctacacttatacagcaatgactttggaaagaagggaaaggttaagataatggaaataactgatcctttgaaaacgttaaatactaggactttcctgcttcgtctagtggctagtactctgtacttctggtgcaggggcccaggtttgatccctggtcagggaagtagatctcatgtgccacaactaaagagccagtacagccaaataaatgaaataaatattaaaatgttagatacccatactgccatttaaaaagatatatctgtttactgactctcacattggtaatttatgcacttggacttactttctaaagactcttaacaatctctttttgctgacagaacagcacttttgtaggttcggcctgtaggttcttatgtaatcctccttatgatagaatagttatgttgtaaccataatgattcattggcagtatctggacagattttttgtcttgttggttttatagcccatttggcaggagtaggtggtccttcccatttccttccattcacatgttgggttcagcatcagaaggactcttcagagctcttgtcggagttatcagaggctggggatggaatgtgcatttcctcagacatggaagaaagtgttctggtctaagaatcaaagatgtgagttcatgtcccaacactcctaccaaacaaatggacgatcctgggtgtccaagtttccaaacctggcatcaaaatcagtggcatagtttttgtagacatactgattcctgggctttacctaacctgaagtcagaatctcttggaatggagcctgggcattttgacttcaggcagggtcctcagctgatgctgtggcagtcagccttctgcatttggaaaccctagtagcttaacctatctctgacatagctttcttacctgtgcatgaggttaattatcatgccttcctgtgtcttcactgtctatgtgaacatcagccactgtgctttcttggatataattacattgtatccagtgcaggcagatgctaggctttgagctctatcaactgaatgattataatgaagattcctttttcctggaaaaaaatactaggagttttactttatatcttgtgagtgaattgcaggatagattatcttctcttcaccccttcaaactttgtcaaattctctgaatcaaaaagggattgcctaaatcttaaaaaacagatatgctatggtccaagcttgcatacaggcttataaaaattcactttcttgcataaaaaagaagtagcttgttcatggtttcatgttttctgactactacttttttttaactctgttccagtttatcaaaattgtgttttggttattgtgctaagctttttacctctattacaaattttaatcctccttctgatgccaagaggcaaatgtattaaacaatctataaataaagaaaaccaaagctcaaagagattgactgacttggctatcgtcacaggttagtaaaggccagaactgtattctgcctgaggaactgacgagaggtaaggcaagggaaagttcatcagctccttgagcctagaagctaagttgcagcttacagccagattcatgtcttggatgattgtgatatggagaccaaagactgattcctaaggtctggtgaaggggtattggcatccccgtgaaaggtgaggattggtcaggcaagtgttgtttggatggcgagatactgaattttatgagatttctgatatatttaaggcgctggtgaagtcagaggaattaactctttgaatttaggaatataccagtgattcacagagcacatgtccaaatgtctcttatcatcacagagaagggtcaggctttgaaggttaaaaatgtaaatttagccatcaagttaggaactcaggtcatgtttatggctacttagctaagtgtccatattctgtctggtgtgttatcactgtaacttagctggcattcgctccctcagtcattgtacgtttaggaggtgggttttggagaggttccgagaagttgagtggctcattaaagatcagattgctcagcagtgactcaactagaagttgtgtcccattgatgtctgtactccttgagtcaccactgagcaattcccagttttcagggaagttgcctggtcttagtgatgtgggtaagtgccaattaaggcatttgcctccccttcagttgcctttcaaagggtgacttcttgtggtgagatatataccttcccacatggaactagataagagtccaataatcgagataactgacttaattttaaggcatcttaaaaaaaattacacaaccctgccttttaaactcattgagattagaaaccaggtattcccagcacctggcacaggggaaaccctcaatagccatttgttgaataaatgacctttaaataatctgattaaaaggaatcagactgatgaaattaggattacctaatgcacattgaggttcatgggccctggatgagttcggtcagcttttaaaactaaatacattgagacaactcttcttattattagtagttgaagcatcagatcctcatttttaaaataagctcttggctacctgtaacgttctcacataaaacccgactttgagtttaaaacttgctcatgtgacctgctaacattttgatgtgtaggcatttttgtttttgtcgatagagtgataattgcagattcaattatttctaagaggaagtaatgtttaaaagatcgaggaaagctgacaatctgagagtcatctttaacatggagatatccagtagggtacgtgtgcagtgaagtgactatttttcctttttgttctttgagaagacttattcaaatgtcaattagctgaaccttgctagatttttttgtgtggggggttttaatttaaatatatgggtctaccatataaatatgtaatttttttcctaataggatatttcagtaaatgttttaaatgatactgttgttgacttgaaagtctgcagccttagagtttgatgactagtaagtaattttaacttaagatgtctcaagaatgctttactgttaattgaaaggatttttttccccccagtatcacagccaatggcttgtcttgagcagctaattagtgcgatttttccacagctgcatttgccaaggcacaaaggtttgctcctgtttttatcaaaaggatcagtctctttgggaatgttttaacctgacaggctttgaatagcaagaccatctatttatttatttatttttaaatagccttcttttctgggtttaggaaagtacgtttgaactctgaacacatactcaaaagtgggaaaatgcattttcttttggtgctcttttagcagaacctgagcaggtgaatggagtgtttttgagaaatgatggggtatttttatggtgtagataaatgcatgatatgaaagtaataaaccgggtattagcattttcagtctttgtatatctgtaggaaactataaaggaaagagggtctaagtcttctgggatgctgaagacttccaaaagagccagtgtgctggatacaagtcagcacttccctatcctattgtcaaaatgctgtctaggatgaatctagtctcttccagccaaacggtgactttgatcactcaagtcacttcttcatgcttataagttaattcctgttcctcatgttttcaaattagtggcatatatcctgccactgaaaaaatatggtgacattatggtttataggggaagagtaaagagtaagaaatttacctataatcccactcccactttggcaactctcatcctttcgctagtcatgtgtgtatttgtgtacatacgtatactctacttattttagattagaatggacatccacttttgattctactttttaatttgtcttaggacatggattttgcactttgctgtgtgctgagcaatgtttttaaaaaggtatattatcaaatctatatgtatcataatttactttttttgttgtttggctgcactatgtggtatgggagatcttagttccccaaccaggggtcaaactcgtgtaccctgcattgggaatgcagaatcttaaccactggaccaccaaggaagtccataatttactttttttcctaaacctgttttatgcttacatcttttgaatggttttatttatttcctcaactttattgaggtgtaattaacaaaattatttaagatgtacaatatgatgatttttttcatgtatatattgtgaaacacattaatcacctcacatggttacttacatatttttgtgtgtgatgagaacacttaagatctgctctctcagaaatttcaagtgtacgaggcagtaatgttaattatagttaccatgctgtgctttagatcctcagaacttactcatcgtgtaactaaaagtttgtattatttaagtcacatctcccctcataatttacataatcacgcccatgttaggggacagaatactgtgcaatttgtcaatagctttgtaatgtcaggttttccacattttgaatattttcctaggaaagttatccatcggtgaaatttctgaatcagttgatagtattgtcaacttgataattgataatattaggtaatattgatattgataatattagaggattgtggtattatattccaacaatagctcagggtagcattatctttgtactttttcttgtagtaaacatttttttaagtttaatcatacctttctaatagcaggatttcctgtttaatatattgtatagttttaattcacaaccataaatatatctctataccattttttaatggctctatattaacagcattattttatatgaacttatcacagtctattgaaccaggtttctgtgctgagtaatgagtcaaatgctagtataatttttattatatagtcttctggaactctgtgaaggtgaaatgcaaacatttctttattctttagtacttttttttttgcctgaagaatttgaaggtttttatctttaagtttataaggctggtcaataatttaaaggctttattttgcctttgttagaagataaggatgatattgggatttatattcaaggaaagaagcttaaagtttcagatacttctctggaagaataactttgatttgaatataaatacttcctaaatattactctttttttctgtttccaggtactaattaaggttttatattctttgccctaaactgtttttcttttttaagaaaatgatattaccagatgcaaaatttctagataatagtaattgcagcaacaaacatttattgaggcagtactgcatagcgctcattgtattaagggatttgtgtgcactatttcattcattattttgtttaatcctcacaaaattcctaagaggtagggctttagagtgtaaatgatgcaaaagatatttaaaaagcatctcccattttgataaatgggtaagtaagttacaatattgttattcctttttttcagacatggtaactaaggcagagagaggtttatttacttcttgatgtcgtagagctagcaagataaacaatagaaatctatatttaggaaaatcaaaaagttctttcttgacttgtgacaagtatttaagctttttaaatgattttgggtagagtaagcgccagcaccattagaggcaggcctcatggggaactcatagaatgcgtgttggataggacttgccaagaagaatcagaagaaaagactgcacaaagaaacccaggcaatgaagaatggagttgccaaactaactgtcttctgccctctttcttgaagactgaggttgagttcagtgttaagattctggtccaaaggcttctttaatgactttcacttgtatcgtagaaaaatttccccatgatggagttcaccttttttttgaactattgtgtgttagcaaacagtttagatatattcaaggaatttagatagtgtacaggagtagttatttggctagattcgactataaaaggaaatcaagcaaattatttttaagtgtgaaactccgggtaccattaagatcccttgcttcttggcacttcatatggcagcactatatttggtggtgatgagtagtaggcgatataaaatgtcaaaaaaaaaaataagctgtatgataaaaatgcctagatgcaatcaagccaacttattttaattcaactactgatgacctaaatcctgtcagctcttgattttcaattaggtggaatactactctgcgatctgattatattttgcacaggctcatttcatagtttggtgcaatttaggataccccaaaactcaaatgaaaggtctcattaggaactcagtgtgtgtttttctgtttccccacagcagttccgaggagcatcctggggcctccaagcctccgataagctcctccagtatgacatcgcgcatcttgctacgccagcaactcatgcgtgagcagatgcaggagcaggaacgcagggagcagcagcagaagctgcaggcggcccagttcatgcaacagagagtgcctgtgagtcagactccagccataaacgtcagcgtgcccaccaccctcccctctgccacccaggtgccgatggaagtcctgaaggtatgtgagtgccactcttggtggctgggccaagcctccttcttcttcaacattttctgttttctcggtgttttgtttgtctcgtcatgtttatttggttatattgacctatctgaaacatatttgtaaatgtcagctccattgattcctacatggctttgtatttccaaaaaaagattccaactaactgtaaatttaatagtaaccctcactaaatgggggaagagtgttgatgccccgtgagaaattaccaggaggttatagatggtttttataatgatatcttcccatctttctttggcaaagtttaaaaatgtacaagttacctgaaatgaacctcttctaataacttgtgtgtatatatatatatatatatatatttttttttttttttccccctaaatacattctatggccattcttgagttttcttttttcttgagtaaatcatcttggctgtagaatctgactcttaggaagtctctttagatagaaaatggtagaagagcttagctttaataactagactgcataatcttttaactgaagtgagttgtctgttttgggtccctttgatttcttgctagagtagaaactgcaggagcttgttagcatcattctatccaggacatatagcttcctaattactagggaaaattgtaacaagtctaagaatagaattccatctcacacatgggtcctgcaatcacattgggaggtactccttctttaaacattccaactcttaaatgtgactgatgcaagtgaagttaaaagaaaagtaagaggacttccttacttcttaatttttaaaatcccattacctaattgatccatcctgaagagtccagagtgttactgttcattaaacaaagtgaactttacccgctggtgattcattgttggtctttgcaatcattcctatgctcagaaaagacatctttcactatttaaagtttactatgaaagcaaatgggatgctgtgtgataattgggaaacaatctatgatctctaccaggaagaaggaaagagattctttaaaaacaaaatttaagccagttgttttcttatttgcaaagactcttgaaatgtagtgatggagtactgaaactgtgtcagagagaaactaatattaaaattctgttaggatgagaaagattgcaatgctttagcagaaaattttactctaatatgactgaagttctgaatattgccacagctagtgtatattttatgtaccccaccttccaaataaaggcaagtttttctcttgcaagtagattgtacgttaaactttctgttctgcttgggtgaaaattggcaaccagtgggtttttacagacctaaggtttatttaagatttgtctgctgttcacaagaatcataatttttttagctgtatcttagattatttaaagttatatgaattaagtaataataaattatagagaaattttatttactttagtagtctatttttttaagctgaagaacagattttagaagagatgacacagatttgtgttagtagtggtttatgtctaaatcaaaggtaatgttattaaagtataatagttgaaatctatattcctattaaggcaattatatctgatgaaagagaaattacctgagtatattgaaacattatttccatttcatttgaaaaatggacatcattttttaaagttattacttaaaatatgtaattgtgatatgattaaaattaaaatctatactaattggttttaataatataaccatttttccttaaatgttactgtgtcctggtaacactagcccttaactctatcactcaaatcagttatgctagaaatatgtccaaagttaaaacacaaatatattgttagaacccgaggacttaatctaaataaaaatgaacaaatggtaaatgtatatttcatacagaattagtttatctctaacttgtgcatttttatacttcagttatataaagtagcaaagtatgtgaagaggtgtagggcatagcaatgtgggtaggtttggtagctgtttagacagattttgtatagtgtccttatgtggaggaccaagcagaaacatgattccatataaggtggcattctaagagcttcaaattacattttaaaggagagtgtcatatacatgattactccaagtacttaaatacttagtactttataaaaatagtttgcctatttttgaaagttttgtggatggaaatatgaatcatttattacagaaaggtaagtgagagaaagatggtcatttttttcttttctcttttatagtttttaaatcataagcttatattatgaagtaaatggttaatagaaaagcagttaatttgcttaatcttgacccacatttctatgaatatacattttcaaggagtaacactgagtgtactgatttatgcataacgatacagatgatattgaataggtatttttttctaatagtatagtctcagtaaattcatcatttaatttttaaagatttaagttgctagaacagaacatacctgcttctcagtggaggtagatgtgtgcagtcagacgtctagcgtgtgccagggaatcctgggtaaatcgctcccgtctctcactggtttaaaagaacttgatagaaaaatcacacacacaaacccatgttacgaacatttttgctgttggtgcgttgaatgattttgaaaagctcaattagtattgtctggttaatcccctttcttttgcagaattatgcttaaaatatgaagcatgctttaaattgtcgacgtcttctagtaaatttaggactagtgtttggaaatcatagggattggaagtttgcattactcatttcccatatggttgtcattcagtccataaattcatgaaactttgcaggattagcctctggtttctacattgatttaattaatttatgattttttttattcctattattggtttttattttaggtgacatggagtggttaattttattgttgtatgtattcacatagtggatatatcctctaggtttcttaagaacagccctattcaattcggtattgtaatttaaggatgcttctttgtcattaattaaccagtatctggagtgcataatatatattttgcaatagtgaaaatacacactctgtatttctcactgtgaattaacaaagtatatcattaagaaccattaatggaagtagtttctgccacaagtagttttattgacaagcagacctgagatctgaaatctgacctggttccttttagacacaaagagaggaaacggagataggccttgtggacatggtctcatggctgaagaagcatcacattatcaaccattgcgtcttcatccgcacatccatcaagcatgcattttccctgtctcatctctctaattctgactgattatgaaaatacctgattgctctgatcttgaactggcaggttcatcagaattgcaccccctgcatggactctgacagtgtatagttgaaaacaagagtttatagtttgaaaacatttatctatttagaaaagtatagggaattttcaaggatttccctctctgcctcccttcctttttttttgtttttgtttttgtttttctctctttggacttaaaagaaatttaaagccaaggtattctcttgggaataaattgtatattaaatctttctgttcaccttaggagaaagattatatgaatttgaaggaaaaaatagatatttttggtaactttaggatatcttcttttgaataatttcaagaaatttatttttagatttttttctttttttccaaatcatctcagataacccaaggaattagattactgcagaatgagaagtgatgcttgctgttcatcaggtattaaaacacatttttgccagggcccttgatcttgtgaactgaattcacattggtattttttcggtgattgacttacggtgtggcatctcatttaaatagtgattctagcaacccaggatggaggggtgttctgctttcttgtcaccctgtctgacaacctatattccatgaaattccactaatggaggacagggtggctgactgaattgctggcctttctctgtaatttatgaaatctacctgatgttgaattgtcaaggtatggcttattctttaggtataatacagaaacttgaagaaggtgtgtggaggtatgagtgagttggtaggttatgttagaagaaggaacggctcccaggccccattatgcatttgattttcttctggatttatttaggcaggaacacagaaccttattagcatcatattgactaaaagaagtgggaagagatacagtgtgtctcagttcagcttgcctttatccccatagttagggaatcttgctagaggtgctgaccgcataagaaaggaaacctgagaattcttctaatcccatagtccatgggccagcatatatttttgttaccagtcagtgtgacttacatgaacattctgtgagcatcagtttcaggactgtttatgaactttggtgtccttttgtttttggatcaaacactgtgtctacaaggccacatcttctcttggggacaaagggattcaatttccaggttccacaaacatgtttttcatcctcctacagacctcctttccctacagagcctttgaatctctggattgttatcactttttgttcggtgtcacacataaggtaattttctttccctgtaaaactcatttttgttggaactgtactcagtattctgtaatgacctatatggaaaaagaatctaaaaaacagtggacatatgtgtgtgtgtgtgtgtgtgctcagttacgtccgactctttgcagccctgtggactgtacccaccaaactgctttgtccatgggattttccaggcaacaacactggagtgggatatatgtatatgtataagtgattcactttgctgtacaccagaaactaatacaacattgtaaaccatctatactccaataaaataaaacaaaaataatagacagtacttgttaactgagaactgatttaagcagtgtagagggagatccagcaggacaccagggcgcagctttcctgacttctgctgctttcccttttgcgggagcaagttctgaagaaatgtattaggcagttttgatcaggcagatgtaaaccctgtctttatttgttcaccttttcaggtgaagtgagacacatagttacttttctttctgaaagagaaatatcttgtctgtactttggagaatattgctttaaactccctcttccttaggcagaatagggacttcttaccctgtgtgctggaaacacttaggtcattctggcggtacgtgtgctccagtttgccttggcagtgactggcgacccatttgcttcccatgcaaatccgatgcgtaccataccaccgtaggtaaggagttagtaatctacgggctggcacaagaaagttctccataaagttgccttacgtcggggaaatctaaatctaacttaacccaggctaaggagggcacccacctcagtgaatgtgcattgattaacctcggatatcttttctgcccctgctgcttttagtaactaggaatgagcagtgaatcctggctgaaagaaaatcatctttgcttagatttttaggcctggcccacttgaaagagcagccctgtggggagcaactatgtaaaacaaaacagtcagccttgatatagctaagcctatgaattaattccactttcctggaaacactgaaataccagctggaatcccatattcatttggtaatgtacatgcaggggtacgtgctaagttgcttcggtcgtgtccaactctttgtgaccctatggactgcagcccaccaagctgctctgtcaatgggattctccagggaagaggactgcggtgggttgccacgccctcctccagggaatcttcccaacccagggattgaacccgtgtctcttatgtcttctgcattggcaggtagattcttcaccacgagcatcacctgaaaagcccctcatttggtaatattggcacaacagatggaagtgatttcttccagtgtgagcacacagtcatttttatgtggctgagggatatcatagaatctgggtggtgcgatctcctcagggtgtgggttgggtcagccgtgttcagtggacatctgagccgtgcaggtttggggggagggtcaccttctttctagggtcagggatttttcttctcagtgggctactttgccatcactaaagtcaccttgtgggtttacacgaagggcagctgcgcagcccctctttttctgctggtaaaagaagccatatgataggtgcaatctcttctaatttacacagttctcataatcctaaaactggaggtccaggtagcacttaaggagagttctaaggtctagggccttggagtaagaactgaaaattggagtgggccttttctttttttttttttaaaatctacctttgaatgggaatttcttttcaatatgatatgacatgtagcacatgcattcttaactgggctgatattgtctcccaggggagcaaaaattggctcttggaaggcaaaaaatataagatattataatagtttgtgaccctctaaagcaggagtccccaacttctgggatctaatgactgatgatctgaggtggagttggcataataataatggaaataaagtgcacaataaatataatatgcatgaatcatcctgaaaccttaccttccccttcaccttcccactcttggcaaaattatctttcacaaaactggtccctggtgccaaaaaggttggggaccgctgctctaaaagggcatagtacataagcagatatccagtatatgtacctgttacagttttcttggttggggattaggggagaggtaattagggggaacaagaaggtctaaaacatctgcttaagtgggtggtgatgaaaaaaaaaagatttgagaaacattcctggttctgtgctgaattcctgtttggcatctttcttaactcccctctttgtgttctgtttagaaaacacttaggctcttatggatgtaccgcctgccttccagctagtctgtttctcccagagaactgttagactcacagtcatggttggcatgtccagcatcaggcggtcattattagtgtccccatttcacagatgtggaaactgaggcgaaggggtcaaatagctcatcggaattgggtgaaacaagtggtacagtcaggatttgaattcagttggatttcatggcattaattgcttaatcattagtggttgttcctctcctagagtgaatgacctgaaaaagtttaggaggcagaagtagcaatgtttagtttcttaagtggcatggtaacctggtacctgcagcaaatataggagctactggtgtaactgatactacctaaagcagcttcgaggaggacaagcattgactgcacaggcattaattattggctgtattagatggtaagctgaatcctttatgtcaattatatgacgtatctctctagcagccctgtgggataagtaggataagcccaatcttccccatggggaaactgatgcaaaaagagattgtcactgaagtcacacagttagactcctcagcctacgttgcatgggtgtgtgcccagttgtgcctgactctttgctaccccatgaacggtagcccgccaggctcctctgttcatgggattctccaagcaagaatactggagtgggttgccatgccctcctccaggggatcttctgacccagggatcaaacctctgtctcttacgtctcctgcattggcaggcatattctttaccactgtgccaccagggaaacccaccttatctacttatcagcttaccttatctgcttataaccacataccttgcttcttctctctttcctacagagttcaagaacagcctctaaacatttcaaaaaatcaccagtaacagactatgttagagccaagggggaggtcgaagagaagtctcacaggcttaatggaaggacacatgatcttaagcatttgaaattactaaggggacatccatatggaataattaaagtgtatccctgaattgccactgtatgccagatggcagacctggactatagaaaaatactgcctagccagatcgaccactgtggtaatttatggtttcattatagtcatcattattggtcagaatattgagatattctataacaacatccagaaatcataactcaagatttgcattcgaaaaaatcccgtcggccaggctaatcttatttacctaattcatatctttcatagttctgtatcgataatacatttatattgttgtaaaggattttcgaaatacccaatttggtagagtcagtacatgtgttttaatattaattttctgctgggattatggttgcatttagaatatttcttccccgacctcactgcagtattattacctctgttgtattttagcacttaaaactggaacttcagttctggttgtttttctctttgcttttaagtgaataatgttagctgtcataaattttatatcactgtgtgttaaggtcatgaatcttcttcacaaatgttacctatgtaatcccaacaattaaaaaaggaacttagatttgaaagaccatcttctataggtatgctcttgaataatagagatggtgaacacgtgtaagcaaaatctaattttaacattgtcctactaaaataagggggtgggatctgtgttgaaaaatatgtaaattagtatgtggttttgcacaaggttagagctgcagtcagtactcgtatcttggctcttgccctgaatatgtctcttgttattgacttctttgagcatcagcctcaactttaagaaaaatttaacttgcaacaatacactagtagtctttcagaccttgtttataaagttagatgttttttcctgttaatttacagttttgcaaaaatgagatgaattaaaattggagcatatgaagcagataaaataggaagttattaaagtagagaatgatcctagaaaaagagttgtagtcactgttttaaaaactagagaatattctagaaaaggacctagattgttttataccaaattgttcttacttgttacgtctggaatgagtttttggattggagatgttggtggtcaaaggctttatttacttagtttttaaccaagagggttaaaaatgtgtatgtatgcatatacattcttaatataattaagtgggcttctcttaatgcattttattaggagtcttagggaagtttttttcgcctataagtctttcgagcaacctaattcttctgttaggtgagtttactagagatgtgcacattgcataactccctgttacgtggtgttccctaaaggaaaaatagcaaggtgtgaggatcctgaaaattaaaagttaaaaagatttgaatcaccagtttgtgaataaggggttcaggattgggaactcatgtacacctgtggtggattcatgttaatgtatggcaaaaccaatacagtattgttaagtaaaataaaaaaataataaaataaaataaaaataaataaaagttaagaggcccaacatgaaaagcaaacttcagatttctactaccttaccaccaggcataactttgtcataatctcccctgttggcccagcgttttgtataattaaaatttaggagctagaaattttgttgagacttaattagaagcgacaaaccagagacattcctgctggttaggaaaggcttaagaaattcttattggctaaattacaaatatgtaacatttttttcagaacactgcatggtagttcagactgcctaaaggtgacaagattaggtctgtttttctagtgaagtagtaaaaattagattaataagtaccaggcaaagaaccttttcttttttttttttttttccccgaaaggaatcctaccttgagtacttctggctgtggcgatcggtgctttaattagccacatgttctttttacctcctgggaaataagtatgggataaagttggggatcaagacatagacgcacattgacttagcacacgccgctaagtaattcatcaaggaatgttggtaattagtcctgcctctttcaactcttggcttatttcataaaaccagttgatttaaaataatgcctgctgatttattaccaacacatttcaagactgagacttggctcttaacaaaagcaatattgtgcagcgatggaaatgtgccctcttgtttttgtgtttttacaaattctgaagtcccctattaactttgttgcattttcttttaccccattcagcattttcttgggctttcttttgtctcttggtgaagaaaaggggggagcaaattagaaaaaaaaattccaggctcttagaggttttggatgtgaggtgcttgtcagtgtatattgactcagtgtgatttgatggaatttaatttgaatccttcgtctggtaagacaggctgtcgtgatggcctttggtcctcctgcattgttaagtgtttggtgatatttatgacagccaggttaatcttaaaagattgaatttatgagaagtacagaaccttatgacttcagccttgtaaccttggtatccaaacactgcactaaattattctctggatgccagattccctttaatgccagctgatgtacttcattatgctttgagatgtgactataatcagcatccttgttgaaaaatctgggattagattaaatgactcaaaattggagcatatgaagcagataaaatagtctccaatacttaactgggtgaccttagacacatttcctgttcattctgggtctcagtgtccttatctgtgaaacagaagtaatagtgtctgacctgcagaatttttgtgagggttaaatgagataattcacctaaagcagcactatccaataggatgtgagctgcatgtgtaaatttaaattttctagttgttgttgtttagttgctaagtcgtgtctgactctgcgatccagtgagctgtagcccacagtaaaaaagaaagtgatgatatcagttttaatcctgtgtattatttaattcagtatatccaaaatgttatcatttcaacatacaatcaatataagaattaccaaggtttttgcattcacacttttttttcctatattaagtcttcacactaagtcttcaaaatcaagtgtgtattttacacctatagagacattgccattcagatgctacattttcattgaattactccatctgttttgattttaggagatttacagttgaaaagctagattcctatccactcactgacttccaataactaagttgaatataaatctttaaattaaaatgaaattcttaaagaatttaaaaaattttgaaattctttaaattttgaagaatttttaaaatcctcgtcaccctggccacatttccagtgctcagtagcccatgtggctgtggcctctgtcttagtacatatctaaagcatttagtgccatgctaggtagatggaaaatgctcaatcaaggattctgctgtgtcgttgtataataatgaataatattgatacagtaattattactgccaactccaagttgccatctttatttgctgccattatacctatgcaacacggttgctttcccattgccttcctccccaccaaagaagatcaaaccatttttagtcattattttcattctcacaaccctttggagcccagggtagctgatgtatctcagatgtggctgatattttctgtcaaaacaccctttcccaggagggcacagcagagtcaccctcggaaataccgcatttggacccatctctgccaaccaccttccattcaggcctgggccgtgacagctcttaacttgttagtcacacatcttactcagactctcaaaatccagtttcttctcaaacctacacacatcacacttaaatagcacctgtgtggtgtgttaaagctgactaaagcctcaggaaggtataagcatctcatcagtgttcgtggtacagaaagagacattgaaggaaaagggtatcaattaatcctagttcttctttaaatatatattacgtagtagctgaatgaacaagtaagatgttgaaacctactttttttttttaaaggagttttattcatgatttttacttttgttaatgttgctaaggatgtttcttttctcagttaacttgcagtatatttttaggaattttctgcatagctgataattccatgaaacggttttttctccttatttaccaggcacccaggatttctgttttgatactagtttctgaccatttattaaaccagaaaaaaaacacgctgaagtgataatttatatatttttagatactttgttattcttaatgcaaataatgagttgattatattggaattagtaaactctgttggaaagatttaatgtgttcttcatataaaaactaagagcctgtaaagttgcatttttgttcagttgcataagtgagaaaatcaaaggagtaaaaatgttaaccatgcaatgagttccagaaagaaaaatctttctgttgtcaaaagttatgatttcctgagtttggagttacatattatctcaatgtttattatttatttatttattacttattattattatcttaattttaaaataatatgttaacaaacatgcatggcactgtaatgctgatttcaattttctaagtagctttccaaatttatattaatatcatatacccaaagaatttttccagctcattaattacaaaacactgatggaattcataatacaatgttaagagtatgggatgtcgtgctgatttttactgacacttaggacccctaatgtctcatagacaggggagttaggacattctgggacgatatttcattttgatgtaaaattttcattcagcttgacatgaagctaaggtgtatagaacttaactttaaaaggtgtttttgggaaagttttctatagctctgctgctgctgctgctgctaagtcgcttcagtcatgtccgattctgtgcgaccccatagacggcagcccaccaggctcccccatccctgggattctccaggcaagaacactggagtgggttgccatttccttctccaatgcaggaaagtgaaaagtgaaagtgaagttgctcggttgtgttagactcttagcgatccatggactgcagcctaccaggctcctccgcccatgggatttccaggcaagagtactggagtgtggtgccattgccttctccgtagctcagtgggtctcaaaatatagtctggggtctggatcccctacattatgtgggagcactttagaaacacagattccctgagttcactccacatccattagccagaaaccctgaggatagagcccattaacttgtcgtagccagccctctggaaaattctaatgcagactcatgtttgagaatcactgctatagaaacctggaagttaatatgtaagaaacataagaaaaattgagaaatgctaatgcaaataaagtcagcctcttagacctaaagtaaacatataaagagttatggaaaatctccaacagtggtaaaattggtaggcactttatttgaggagagaggggaagaggaagacaagcaaaggaaatgtttctctccggtaaagttgatcagcggaagttgcaaaacatccagtagctctctgtagagtctttcgtacatggggtgtatcccattatttgcagatattttcacagagttgataaaactaaattaatcatccaaaatcttagggagatgagttgtggataaaacaataataagaaactaaaattatacagtggttcccattttaagctatagaagccattgtaactttgtaggaactctgaggcatgaatgaatccatttgtccaccaacatttataaataaagtatccaccttacttacctagacatctcttcttcaaataaacattgattccactgcagtgaacaaagtacaaattgataccgaggctatatatttcattttattttttatttttacacattttcttgatcagcaaaaactgaaagcacaactctaatcaaacagggcctggaaatatttgacttaaaaaaaaatgttaagagctacttctttttaggaaactttcttgaactatcaagtgtcacttcagctctactttggaatctactttcctctttttcaaattgaatgtagttaatggcaacacagactgcccttttcagagtcccagggaccctacatctatcatttcacaagcagcaggcccttggtggtcagtctctgacatcagaggtctttactgacgtgaccatagtcttcacttggccttttacactgggccattgacatcaacagaaagtgttttctcttctttttcttttttcagtattagttttccactggaaggcggtatatccagtacatgaagccaacttgccccctgggtttgaataaaacaaaccttcatttttggaaggaaagaccaactctttctaatactggagtccttaattagcacacccagcacatggaccgaagtccagccttagaagcagcatggatcacataaaagccatgcagtgcccttgtcttccaccaaaagacgtggattatcttcttagctcccttctcttaagaggaggaaatcagaaataacctaaagatacctcttgcaaacttctgatcatgaaccttctttccccatacctactttacttttctgttagggtttccatttttcagttaaaattcattcaaagaactcttgcctcaaggtgttgtttgtaggccacacctctggttgctgtgtacatgtttaaaggcttcagccctggagtaaaatgggcagcgcccaaattgtttctgaaccacagtggaaaaggataataaaagtccctacttcatagggttactgtgagaagtaagtgacaggatgcttgcaaagcacttagcactgtgtctagcacagtacttattaattttggttactgccatcatcatttccacgagagtcacacactaagtcctcggtgattgaaccactaatgggttcttgagaaatgctcaaaactttaatgttttagtaaaaaatgagggaagttgatctggaattaatttctctagacgtagatggggtatataaagtttcttttgaccaatgattattgagttacattttagcagcaaggaatttttgttcttaaaaatcacctgattatgcaggttcccttaacagtgatttttttttttcctagggaaggcagtgtgattcttgaccacagtttttaacttctccccagattttacccattacttaaaattcttagaatttgatttgatgattgacagccaagttaggcaacagttaaatccctacctatagaaaattctgggaaaagtggttaaaagtggggctaaattttgaagaaatattaataggtgtcaaaggctgtgagaatgttctgattctgaaattaaacttcaccttataggttgagaaatcatcagtttgggatcaggaactctgattaaaaataagtgatcatataaattttattagctgttcacttttgtaagcattattatttttaggcaattagagattcaaaatacattcaattacagcctctcatctccgagccccagggcccgctttgtagagccagtcaactgatgcgaatcattatctgtgttcagaaagttttcatcactacgcagactgcagaagtatttttatatagtctgtaagtgttttgattcatctgctctgggattatctggctgcttctttacatgatctgcctttttcccccctagtctaagatcttcctctcccaatacctattgcttataacatatataattttaatcttttttgtttcttacctttcagaagcatgtcaccttgagtattctgtacttactaccaactgcttgttgacctttacttttgttattaaactacttatcttatttctatgacataagattcttgacttaagaagaaaggccattcccttcaacctatcttagaacatcaactgcttaacagtcgacactacaggcctgaaatcaaacatccatgaatagtatccatgcccaggtgtggccctgtagtatgaccttggagaagttgcctttctgggccccagtctccccatcagactggctggtctcagagcctaactgacatccagtgaactgtctctactttttccttgagagatgaccacctatagatgactgaaatttcattcacattaagatgaagatcacaaaggatgattttaaaaagtccttaaaaaggaagaaatattaggattgttttaaataatagatacacaagacagttgtcataataaagacactccagtgtatatattgcttagagtttcacagtagttctacctgagggtggcaaaaagtcacttgacaaacctcttttgtggttatttagttgttttattatttttgtctttgtgtatttttaatatgatggtgatgataatcctggatatcacttcttgcatctttgagactttcctgaaggccttttaagcagagactctcagcatagacttattggaaatagatgatgaggaagttgaacaaactgccactagttttttatacagacatctgaaaatccatgttaaatatttaattcttaggtttccaaaatctgtaacacaaaaagccatttctgacataatttgtgttacagaatgtcctatagcttttagttctattttaagcagaaatgaattgaggctgaaggtgtccatattgatgagtgagtaccagggcaggatcacctgattcacttcagttcagttcactttagttcagtcgctcagtcgtgtctgactctttgtgaccccatgaaccgcagcacgccaggcctccctgtccatcaccaactcctggagtttacccaagcccatgtccttgagtcggtgatgccatcaaaccatctcatcctctttcgtccccttctcttcctgccctcaatctttctcaggatcagggtcttttcaaatgagtcagctcttcacatgaggtggccaaagtattggagtctcagcttcaacatcagtccttccaatgaacacccagaactgatctcctttaggatggactggttggatctccttgcagtccaagggattctcaagagtcttgtccaacaccacagttcaaaagtatcaattctttggtgctcagctttctttatagttcaactcttatatccatacatgactactggaaaaaccatagccgtgactagatggacctttgtggacaaagtaatgtctctactttgtaatatgctgtctaggttggtcataacttttcttccaaggagcgagcatcttttaatttcatggctgcaatcaccatctgcagtgattttggagcccccagaaataaagtctgccactgtttccactgtttccccatctatttgtcatgaactgatgggatgccatgatcttagttttctgaatgttgagctttaagccaactttttcactctcctctttcactttcatcaagagactctttacggattcatgttgatgtatggcaaaaccaatacaataatgtaaagtaatgagcctccaattaaaataaataaatttatattaaagaaaagaggctctttagttcttcttcactttctgccgtaatggtggtgtcatctgcatatctgaggttattaatattcctcccagcaatcttgattctggcttgtgcttcctccagcccagcatttctcatgatgtactctgcatataagttaaataagcaggctgacaatatacagccttgacgtaccccttttctatttggaaccagtctgttgttccatgtccagttctaactgttgcttcctgacctgcatacagatttctcaagaggcaggtcagatggtctggtattcttgtctctttcagaattttccacagattattgtgatccacacagtcaaaggctttggcatagtcaataaagcagaaatagatgtttttctggaactctcttgcttttttccatgatccagcggatattggcaatttgatctctggttcctctgccttttctaaaaccagcttgaacatctggaagttcacagttcacgtattgctgaagcctggcttggagaattttaaggattactttactagcatgtgagatgagtgcaattgtgtggtaatttgagcattctttggcattgcctttctttgggattggaatgaaaactgaccttttccagtcctgtggccactgctgagtttttcaaatttgctctcacattgagtgcagcactttcacagcatcatcttttaggatttgaaatagctcaactggaatttcatcacttccactagctttgttcgtagtgatgctttctaaggcccacttgacttcacattccaggatgcctggctctacgtgagtgtgagtgatcacaccattgtgtttatctgggtcgttaagatcttttttgtacagttcttctgtgtattcttgccacctcttcttaataacttctgcttctgttagctccataccatttctgtcctttattgagcccatctttgcatgaaatgttcccttggtatctcttaattttcttgaagagatctctagtctctcccattctgttgttttcctctatttctttgcactgttctctgaggaacgctttcttatctctccttgctattctttggaactctgcattcaaatgggtatatctttccttttctcctttgcttttcactctctttttttcacagctatttgtaaggcctcctcagacagccattttggtttttggcatttctttttcttgggaatggttttgatccctgtctcctgtacagtgtcacaaacctcattccatagttcatcagggactctgtctatcagatctagtcccttaaatctatttctcacttccactgtatagtcataagggatttgatttaggtcatacctgaatggtctagtggttttcctcactttcttcaatttgagactgaatttggcaataaggagttcatgatctgagccacagtcagctcctggtcttgtttttgctgactgtatagagcttctccatctttggctgcaaagaatataatcagtctgatttcagtgttgaacatctggtgatgtctatgtgtagagtcttctgtatatatatttggttattttttcttttattttacatactaatactcattttaattctcttgagagaaagagagaattgactatttttctctcagtagctttgctttttttcagtctttcctttcactgcccttggaggatacctctgtagatgttaatctccctccctgtctcctgctctgctttgctgtcttcttcccttcctccctccctcctactgtcccttccttctctctttccttaaatgcccaaatctggaattacttggcttgcctttgaatccccagctttgtcattagttaatttgaggcagattatttagtctctagtctaaaccttagtttcctcacctagaatatgggtatagtgtcagtatattctggtggctcagaggttaaagcatctccctgcaatgtgggagacctgggttcgatccctggattggcaagatcccctggagaaggaaatggcaacccactccagtattcttgtctggagaatcccatggacggaggagcctggtgggctacaatccacagggtcacaaagaatcggacacgactgagcaacttcacttcacttcactttattctattttgttgtagtatgttttttttttaatgtgaatagcttcaatctttttggcagataaagaactcatgctgctgtaacacgtaattccttttgttccttttccacagcatgtaaatgtttgaagcagtccagcagcagggtaagctttctgatatttaaagagaaagccttagctgtcgatgaagactttacaataagccaagtatctgttcagtacaaagcatccgccattactgcagttttagtagcatttgctgctaagtcacttcagtcacgtctgactctgtgtgaccccatagacggcagcccaccaggctcccccatccccgggattctctaggcaagaacactggagtgggtttccatttccttctccaatgcatgaaagtgaaaagtgaaagcgaagtcactgagtcgtgtctgactcttcgcgaccccatggactgcagcccaccaggtctccatccatgggattttccaggcaagagtactggagtggggtgccatagtagcatttaggcttcaaaaactgcttgcttttccatggttctccattctctgaagaagatttgagtgtaggctgtagagacatctctctctgtattatcacaatgcactcacaacaaaggctgtagccaggatcagattttcatttttaaagaaatgatctacgttagaaatacttaccatctaacatctacctttttgaagggagggaagctggtggctcaggttgaaaactgtctgtgaagctggctgcaaacaccagtagaaatttaacccgctagtgtggaattacagttaactgattgtcgttatgcatgctctggttacaaaggtcctgaggtttcgaggagttgcccctcaccttctctcctcctatatgtcatgttattcatagcttgtgattctgcagaacgtgacatttttccaggacttatagatggagttagagcaggaacacctgaatcagcttcagagttgtgatcatgtaatgaattaatgtatgtgaagtacacagcacagctcctgaggtggttgcctttgcacggagtcttgaaggataagtaggaaagaagtctgcacaaatatgagctggtgccctcaaagccttcgaacgccgcagtgtttccttctctagcaatgaagcccgtcaggctgccctgtggggaggtgctctgggcacacagagggcctgcagtcctgcctcagaaggtgaggaacgaatccttggagaggtttgtgttgagggcaaccttggcaaacaagtagggtcattccagaagggcatgaggagaggaatgaactcacagttcgtgttctagattctggggcgatgcagtgacatgaaggatagcgaaagatgagactgagagagctttgggaagcgaagctgctttgggtgagcaggggccacgtgataaaaggcctgaggtggttggatccagcatagcaggtcttgggtaggcactgaagacatgcgtttgtgtttgttttcatgtgtttcttcacttattttcattttagagaaagagagggatggatatcaggtggatgtctctgggcactggtggaggtgggagattgatccgttttagaggagtatgaggctctaggggtggggggaggctattaaaataattggaggaatcaattatgaaagcattgactctaaaagtcttaggagacataggaagaaagcattagtttttttttataaaaattaaagataaagggaatggaaacttattggataaaaaggagaaggaagaaaacatagtgctatatccatttacatataaggaaactgagcagagattaagaaattggtctaaatcggggggttgctttacaggaagtccacaggacaggttctgcctactgcctgctctgtaaagtcttactcgaatgcagccatgactgctttcacactacaggggaaggttgagtagtgcaacagagaattcaagacccactaagctgggtcatactgtctgggtctttggagaaaaagtttgctgactgctattctctgtacatggtgtaatggtagacctaggattcaaataacctagagttgggatcttctctattttgttcacctctgagcattggaaaagaccccaatgctgggaaagattgaaggcaggaggagaaggggaggacaaaggatgagatggttggatggcatcacagacctgatggacatgagtttgagcaagctctgggagctggtgatggacagggaagcctgacgtgctgcagtccacgggctcacaaagagtcggacacgactcagcagctgaactaaactgagcattttacattatattcagtgtgtagtaaaacctcataaaacaactcttattgaatgagtgaataactgaatgaaaaaactagcaaaggtaaatcacatcacagaaatgatgcgttgttgaccaggtaccagacaagagaaggccacggtactatgggagctgggaagatgggtgtaaagagtcagagaaggctttcctgtcttcacctggtctgtggtctgaagagtgaatagatttcagtttgacagaaggaactgcctgtgcaaaggccctgtggcagcagagagcaggatagctgtacaggggtgagagtgaagagatgggcaaagttctcatgatctggatgccggtatccatctacttctagagccaagtctgaacttgagacttttgatactcagtagtgtgtgtgtgtgtgtgtgtgtgtgtgtgtgtgtgtacacacacacatatatatgtagtggtctatagtctagtacttctatcctgagagagttatgagctcactggagagagtggtgtgagaagagatgtgcgccttgaaaagaactctggaacacacaactagagaaggacaaagtgtggagaacctatgaagagatgcaaaaacttggaacaaaacttggagaacctaatgtcacaaaaaagttttgaggtggaagaacagctgatcagttgtagcacttgggcaagtcttcaagtgtccacaaagtgaaggattgaaacgtccactggattgtttcactggaagatcaactgtgacctttgaaagaatagactgagaggagtggaggaggaaagatggagctgtcaatttgttgatgaacagagaagaaggggaaatgagtatatattcattcaatgactgaacaaatagttactgagcatctgtgtagtagggatccagtgttgatcaaaaccagacatagtgcttgttctcctccctgtcttgttcaaaccctttgctctttgcttccatggttggctgacccctttcccaagacacccactccttggctattaaaacatttaggcatgtaacttggttggccaggagccattgtgaatctctggggcaacttaagaagacttactgtaaagttgtggaaatagacttagtcacacagttctcccagcaccactcccaaaaagcaaatggacaatttagaactcaagtgtgaaggaaagaaagaaggttctgtgagaatatacagcaaaacagcggggaagagtttgtgcagggaagaattccctgaaagtgatcctggagctgaaggaagcgtaggtgtcaactccaggaggtcttgtggggagatcacatttcaggacgtaaagggaagcttatggccagacgtcccagagcttatggctctgtggttccagagggcttggcagctccaggaaataagaaactaaatctgggtggttgtgggcagagagtgaggctgagaattatatagtccaaggctaaaaggtaggcagagccgccagggccttgcaggccatctttaagatttatgtctttatcccaggagcagtgagaagccatggaaggatgttggccagtgtcagcagacttaagttttagaaagtgttgtctcctgtttgtagagagaacgtgatcctattattcctttctgagccatcacgggcaggtaatgtttagagggagctcatcctggggtgagggtcagtccatcctatgagagtgtgtgcaccgaagctcttcaggcaaacaccagctcctctacaacccctgctgccttggcagaacagcatcaaagtttctcttggaatcacttggagaaaattcatctgaagagaagaatgcctttgttgactgtgtaaattcaggaggcctggatttctggatcagccaattgcaggcaaaaagaaagtaaaaatgcaggtgacttctgacagaaatgattttaagggccactggctttatttaggcttgagcctctctgggtggtgtccctctttggggtctaactggggacatgaccttaaagcagacacgtgttttcagagatttgcccacttctgtacttctgtttttagatctgatgaatcaagaaaggcttgttgagagtaacttaacataatttcctccaagaagtctgtgtgttaacaggactcgacttttgctggcatggggggaggggaggaatgatggattttcagagaagatcctggcgggtagtggtgggggctttctctgccacctttcagatcacagtcagtgggcaacccctccctctgctctgttaaggctcactttgcccagccctgttgcacctgtgttattttttttgcattaatgatagtctttctccacaaaagttaaaaatgtgatgcttcctgtcctgcttgtcctatcttctcctgtttctaaaccctctttctctctctctttttttttgtccaagagttcctccttaattagttttgcataatacatgtggtgccttctttatctgaatttcttttcatcctttctggtgctgtttatccaaacacctcccacagctttgttctctgtgcttctcctggttgactcctgaggcgacactggctgacacttggtaaaccagtgaccttgtttgggggctaaaattgacaaaaaactgatagaagaggataaaaaagggtagatggaagcattctgccagctctttcttgattaaggaagaagcagcttaggtgaatataataataggaagttatgttctgaatagttgggaaatatttgataagatactttaagaacaaaagtaacataattaaggcatataaaggatgaaggacaatgctccctaagggaaaaatgtgatagatggacagagtaaaaagtgattatacactgtctactttagagatagtcctttctgggagtcctgcatttgttactattgaaattagaagaatttgcctgggaaagtaatacatacataggaaaagtggatttaaaatatgttaggcactagaagttccattttgcacatctcttcagaaaagttgtctcaattaaaaggggaaaaaaaaaaacaaaaaaacaaacttgtgaggatggaatgagatatgtgtgaagtacattgagacctttgggtgaagttgttacagtgtaactttatgacttgggttttgattgtaatttcaagcattatattcttagatcagctggataaaggaaatagctctttaaccaaattagcagtaataggaaccaaagtaattttttttaaaaaaacttgtgatcagtctttttttgttgttctttttaatacagttttaaagtttacactctgtttacagttattacaaagtattggctacatcccccgtgttgtacaatacatgcttgagcctatattcacccaatatcttatacctcccactcctctgccctgctgttgcctcccgccctctgactggtaactaactagtttctctgtgagtctgcatcttttttgttatattcactaacttgttgtattttttttttttattccacatgtaagtgatatcacacagtatttacctttctctgtccgccttatttcactgagcataaagccctccaagtccatccatgttgctgcactttgcaagctttcattcttttttatggctgagtagtattcgagtgtctgtgtgtgtgcccacaccctctttattgattcagcttttgatggacacttgagttacttacatatcttggcagttgtaaataatgctgctatgagaatcaaagtgattttttaaaaatccattatatcttcaggaagattttgcctctgtgttaaaaccagtaatatttaactttaatttcagcatttttctttagatatgaatagtgttattaatcatgcaagtatcctggctcttttttaaagtcatgttttgtataacagtttttacaatttccattttgccaaagttgagattaatttcatgggtttgagcacagttttctatttacaaacccatttttttagccattatgccattgactctactctttcgttcatcctccatccttctcccaacctgcgtggttcagatatctttatgaatggctttgtcagagtgcactttgagtgaacagtgcatgagcccatggaggttagctatcacttaattatttttccgccggtcgctcatggtctaatcagctgtttgttaggacacttggtcctgttgtgtgagttgctccatacttctttacaagttgtaacgaggtgaagaaactaactaaattgtgaaaacaagcatttacttgtcaccacccatctcatttggagagttacagaaaagccactcaaagtggcactttgagtttttgaaacatcgtgtattttgaacatggctttctagcctataaaatagatagccacctgctgtatagcacaaggaactcagtattctcagtattctgtaatggcctatgagggaaaagaatctaaaaaagaatggatatgtgtgtatgtataacagattcactttgctgtacaccttctgaaactaatggaatattataaatcaactatattccaataaaaattaaattaaaaaaaaagaactcatatgctgtaggcagttagctatttatcccagtgtgagtccttggaaatgtaagcattaccgatttggagttggcctctctgtgcctacatgtgcccacatgaagtatgaaagggttaatcactcagtcatgtccgactctttgtgaccccatggactgtagcctctgtccatagaaatctccaggcaagaatactggagtgggttgccattcccttctctggggaatattcccaacccagggattgaacctgggtcctcctgcatttcaggcagattcttgaccgttggggccaccagggcagaccctagtagaaggaaatggagctctggcccagtctgccaaggtaggggcaagtggtgggaatgctgtttgctttgaaaccgtttgtattggaaattgagatgtgtgtccccagtccagttggcggtggagaaaggccttgactggtagtttgttgcccatgcttggggaaaagaaaagtgaataggtggccattggtgacactgaaaccttctacagcagagtcataatctctgtgaggaagaagtgcatcatgttgtgtggttgttcctttttcttgttttttcttctgtttctccagtgatgggttctttcttaggcaccctcatctttccatttatataagttcatggtctttgcatactgaatatgtttattcttaaagttcagttttgcatgaggacatggatcttggcttattgttgggacttcagcatataaaatagtactgggtcataccatggactcagtaaatatttactgaaagaaatttcagtttaatccatgactcaatctttacttcttgatttttgtgtttgagtgatctagctgtccatgggcttgtgaggatgatttatattttcctctaaaggaagggtgaaacagatagctcataggttattctggtataaaacagacccctttgaaaaccagcctgaggctttttttttttttaaatatagtagacactggtttgatcttctaacaaaaatactactcttaattactgtgcagtctttgttacacttataacctctggaacaccaaaatggcaacacattcaagtctttgcctttaaagatcttgcctttgtagttgtttattggtggttcatcatatttagctggaattgtgtctgtaacattttaatatgtactttatgttttcaggtaaaaaaacaaaacaaaaaaacctcaatctaaatggatttggttttgaattttaaaattactttttcattttacaaaagtacagaataattaaaataatgcaataatggtattttctatgaagtttcatcatttctaattttgtttgtggagattataagttatgatctcttgagtcttcaaagaatttagaaatttgatttcccttttaagtcgaccacattttctgggttttagtttcaattattttgaagccatagagatgaaaattcaatgtgtatcataacagttttccctaggaagtggatctagtttgtggttgacagtagtgatttccaaactagctaatcatggagataacttggtgagcttttaaaaataaatatagctatatttagacctagactttgaaagtaccctttcaatctttattttttaaaaaattccctcatagtttctgatgacaggcaaagtctggtttggaacactgggtccaagaattcaaagtcatgagtgtgattggtctgttagcctactgattgtagtcactccctctgcctggagacttgcttctgaccgtgaaccgctcatggatgacgaggcagatcaggtcctcttctctgaagacagcttattccttaactactttaagcagcagccttatctctgagagcttctttcttcttattcttattttttttaatcaatggttaatggagtggtgttgttgaactgccattgattgagacacagtggtcctttccattgactagagttggaattcagaaactcagtttccttctaaaagtcataactcctaactctgccttggtgtaggagatgtttcaggaatatgtgcgcgaaaagcactggtatcagattgcatgaaattctgcctctcccatgtcctagatgtgttttcccattggcaaaatggaaaatatgtgatgggaatctttagagaggtaaaactgagtttgctttaccactgtagttaataatgccataaaacaataataataatgagatatgagatatatgatataagatgaaataatgcctatgcatgcaaataaagtgtttagtaaatattaatggtgggttgtttgtctttattgttttaagatttttaatgagcttgttttatcattgtttcatgagcaacatagtagtgttatcggtgtttgagtgacatttctgtccgaatataagaagtgtgttgctttcttgttttatgccattgtttttcttgaggagataaattcttcttcgagagctctaatttgccctgcatttgcaatgtaaggtttttctatggttccaaagaaagagccgaggtaatggagcagtgacatggttgattctgcatgaaggtgactcagttttcagcccttgaggtacttgagcatcaggtgtggtgatgaactgcgtctcgtttacgataatgcagccaactctttttggatataaacaatagcacagctcattggacaggagggtagagccggcagtcccgcgagtgtcactggcatgtaaactaagctggtgattttatatcatcctaacaaacgtgctaaatagcgtgaagaaatacaggcccttgaattgtcttggtgctgctgcctattcagcctttctgtacccaggatgacaagaaggctgtaaccagctttcatgaatgcgatatagatttgatattgtactttttattgactatgacacaatggatttgggcactttaaacgacagaattcttcctccttttgaaatgtgagttaacaaaatacttattcttggggagaaattgtcatcacgaccttctccatttgttttcactgtggttaccctccctcctgctcctttatcagacaggcggacacacacccaaacacagtccatactcatcaatacttgctaccagaattgaaccattttgttttcaaaataagattttgcatttcagaagaagatacataaactgggccacacattgaacaccctccagtagatgaccttgaccctcttttctgtctttgttgtctgtgtagaaatgatcaattaggggtgctttgtccaattgtgaggtggcagtagtgacgcttactggccccacgggagcattgagttactgccatctctgtgcagtgtctgatgagtaaataaatgagcaagggtgactgctaaaggctggatgtttttgcatgggtggactatgatagttgaccggttgtttcagtaagagactaagaggaaccccaaggttgtcttcctctagggggcttaaggcatccctggcggctcaatggtagagaatctccctgccaagtgggagacaaagtttcaatccctgggttgggcagatcccctggagaaggaaatggtgacccactccagtattcttgcctggacaaatccatgaatagaggagcctgatgagctacacagtctatggcatcacaaagagttggacgtgactaagcaactgaacaacaacagaggccttaacctgtaaaaattatgaacagttcaggatagttcattatccattcagtttttgcagtttcattggatacctgctatgagcactgtattgtaccaggcacaggaggtgtaaagcctactttagtagattctgatggaacagaaacatcgtaaaataagtgtctttccttatatactaaatcatgcttgtattccatgggtcaaatgctgtgcaacacagatacaaacatggctgctgaacatcgtcagttgctcttttttttttttttttctctctatgaagttaaatagagatacttactacctgcttccacaggttacatttaattgcagtatgcagcccagggagaaatgttagcagctcatttcacttggttccatcgggaagaaattatttgggaatgccttcaattgtgatttttccatacggtagaattcttttctaaaccacagcttatattcctttgaacacaagaagtgtacatcaccaccaggcataataaaaatgaatcataccatatagttcttgtttgtatgggaagttcctagtgaatgttcccctttatatatatgtaaataaatatatctgtatacctatgtacctatttctgtattcattatatgtatttataacatatctatacatatgtatttataaaaggagtcaaactgtaactctgtattagagtttttaatagctagtgacattaagcagcattggttaattttaaaagaaatgtgttgacagcacattgggagtcctgcagagttgttaggtagataagagaaccagacttggagccatgaagctgaagcagtacttcaaaccacagcatggaactgctctgcctaacaaccactgagggagaggcaatggcaccccactccagtactcttgcctggaaaatcccatggacagaggagcctggtgggctgcagtccgtggggtcgcgaagagtggaacacgactgagcgacttcactttgacttttcactttcatgcactggagaaggaaatggcaccccactccagtgttcttgcctggagaatcccagggacaggggagcctggtgggctgccatctatggggtcacacagagttggacacgactgaagtgacttagcagcaacaaccacggaagcctaccctgttgcccctggtacaccaggaacccagtcttctcccaccacgaccatccccactaatgcctactacttatgtctagcacctgcgtcctctgcaagtacatctgattggtggatcctaagtcatgtgttcactcctgagctgcaggagaggccagaaaagaattatgactccccacttctctagtagaaggctggctctgcagccaaaagaacttggctaactgttttaataatcataccagaaagtttgaaaggtagagaagatgaaaatatcatgttccattattcatatataaaagtattgtaaaatgtaattttcttagtttaaaaaaaaatcgaggtttttttgtcagtacaattataggttttatacttttacatatacattttgtttccaatattgtgtgtttttgtattgctgtttacatcccttatgtgtccttttaaatagttgcataataataaaaatgaatgtactttgtgattcttctcatgctggagatcactgataacattttcattattatgaaaaataatatggtgaatatgttcatgtctaaagcttttacatctggatattggatttaggggttaagagcccagggagaaatctttagggaagatggagccttggtcttttttgacaaagattacatttgttccagtcctactgacattgatggtgaccacattaaaattctagtttgatcagtacgaagatagatgttataatgctgtcaggatttatctctcagtatggaattacttctgtggtttttctttcccttcccttttctcatctttatgttttaaattttctccaaccatacatgttacatttttaaataataaaagtgataaaatatttgtttcctccctagtcttgagggcagtaataaattcaatacaatcccctcagtggtttttctctggtacgttccttcttgtggtgacaattttggaggtctttaagcaagcgtattttccatatcacttgtagcagggcattggcgactcctgagaagtgaaccgtcgatgtatcctgcttattttggttggtttggaacacagcaaacttgggtttagatctctgactgtgtgagagcaggtgagtgatattagactagttatttaacctttctcagttctctcatctgcaaaccagacgagtgaaagcacttaccattgctatgagcatcaagtaaggtcctcatctgtgaattcctgagcctgttccttatacagaagagatgctccacagaagtaacttttcttctgtaattttctttaagcagagagggtaaaaattgtgtgaaaactcagtctcctaacctctcccattttaaatgtggaacattgcatggcttgttgttaagtaaataatcgtcttgtaaaggcttccaaagtggctcagtggtagagaatcctcgggtcattgcatgagctgcaggagacgctggttcgatccctgggtcaggaggatgccctaggggaggaaatggcgacccactccagtgctttcctgggaagtcccatagacagaggagcctggcgggctccagtctgtggcatcacaaaagagtcgtacatgactgagcaactaagtatgcacgcacacacacacacacacacacagacacacacacacagacacacacagacacacacacagagacacacagacacacacacacacagacatatacacagacacacacacagacacacagacacacacagacacacacacacagacacatacagacacatacacacacacacacacacacagacacacacccctaaaggaaaaccaataaaaaatattgcactatctggcctttcgtgacatgcttttccttaatcatttctattttttcaggaaaacatgttcctcttccctccatctgtcctctcctccttcctttctctctctcatcattgtatatcaaatgataactttgcaaacatattcagtggtaaagttattaatatgagtgcattattacatatttcagtgctaaagggaaaggagacaacactcaaagtcaggcatcacaatgcaagaattttctagagtgctaattagataaaacagacaatataaggcatcttcagtttggcaggtgagatcacttattttgctaaaactaagagtccatttatggtcatttagagccacatttatgcgttgcaagcatcatttgagacaaaagattttggagatgatagtttaatgagtgcagtttcttccactttagctttttgtttgtttatccttctaagtattttacagaattttttttttctttaaatatagaggatgaagaggcagatagcaaaataaaactagagctgaaatctttaagaccgaaattgaaaatcattagaattactttttctaataaacacccaggacagcatttgtgtgtgtgttttcagttcagttcagttatcagtcgctcagtcatgtccgactctttgcgaccccatgaatcgcagcacgccaggcctccctgtccatcaccatctcccggagttcactcagactcacgtccatcaagtccatgatgccatccagccatctcatcctgggtcgtccccttctcctcctgcccccaatccctcccagcatcagagtcttttccaatgagctttcaactcttcgcatgaggtgcccaaagtactggagcttcagctttagcatcatttcttccaaagaaatcccagggatgatctccttcagaatggactggttggatctccttgcagtccaagggactctcaagagtcttctccaacaccacagttcaaacgcatcaattcttcggcgctcagccttcttcacagtccaactctcacatccatacatgaccacaggaaaaaccatagccttgacgagacggacctttgtcggcaaagtaatgtctctgcttttgaatatgctatctaggttggtcataacttttcttccaaggagtaagcgtcttttaatttcatggctgcagtcaccatctgcagtgattttggagcccccaaaaaataaagtctgccactgtttctactgtttccccatctatttcccatgaagtgatggaaccagatgccatgatcttcattttctgaatgttgagctttaagccaactttttccctgtcctctttcactttcatcaagaggctttttagctcctcttcactttctgccataagggtggtgtcatctgcatatctgaggttattgatatttctcccggcaatcttgattccagcttgtgtttcttccagtccaacgtttctcatgatgtactctgcatagaaattaaataagcagggtgacaatatacagtcttgacgtactccttttcctacatggaaccagtctgttgttccatgtccggttctaactgttgcttcctgacctgcatacagatttctcaagaggcaggttaggtggtctggtattcccatctctttcagaattttccacagtttattgtgatccacacagtcaaaggctttggcatagtcaataaagcagaaatagatgtttttctggaattctcttgctttttccatgatccagcggatgttggcagtttgatccctggttcccctgccttttctaaaaccagcttgaacatcagggagttcacggttcacgtattgctgaagtctggcttggagaattttgagcattactatactagcgtgtgagatgagtgcaattgtgcggtagtttgagcattctttggcattgcctttctttggaattggaatgaaaatacgtctaaaaattatttaaactttttttaatgactttttgaaggaaaatttctaagatacatcaaaataggaatagcatattcagcctcattctcccctactatttagctttaaaagataccagtgtttgcattacttctattttgaccttttaaaagtatttagaaaataaaaatctatgtgtcatataaaaattataaattaatatattttaaagttgttttatttatatacacacatattgttttctggctacaccatgcaacttgtgggatcttagtctccagaccagagatcaaacctgggccctcggcagtaaaaacatggcatcctaactactggactgccagggaatgcccagtaagttgttaaaatacatttaaaaataattcctttttaagtatacaggaaatgaataaacgaaaactatttttcttgttattgttgtttaggagggtaaggaggatttgtgtgaaacattgtaaaaactaacagctgatgaactctggctttgtttgcaagtgcagtaatgttcgtttaatatttatcagatagaaaagacttttaagtgatattgccaaggtactcacagttgccagtgcactcagatgcctaagcaagtttccggtgtgctttttgaatcattacaagtgtttatctttattctgtgtagttttcgggcatagttgatcattattatgtgatattggtagttctcattttacctttccctccccaccccaccctgttactgtctagagctcaagtctcagattttgaattaagttcttcacagagatgatagtatttcttcctccttccatttaattgaaaagtgtccttcacatgttcagttcagtcactcagtcgtgtccggctctttgcgaccccatgaatcatagcacgccaggcctccctgtccatcaccaactcccggagttcactcagactcatctccatcgagtcggtgatgccactcagccatctcatcctctgtcgtccccttctcctcctgcccccaacacccccccccccgaccccgagcatcagggtcttttccaatgagtcaactctttgttaagaccagacataaaataactgttgactttgaaactcagatggacttcccagaaggcactagtagtaaagaacccgcctgccagtgcgggagacataggaaacatgggtgtgatccctgggtcgggaagatccctggagaagggcatgacaacccactccagtattcttgcctggagaatcccatggaccgaggagcctagcggggtatagtctctaggatcgcagagttggacacaattaaagcgacttagtacccacgcatgcttgaagctcagaaacacaaaggaagcacatcaattgtttatgacatatctacactattcctttggcttgactggtttgttgccctttttttatgaagtctaccctcaggtttggggtggtgaatggacacagcatctgttagtgtagggcttctccagtattgggattggggccgggtcattctctgttgtgaagggctgtcttgcgcgctgcagcatgttagcctcatctctggtctctacctgttagatgccagtagcagccaccgctcgtccagctgtgacaactaagcatgtctccagacattcccaaatgttcctcaaaaggaaaaatcgcctctggttggttgaaaaccactcttataaagggttggaccatctaaaattgtgtacatttgtgtgtgggttccctttcctctgtccccaccctaatcctccgtttgtaagctgaggagagaaatgagggagttactttcacattaggctagatccctctttctctctactacatgtaagatacagactttggggaacttactaacccattgcctttttttttttttccaaaccagatagtgcattgggccatttaatcaaagagtaatctgcacacttctcttccctaacttttttttttctcctgatactggtttataattaggtatatggcaactggcatttcagtgataacagtggttcattttctttcttataaaagacatcagtcactatactgtacactgttttaacctttcctttaaaaatcccatgatacagatgcttttgattaacaaaaattccttttgagtctgaaagattctttttgcctgccaacccctcctcccccgttcctgcatacatccccccacctcccaccatcaaaggaagaaagaaaggaagcagcatcaacccttaaattattccaagtactgaggcagctttcccttaagaaattttccctttgactctatgctgtaaaattcagttttccttctattcacttaggaatcaggttgaacattggcctagtgtccatgcaggcaatcatcatatgttaaagagaagcttatttataatgaaagtgtgaaatcaggttttcaagagaaaagcatcctacaaagctacagtttcacatcctacagtttcacaatcagtgctactatgctgaaatgtaaattctgcagataactcagcacatagtagtatttagtgtagtggttgggagtcagcctcagacttctcatccctaagtgaagtgaaaggtgctcagttgtgtctgactctttgtgaccccgtggactatacagtccatggaatgctccaggccagaatacgggagtgggtagccgttatccctaaaacagaaataataacagccgttatctcatagggttgtagtgaagattaaataaggaaatctgttgaaaaattttaggtaaatcacctgatatatgaatgctccctggtatatacgtggtatatagatagggcatggatatataggccttccttggtggctcaattggtaaagaatccacctgcaatgtagcagacataggtttgatccttgggtcggaaagatcccctgaagatggaaatggcaatccactccagtattcttgcctgggaagtcccatgaacaaagtccttggggccacaagattcagatacaacttagtgaccagactaccacgtgtgagtgctcaataattactttattttcactttttaatagtttttctttgttatgagaaaccccagtatattctcatattctttcctcttttcaaaattcccatttctgttcttgaaagaagtattttgtccctttcctccttatccattttatccattattttgtcactcaaagaaattcacgttgggctatctcagttacagtattggttttgtataggtatgtcctatctttatacatttttatggttttgcagcaaatttaaatccccctgagagtttgcattgtagagtgtgataaatctttttttttggcaaatgaacttttttttaatgaggaaaatacagttcctcctaaatatctttatagttcaagtttcagttgcctgtttttttttttttttttcttctatgacacaatgtagactattggccgtttggtttgaaagaggtagtcctaagtttgactaaaaagggtatggtttgagttttgttccctctgcacaagttaagagaagatcccctggaggaggaaatggcaacccattacagtattcttgcctggaaaatcccatggacagaggaacccggcagactacagtccatggggtcacaaagagtcagacacaaagagtgagcacacacacaagttaattttaaaacatttcatttttggctaaaatatatatcagtgagaatactacacaggcagatccagcttactctgttaacaaaatgtttcagaggtgctcaggatgacggcacgatagaggagtgactggttcacgttgaatccatgatctattcattgaatgtcgagttagctccattagaagaaagcttcaggcaaagatccggaatggcaagcaaaaaagcagacatttaagcttgtggtatatcagattgatcaatagattgaccaagtgcttgcttagtaagtatgctaccataggacttttctttttatagaaaatgagtacaagtgatgtatcaggtatgtacatttctttgtgctgtgtgagtgcagatacattgattcaaacttaaataaaagcagagaataatacaatgagccccttatatactcaccacttagcttcagcagttttcaactaatgggtcatcttgttttctgtatatatctccttcttacctgcaaattatatacgtaatttcatctttatatgttttcttgttagacctcttctagaaaaatcatagccaaaagttttcatataatgtttaggggtttccactttccctgaggccccaattaagaaagagtacttgagctaactcctttggaagtgggagagaaaaaaagatttcacagagccttctgtatgatactccagtcaacaaatgtccagtgctcccagattcttgtttctcctcttttaatcttatctttggcatccatcagtgatatttgaatcagaaaagataaaaggatacctgagaaaggctgaactgccccctccttttggccctctccacctggagaagggaatggcagtcctctccagtattcttgcctggagaatcccacagatagaggagcctggtgggctacagtccatgggatcacagaaagttggacatacctgagtgactaacacttcacttctccttcaaggtggctttttctttctttctgtctttttttttttgagccagatgagttaaatgatctaacactgatctacttggatgtgaaaacaaaaaaatccaggactaataataatggagggcattattaatttattgatcatttactacatgccaagcacttctcatgcattttatcacttaaactaatcgacaaaatgatcaactactaggggggtagtatttgtgaacccattttatagatagaaaaactgaagttcacagcatttaagcaacttgcttagtctttgaggttgaatctctctgagattttagccagatataagacaaagctgcctttctccattgcactgacagttggccatacattaggttgtgtgttccaagcaggtgtacatggggtattctgccactatgtacagcatgtataattactttccgtgttgatatgagaccttgcatagtattgtgtaagaaagttctttatgcttagatttgatggaagccaagaagcagctggagacaagaggtagcagctcatgtatctcatatccaacggtatcctaatgagtccaaggcatcatcaactatagggagctactgttgtagtaaattcgctaagtcacgtccaactcttttgcgatcccatggactgtagcccaccagactcctccatgtgtgggatttcccagacaagaatactggagtgggttgccatttccttctccaggggatcttcctgacccaggaattgaacctatgtctgtggcattggcaggcagattctttaccactgaggcacctgggaagtttgacatgtagctatttgttgttgtagttattcagttcagttgctcagtcatgtctgactttttgtgaccccatggactgcagcatgccaggcttccctgtctatcaccaactcctggagcttactcaaactcatgaccattgagtcggtgatgccatccaaccatctcatcctccgtcatgccctattcctcccaccttcaatctttcccagcatcagggtcttttcaaatgagtccattcttcgcatcaggtggccaaaatattggagtttcagcttcagcatcagtccttccaatgaatattcaggactgatttcctttaggatggactggttggaacttctcgcagtccaaggggattctcaagagtcttctccaacagcacagttcaaaagcatcagttctttggcactcagctttcttcatagtccaactctcacatccgtacctgacgactggaaaaaccatagctttgactagacatacctttgttggcaaagtaatgtctctgccttttaatgtgctgtctaggttggtcgtaacttttcttccaaggagcaagcgtcttttaatttcatggctgtagtcaccatctgcagtgattttggagccccccaaaataaaatctgtcactgtttccactgtttccccatctatttgccatgaaatgatgggaccagatgccatgatcttagttttctgaatgttgagctttaagccaactttttcactctcctctttcactttcatcaagaggctctgtaggtataggagcctcctgattattcctcctgtgtccactgttcccttacacccttgtaactgcatgaatgatattttacaaatgttcatcaagtcttgtcacttctgtgcctaaaatctccccaaaccttctcataagtagcagagaagaaaagtcaaattcctttctgaggcctagtgttagtgttagtcgctcagtcgtacccgactcttttcgaccccatggactgcagccctctgtccatgagattttccaggcaaggatactggagtgggttgccactttcttctccaggggatcttcccaacccaggaatcgaacccaggtctcctgcactgcaggcagattctttacgaactgaactacaagggaagcccagctctataatatctggccccgaccacctctctcagtttatgtgctgagctggtcactgctccagcccctcggccttggatattgatgttattctcattcttccaagatgccaagctacttccggctcagggtttaagcacctctgactctcgacatacctggttccttcccatcatttgagtttcagctggaatgtccccactgcagagtagccttcttttctcccagtggcttactttatcttttctgctttgtacttgtatcactgtgtgaagttcttctttctttgttgacatgttgccatcgtgtttgtctctgcttccccagcttcagtatggcttttgtggggtcaggagttctgctttagtggctgctttaatcctctgagcctccataaatgctagttgaacaaatggctaggttgtttggtggggtagttataacgcacctgcacataaaactctcggtcagaaagtacttgtgagctgctgctatcaattgttggagttgttcattccagactggaattcgcttatcacataatgtgtacaagaggtcttaggattgcccaacacagtgcatttcctcaaaaaccaggaagacctccttggtctcatgatccaggccctgaagtccgtgttattatgaggcggctgctttttgccagctttcagctcgttgtggacttgaccttcaaaccggcagcattcagatctcctttctggctgaccttttgcttaggcctagggcaatgttttcatctctgtcaaacttgaccactgccagtttcttaaagagtgtctgtccttctgagaaagagttttgccgcttgtgccgtaatgatctctaatacccaataaactgcaaacaataggggcatttggggggagaaatgctgaaacaaaaaggcgtctgcaatttggaggcagtgctaaactgggtcatagaaaaaaagttataacacgtggaatgcggcactcacaactcccattggggtgggggcagctggacagtccttacaatgagctcttattataagaacaccacgcaatcacgtaattgcagccctttagaaaaccgtaaaaatgtgtcagacattgtacaaactgaaatagtctgggcttgattgttagaccaaaaatttcaaaagtagcagggtctttttaatctaacctagtatttaaagaaaaacaattgaaatgaggcagattttatcattacattatgccttcatgagtttatttctggttttcaaaatttttagtggagaaattctgcctgaatatatttttatttgtccagatccacaaactttaatttttgtggaatttatagattttttttcttaattacaaaattagcatcatatacaatattgttgttgttgttcagttgcaaagtcgtgtctgactctgtgtgacataatagaaaatattttaaaaaaccaataagataacagtcatctatactttaatcagcctgagatagtcatgatgaagatttttgttgaatgatttgtaactggtttgtgtgtatgtgtgtgtgtgtgcatatgtaatgaaagcatttttaattcagtttagggtcacagagtaggtagtgattctaacttgttttgtgttcctacttatatgataaacttttcctctcattaaatagttttataaacacatttcactgtctatattgtgtccatctatttgagggcaattgccctcctcaccctaaggacatttagaatgtctggagacatttttgaatgttacaaccagtgttaaggaaatggttccattggaatacattgcacagaggccaaggatgttgctaaataccctgtaatacacatacaaccccataacaaagaagtacttggcagtagggtcaatagtggtgaggttgagtaaccttgaactcatatagctccctcataattacttgaatgcattgctttgtattgatattaatttccaatattttgttatttgagattagtggttggcacactttctttaaagggctgggtagtaaataccatatgttttgaaggatgtaaggtctattacccaactctagtctagtattgtaatagcttgaaaacagttgtagactacatgtaaattaatgagtatggcaatgtcccactaaaactttatttacaaaaataggcagtgggtcttaaggcagtaatttgccgtcttcttttttaggtaatgctctgctggacctctctgttcttaaatctttgcccttatatctgatgattaccttagaaaagttgtgtaaaatgtgaattgctagatgatcgtgtgcttttaaaaacttagtatcaattcattttctcacctgtatcatatgagattgttcatttagtgtattctagtcccacttatgctaccatcatttcatcggatttggaactacctcctggaatatgggatgtgaaaggctaaggcagtttgccaatttaaatgccttcaggagtcaagcaaattaacgagtaaatcagggccgttttaaatatcagaataaggagtgataaccagagatcaaattgccaacatatgttggactatagaaaaagcaatggaattccagaaagacatttacttgtgcttcactgaatacctgaaagcctttgactatgtggatcacaacaaactgtggaaaattcttaaagatatgggaataccagaccgccttacctgcctcctgagaaacctgtatgcaggtcaagaagcaacagttacagctggacatagaacaacagactggttccaaattgggaaaggagtacgtcaagactgtatattgtcaccctgcttatttaacttatatgcagagcacatcatgagaaatgctgggctggatgaatcacaaactggaatcaagattgccaggagaaatatctgcaatctcagatatgcagatgatactgctgtaatggcagaaagcgagaaggaactaaagagcctcttgatgaaaatgaaagagtagagtgaaaaatctggcttaaaactcaacattcaaaaaatgaagatcatggcacctggtcccatcacttcacagaaaatagatgagaagaaagtggaagcagtggcagattttattttcttggactccaaaatcactgcagatggtgactgcaaccacagaattaaaagacgcttgctccttggaaaaaagctattacaaacctagatagcatattaaaaagcagagacagcactatgctgacaaatgtctgtataggcaaacctgtggtgtttctagtagtcatgtacgggatgtgagagttggaccataaaaaaggctgagtgctgaagaattgatgcttttgaactatggtgctggagaagactcttgagagtcccctagacagcagggtgatcaaaccagtcaatcctaaaggaaatcaaccctgaatgttcactggaaggactcatgctgaagctgaagctccaatactttgtccacctgatgcgaagagctgactcattagaaaagaccctgatgctgggaataggattgaagtcaggagaagggggcgacagagaatgagatagttggatggcattgtcaactcagtggacatgtgtttgaacaagctctgggagatggtgaaggacagggaagcctggtgtgctgcagtccacgaggtcacaaagaggtggatgcaacttagtgactgaacagcaacaagaatgtggcaaaatgaaaagcaagagtcacatcaaaggaaggcagctgcttctcaactctgccccctactggcccactgtgtggttgttcattgtcgctgctgctgctgctgctaagtcgcttcagtcgtgtccgactctgtgcgaccccatagatggcagcccaccaggctcccccgtccctgggattctccaggcaagaacactggagtgggttgccattcccttctccaatgcatgaaagtgaaaagtgaaagtgcagttgttcagtcgtgtcccactcttcgagaccccatggactgcagccttccaggctcctctgtccatgggattttccaggcaagagtactggagtggggtgccatgaggtctttgtattcagaggaaccagacatccaaattttagtatgaaaactcccaatttttaattaaatagtctgtagaccattaagccatacctgtggactgtgcctatgggccaccatcttgaggacttctgacttatcacgaggtctacagtgtagtgaaagttgctcagtcgtgtctgactctttccaaccccatggactataccatccatggaactctccaggccagaatactgcagtaaagtgttagtcactcagttgtgtctgactttttgcgacccccacggactgttgcccgccaggctactctctttgggattcctcaggcaagaatactggagtggattgtcattcccttctgcaagggatcttctcaatccagggattgaacccaggtctcccgcattgcagacagattctttaccagctgagccacaagggaagcccaagaatagtggagtgggtaacctatccctaccccaatgactcttcctgacccaggaatcgaactggggtctcctgcattgcagacggattctttactgactgagctatgagggaagctagagatagagacaaatgtccaggctcttggccatgtgtgttagacactcagggccctaagcatcatgaataagagctataagagttggcagtctttgggtctgccctcacagaaaaggaagttttgtaactcagattagggaggtgcactgtgaatcatctgcctggcttggagacatttcctccagggttttctgaattagtcaagaagaaaatcagtctgccacttctccgttctctcaggacatttccagaatctatgaagacgttaacctccaacctgtctgaggccctaaacagtctgatgccctttgtccttagtgttctagtctctttcctcgttcatgcatttcagccccactgcctccactcaatcatcgattctctacatgtttgctgagctcctactatgtgccaggccatgttctggacacagagaacaggataggggtgggtgggggccactggtggggaggggattggggtttctaagttcttaagatggttatgggagataagatcagagagaaatgaccccgggatggagggggagatgggcgcagtgggctggagtcttcaaactttgttgtggataagaatctacctggagagcttgttaaaacatcaatttctgatcctcactcagaaatactgatgcatcacttccggtgtggagcccaagaatgagcatgtctaacaagcccatggacagctctggtttagggacttgtagaccaatggcaccccactccagtactcttgcctggaaaatcccatggatggtggagcctggaaggctgcagtccatagggtcgctgagggtcggacacgactgagcgacttcactttcacttttcactttcatgcattggagaagggaatggcaacccactccagtgttcttgcctggagaatcccagggacaggggagcctggtgggctgccatctatggggttgcacagagtcggacacgactgaagcgacttagcagcagcagtaggccattgtaaggagctttattttcctcagagataaatagggagccattggagaggggttctttgtgcataggagtggtatgatctgacatgttttacaaggatcacacagtatattgaacacaggctgcaagagagcacattgtaggtggaagagtcaagaggcttttcagtcacccaaatgtgaaatgatgatggcccagatcaagtggtaacagtagagataatgaaaattagttacatttgagatatatcctaaaaagaaaaccagtgcctcttgatggattggatgtagggtgtgaaggaaagaaatgaattgaagataatgaagttgaccacagttttggaaatgagcaagtaggctgaaccagatgaaggttatttatttattttaatttcttatgtttcgacataatggaagaatgggattggcatctactaagatggagaagagcatggcaggagctgattgggaggggaagatgtctgcagtcctctcaatggagtaggctggtggaggtgactgtggagttcaggacatctgaaccaggtgtttaaatccaggagcctggctcgtcaccagggctgtgcttgcagagagaggaagtcaagctgtgaaccctagggtgctctgacatttaagaaggagagaagaggagaaaactagcaaaggccactaggaagaaatgatgaaagaggcagggcaggagaaaacccaggcaagtgtcaaaccctgtcaagaagcagccaaggaaagtgtgtgtgaagagcctccttactcttccctgaacgcgagaggcttgttcacacctgaggacttttgtactttgctgggttgctctttccacccatctcctagctcattctctttccccaactatagacctgtacttacatgtcaccttctgggtgagggtgttgcccctgaacagcctgtgtctaatgaagacagttgcctagcatctggctggtatacagtatttggtgagtgaatggtgcagatataactcttttgatgggagcagaagttgaggtgaaaatgtgttaaagccttgcactcagggtgtggtgtggtttatggaccagcagggtagacttcccctgggagcttattagaaatgcaggatcctgggccctaccctagacctacagaatcacacagcacttaataagatcctaaatgatttatttagacatgaagacttgcacccaaccctatatttagttctttttgtgtttggcaagaggacaattgggtatactctgaatagtagcaattcagtataagaggttaaacctatgaaaatctgaagagtctgtagttccttctgtatttaatcagttgtcatctatgattgtaaaaaattgtgagaagaagctttcaagaatactttataagctatccaagtgatttctgagctttattttaaattgacctgagctaggagtgaatataaaatgcacagcatcaggtacatggtacacagttttgattgaatgaatgctaattctgttttctgtgttttatgatataatcgtgcataatgatttatatggtcctcagaatgcaggacctgtaaatgcatggttttctcttaaagtcttctcttgggtcttgctgcttctcctataggaatttgattctgtaagtggtgtttttaacctgggattattcatcctctgcaggcagatggctgccaccctttaatctctcatatttctatttggctgagataaacacttgatgttcttttaatactcagaccttgggtttattttagtctgagagagaacaaataatatatatactatgagttttcttacagtaatacttcctttttatttttattttttgactgctgaatattgtttttcctgaataccaagcatgcccactttgcagtttagagtaagtcctgtattttataggtcattggtttaggataagaagcttgctaggaactttaggtaggtcagtccactttattctattacaacatcacagttttagaaaaatcgatttgctcgccattcctcatgtgcacatttactacgcatccgtctgaattcagagagcctgcagagtagttagccaggaagtggtgttaaactgtgcagatcaaaaacaatgcaatataaactcatgcatatttttgcacgcacaggatatgggagtacacttctggatgtagttttatctctgtctctttactcagttcaagtccttgttggaaattgatcagcagtgaaggggttccatcatttgttattggacacaggaggcaaggccctgaggttgttttctaaccctggcgagccttttcacttttccttttagagtttgtgttttatagcctttaaaatggggataattaagcatatcctctgttcttttgtccagttatttggaaaagcaactataaaattatttatacatattgaatttctcttttgataaaaatcacctcattcttcaaatcttgctgaagcttcaacatagtaggaaaactgaattctagattggtaaaactttcttacagagcaaggattgacattttctccaaaaacccagatagtagatattttaggctaggagccacgtgggctccgctgctatagtgtgggagcagccgtggacaacatgtcaacgaatggaaggggctgtgtgccaagcaaactttatttatggacattgaaatttggatttcataaaattctcatgtatcatgaaatatcattcttcttttcatgattttcagccagttaaaactgtaaaactctattcttagtgtttaggccatgcagaagcagagagcaggcctaatcgggctggtgggcagatctctgtgatagggaagaagacctggctatatcaactgtagtcacttatttaagtactgatttttttttttttgcatatgatttttaaaaattgaagcgtatttgatttacggtgctttattagtttcagctgtacaagaaagaaaaatctgaaaaagaatatatgtgtatattctttttcaaattctgttccattataggttattacaagatattgaatatagctccctgtgctatacagtaggactttgtggtttatctgtttcatgtatagttgtgtgtttctgttaatcccaaactcctcatttatgcctcccaacccttgcttttctttttggaagaccataagtttgtttcccatgtctgagaatctgttttctgtcttttaaatatactcatttgtatcttttttttttagattccttatataggtgataacggcttcccaggtggtgctagtggtaatgcaagaaatgtaagagacatgggttcaatccctggtgtgggaagatcccctggagaaggaagtggcaacctactccagtgttcttgcctggagaatcctgtggacagaggagcctagcaggctatagtccatggggtcacacagagtcaggcatgactgaagtgacttagcacatataactgatactatgtggtgtttgtgtttctcaacttacttagtatgataaactgtaggtccatccatattgctggttgtggcatcatattattctttgtaatgcctgagtggctcagtgatcagtgcaaggaaatagagggaaaaatagaatgggaaagactagagatctcttccagaaaattagagaatctaagggaacatttcatgcaaagatggccttgataaaggacagaaatggtatggacctaacagaagcagaaggtattaagaagaggtggcaagaatacacagaagaactgtataaaaaagatcttcacaacccagataatcatgatggtgtgatcactcacctagagctaaacatcctggaatgtgaagtcaagtgggccttaggaagcatcactatgaacaaagctagtggaggtgatggaattccagttgagctatttcaaatcctgaaagatgatgctgtgaaaaggctgtactcagtatgtcagcaaatttgaaaaactcagcagtggccacaggagtggaaaaggtcagttttcattccaatcccaaagaaaggcaataccaaagaatgctcaaactactacacaattgcactcatctcacacgctagtaaagtaatgctcaaaattctctaagccaggctttagcaatatgtgaactgtgaactttcagatattcaagctgggtttagaaaaggcagaggaaccagagatcaaactgccaacatccgctggatcatcaaaaaagcaagaaagttccagaaaaacatctatttctgctttattgactatgccaaaatctttgactttgtggatcacaacaaactgtggaaaattctgaaagagatgggaataccagaccacccgacctgcctcttgagaaaccaatatgcaggtcaggaagcaacagttagaactggacatgggacaacagactggtttcaaataggaaaaggagtacatcaaggctgtatattgtcaccctgcttatttagcttatatgtagagtacatcatgaaaaacgttaggctggatgaagcagaagccagaatcaagattgctgggagaaatatcaataacctcagatatgcagatgacaccacccttatggcagaaattgaagaagaactaaagagcctcttgatgaaagtgaaagaggagagtgaaaaagttggcttaaaattcagcattcaaaaactaagatcatggcatctggtcccatcacttcctgggaaatagatggggaaacagtggaaacagtgtcatactttgttttggggggctccaaaaccactgtggatggtgactgcaaccatgaaattaaaagatgattactccttggtaggaaagttatgaccaacctagacagcatattgaaaagcagagacattactttgccaacaaaggtccatctagtcaaggctgtggtttttccagtagtcacgtatggatgtgagagttggactataaggacagctgagtgccgaagaattgatgcttttgaactgtggtgttcgagaagactcttgagagccccttggactgaaaggggatcgaaccagtccatcctaaaggaaatcagtcctgggtgttcattggaaggactgatattgaagctgaaactccaatactttggccacctgatgcaaagaacagactcatttgaaaagaccctgatgcaggcattgaaggcaggaggagaaggggatgacagaggatgagatggttggatggcatcatcaagtcaatggacatgagtttgggtaaactccgggagttgttgatggacagggaggcctgaagtgctgcaattcatggggtcacaaagagttggacatgactgaacgactgaactgaactgaactgaatgcccgagtaatattccattgtgtatatatatacaacatcttaaactcttcatctgttgatggacatttaggttgcttccatgtcttgactattgtaaatagtgctaccatgaaccttggggtgcatgtatcttttaaaactagagttttcatttttcctggatatatgcccaggagtaattttgctggatcttctgaccactctgttgttagggttttgttgttgttggagaaacctccatgctgttctctgtggtgtgtataccaatctacatttccagcaacagtgtaggagagttccttttctccatgccctcttctgggatttgcatttgtctgcatatggttttgatttttctctcttaggtcaggatttgtgtccttgttgtctttcttttttattaaggagaacgttgtccaggttgcagtgaaaacattgctgaatgagaacttgcattctgggctgttgttttcattcatggtaatattgtaattgtgggactgaaaagaatcttgtcacctctcatacgtgaccctgggcaagactttgggtgagtcatttcagaatgctagctgtttcagaatgttctgtttcatcatgttctaacggatgatgattacattagtgaccatctctgtacattgtcctgtaaaaatggtatgaagagaagagtggcctgggggatgctgtggtgtctgtgcttagtcactcagtcgtatccaactcttcgcgcctccatcgagtgtagcctgccaggttcctctgtccacgggaattctcagggcaggaatactagagtgggttgccatgccctccaccaggggatcttcccaatcccggcatataacccaggtctctctcattgcagacggattctttactgtctgagccaccagggaagcccaagaatactggagtgggtagcctatcccttcttcaggggatcttcccaacctaggaatggaactggggtttcctgcattgcaggcagattcttaaccagctgagctaacaaagaagcccttgggggtggtagtggatagcatctgattgaattataatccattttaatatttcttttacttactgaacagaagaacacattctctctcgaaacacaaagtgagaaatctgaaagttttgttgacttgttcaaaaagtaaagtccattataaagtaaaagaattatgggactattcactcaattttatttttattctgatctacaaatagtagaggtaatcgaagtgcagtggatatcaatcagatggggttttttctttcctccggtgaattcttttgtcagccaatttgatggtatctgcaggcactctcttacactgatgtgctccagggtctctttagaatgaaactgatgggaaatagcctgtcagtgtcacctgggaagtggtgagactaaacggtgacagctagaaagtgattcattcccagtcttttgctatcagttcaggatctgaatgaaggaaggaaaaagggaaaaagacagtagtaataagaggaaagaaaagttttaaagccattggatttttgcccttgacccagatagctaccatacttacttatgtgaaatataagttatgtcaataaaatacggtgtttttgatagagtgagaagtattccagctttattttgtggtctgcacctcaactgctcaacaatacccaatttttggcatctgaattccgtaatacagttggcttgaaggacaaaaacatacaaaaaattagcaggaaatcatactgatgtttaatggcacatgtgttttcatttgcatccctgtttggctgtttaaaaatgaatgagagggaaatcactaactaaaaatctatggtttaggacagttgaagacagaacgttacatttatatggcttttactatagcgaaaggagagacttccctgatggtccagtggttaggactctgtgcttctagtagggggtgagggtttgatccctgggcagggaactaagatcccacaggctgtacagcatggccaaataaagcagtcaaaagactatagttatagagcctcataataatgttgtggaagttgaaactccaatactttggccgtctggtgcaaacagccagctcattggaaaagaccctgatgctgggaaagatggaaggcaaaaggagaagagggtggcagaggatgagatggttggatatcatcaccaattcaatggacatgaacttgggaaaactatgagagagtgtcagggacagggaggcctggtgtgctgcagtcgttggggtcgcaaagagttggacatgacttagcaactgaacaacaacaaaagcaatgctatgagaaattaggcttattagtgttttgaatgtgagtgactttgttatacaccaccaacacagtgggcaatagcatggctaggatgagctagatacagcgctacaggtagatcagagcttctcaaagtgtcatccaggaaccctgggggtctccaggattcctgccattcccccaggtcaaacatacttttataataataacagactgttattttccttttttaaaatgctcatctctcaaagagaatactatgccattttatgttagggacttgagcatccttggattttgccatctgcagaggtcctaaaacccatccttgtggattccaaggataactctatacagaagagtttcgcagaggctacataatgtgttacaatgtcattgttctcatgtccagcggactatatgctagtgagttatcttgtgttgtaaaattttctgttttaattcctaagaagataaatacagatagatataacccacacaaacacaagacatttaagagtttaaaagggtcctaaggaaagaaatggcagtccactccagcactcttgcctggaaaatcccatagacggaggagcctgatagtctacccatagggtcacaaagagtcggacacgactgagtgacttcacttacttacttacttaaggcaaaagagaaaatttgaaaactgttgtttgagatggattgctaagcctagtagaagtgtggtttcgcttaatgccaaaaacagctctagcaggcagtttctgttatcaccctcattgagcatatgaagtgacaaaggcctggaaaggttaatatcgtgcagaaggtcacataagtagtaagttgcgaggtctgaatgtgatcccaggtttctaatacttaattcttctgctgactgtgccagcaggcatgatgtgcctctcagagaagcaccaggaatggaatggcctatatttgacactaatgtttcagaagaagaactaacttctaagaaccttggtgttcctgccaggccccagaatatagaaagaaagattctccttctggacagtgtagagcagagaccacatttctgttgagtctaaccaacaagtatgtttgatttgtcttgtacagtatgaaaaatcaaacaattaggtgtcattttcataatctgggagttttcattgaaaaaacaagttcaggttgcaggctaaactgaaaaattgaaaaaaaacctaactcagctggaatggtgttcccacagggccacagtcagttacagattatgtcagctgttttttttttttttttttttttttttacatgaagcacgtggactctatagtttgccacagacctcaccactcctgtgaggtctgtgcataaccctacagatcatgacctcctttatgttacctgtttcaggtattggattggtgatgtctgaggatgttctgtcttctccataatgtttatagccagtctgttcttaacttacttcaaaagacactgacagtaaaagggaaacaatatatcccactctgaccacctcaacctggttgtagtaaagacctcactctcaatgctgaacagacaagttgcttttttccttactaaagcctgaaattctgattcatttaaagaataaagatctgccagtgaattaacatttatttttaaatgtgcagccctttcctttttaagtgtaatagtgaaataagcacattacacccattgccctcatttgatgtttattttagtaatgtctattgtcctcatcattatcatgtctggaccctttatgaaacttaaaatgtttctgtgcacgttagatcagtcatttgaaacaatttgagattgtcaactaaaggacttcattagcctgggcatttggacaaaattattgaattttaaattcttgtactttaaaatatctcaccatttcagcagtgcctatcagccattatcataattttaaatatatatctgtttgtgttttccttcctttgcttcaccctagactctcagtgtcataaagctgacaattgtatctactttcccacaatgtgcattctttgcctggaacagcgtttagcacataataacattaaataatggaatgaataaatgagcaaatatacaaatacaccagttgtgtatatgataaatatattcttctctaccaccaagaattacattaaaagattttcagtgaaaattgttatgcttcctaatttgaggactaaattggggagatgtgtatttcttattttccacgtaaatatgtatccgaaagtgcctctgtggatatatgtatttttccttttctatttagaaaagctcccgcttttcctaatgcaagatcaggaggaaatttacttatctatccagctaagaataagatgcagcttgagacctggatgcaagatgagactgctgaactcgaaagttcatcagggattcccgcatactaaaggacactctttctgcgtttggaagtggctgagttactcagccattagaaaagtctcatgtgtagcttttaggcagtgttctccaaagagggcatctagctcttaacctattgctgaaagagaaatagcattgtctattaatactactggaactaaagatgaatagtgaattggccttgatctgacagcgagtttgactttgatagctcatcccttaaaaaaggttcttttatatttatgaaaaaaaagcatgacgtcaagctgggtgggatgggggggttgatatcaatatttaagagcaaactcgtagggcttccaaaaaaaaaaaaaaagccctttgtgtgaactcttttttttttttacatgcataactaattagcttaggttattataagcagggctgctgtgatgaagtttccggtggtatctcgggacaccttgtttatagtgctttctctatgccagtctacgaatcggaattacagaaagtagagggaacggatagtctactgtttcttgttggattggggccacctaaaacgtggttatgctggaaatgctagaatataatcactatcaggtgagctttattcttctattcagtctctgaaatgtaattcataaatcgagtgtttcagctttgcgtgttattgtaatagacacacagttttcagttggtacgtgtcttcccatttaatgttgtttattgtttgatgccataagcatccaatatagttttgaacagagtaaatattagtaggatttttcccccctgtgcatggctgtattctccctgtgactcctagtcatagctcgtaagattaaattgtgtttctcaagtaaaaagtgactatattgagtatcgttgattttgtttaaaagctgcgtattctctattaatgtcttataagaaacaaggtgaaaatattctggtggcttaatatacatgcctttaaaaacacatccaaaaaagaaaaaaacaaataaacacatctatggaagtgtttttgtgtttgaaagaaactgcttcatgtggaactgctttttatgtcaagatcttaattaaaatattgaatactcatgtcccaatgaaagcgggaagaattaatctgctactggtggatttaatcatcagaatgtttctgtttatgttctacaaccaaccgttttatagttgtttctaaaggaggttttgtttttgtgtttttaaacaaaacagaacgctattatatttgccaatgaagactgaaataagttatacaccttcttctggattattgttttgatcttaataaactttcaggtgtgtttgagaaaatttttaccctacagatagttgcagatttttagctattatgcatgagaagaagggcacaaggttttaaagagatggactgttaattagcagggaaatgaaaccaggcagagtattaacccaaatccgaagagttagcctttaaacttcagtaatagcaaaatccatcagcacagtgcctggtacctaacagaggcttaataatctattctgttgacggactggcctgtctcatgtttgcgcctgaaaagaagagctgtccaaaactcaccaataacagcactttcttctcttccctccatggctatgttcaggtgcagacccacctcgaaaaccccaccaagtaccacatacagcaagcccaaaggcagcaggtaaagcagtacctttctaccactttagcaaataaacatgccaaccaagtcctgagcttgccatgtccaaaccagcctggcgaccatgtcatgccaccagtgccggggagcagcgcacccaacagccccatggctatgcttacacttaactccaactgtgaaaaagaggtaattcatgtctcctcccctctcctttctcttacactgaatgactgtctgtcggatctccctcctgcacttgattgtggactctagtctgtccgcgtggccaccttcaccggcctttgtcccagacaccccatgctagctgtcatcctccagcctctggtccccgtcactgtccctgggttattgggttatggctccaggcaggggacttggctgcctcggagcagaacccggaggcgagggaccctttttctcctatcccatttctgcttgttagctgaatgttctcttccattgcctttccatttacaaagcattgaaaatgcagggagagaagggaaggtggaaaagggatagcaaaaatagaaaaggtgtcggacaggcagtttagaagttccgcttgctgtgaatgtctggaatattatttttatttctccctgagctggaaaggaaaaacaaaaaaagcacagagggtgcatggctggattggaagaatatagtacgtgagaatctaacagagaagcaaagatttcctcgctaggtgtattcggtttccttaataaattgctgctgctggtgaaagctgctttttataaaggctgggttggagacaagactcaaatatacctcaaagctaactgtggcaccaaaatttgaagcctacctaaaaggcaagttgtgatttaatgcctgttatttccaaattatgagatgctgagcatcattttcatggagtttgactgtcctctgaaatgttcacgtgatttcagagataacccttctgaagtttggttgattttaatttctagagggactaagtcttctcccttttgcccaaaccaaccatcttatttttctctgtccatgcttgtcatctgtcaaactgatttgatggaagttcttcctttattatttcacttcttggtcacattccactttactggagagctagttcatcttgttgctacaccatcaacctcgtgtgaaaatgtcactgaacagtcacttgcaaatccaagtcatgggctgattttgcttgtgtttttgcagggattttataagttcgaagagcaaaacagggcggagagcgaatgcccaagtatgaacacacattcacgagcatcgtgcatgcaggtactgaatgactcggcagcccaaggatataacactttgtaatgaggatctatatttgtggctaatcacatcttcttaatgactttggatttttgcccccacccccattgatttttttttttccagttgagaaagctatgaacagtgctgttttcttcattatgtctcatgatttaaaaactactagggaaatgatactaaaatgcattttcccctgagttgctgtaaggtgttaaacagtgcttaaaatacataaattttaataaataagatgtaaactgctgtacttcatttagataccatcatcaaagtatgttatacaaatttatgggctagcaacttggacagaatatctgtaaaaccaagatgtgtgtatgtgtaagatctatatagttttataaaatgaaatctcatgaaaaatatatttggaaactttattcatttaagataattcatgaatattttcccaagcaatgaaaagttcttctgtggcatcctgtttaatggatatataaattatgttacatccatttattcattatatttgtatattttaaatgtgtgcatggatatataagaggaagaaaaaattttttttgctttttatcaacatgtatgactcttttcataaaagaacaaattatttaaaaaattctctcacaccaaagccactaatgtcctttacctgaaaaaaaaaaagattaaacatttacaaagaaaggttgctcataagtcttctggcccattttccagtttaccaattcacttggaatgtcatctcttaaacaggacataaattggtatacctggaaaggaaacagtattggcagttactcaaaactgacctccatttatccttctctggagccactcagtgacgctcgttttttgagtgtatgctgtattcttggcactgtgagcacttcatatggtttgtcctgaaatctcacaagaatccaataagggcatgagtattattaaccccattttacagattggcacactgtgactcttaaagattaggggcaatgatccaaaccagaaagggggagagccaagattctgacaagccccatggtgttgaagcctgtcttctttaactgtggcaaaaaggtacacaggggcatccctctgagttctgagctttcactgtgtacttgtgaagcactgttaagacccaagcaggtgtttgcatgctcgcacgtacgcgcgcgcgcgcgcacacacacacacacacacacacacacacacacagacataccaattagatcaaatacataagatgtttacgaagaaatgttttcacagacttgtctttgcaactgctgcaatgcacatgtaatcactgttgtttactatcgtgactgatgttttggtacttcagaaataaaattgatctagagggaatgtcagctccacgactgtaatgataacctcgtcctggtgctctcctccgggagtgcaagcgcactggcaggcatacaaggagagacttagtgtacaagttattgtaagattactgcagagttaaccagtggcctgggagacacagtgccccccacacctctatgggaacaaagggttgaacagccatctgtggtttttttttttactccagggacggtgtgggaaatgtactggatgtaaatttagatgagaaaaggaaaaggcagctacattcaagatgaagtttcctggttcctctttcctgtttagggcaggcagttttatacaacaattgaaagtttagttcaaactgtggctctaactcttctttgatttgtgactttgggcaagctgtttcccatgtatctcacctgaaaaattgctgtaataatagcacctattctggtagggttattgtcagggtaaatcagttagtccataaaaagccccgagcccagtgactggcacctagtaatcactcactatgtgctggttgtgtatatcatcctcctcatcacccattagcattaatggtcttcaataatgtactcctttggagaggaagagaacagttatctcttagactctactaaaaagtgttacctctttagaccaggaaagaccatggatctctctttggattgctttgcacagtttttgcttatatctgtctctcttccattgcctttttccctcagatggatgatgtaattgatgacatcattagcctagaatcaagttataatgaagagatcctgggcttgatggatcccgccttgcaaatggcaaatacggtattggtgatctttttatttttctaaaagaaaagcttgagatattatttcccatgtttttttcctgttcctgaattttcagtttctctttgcaagtgattcttttagaagttaattcatgaggcagagaaatatctcaagatcacagataaatgactcagacattagaaattaagaatttctcgtgagtttatcagtaaccccatgataaagctctgcagtccctggagtctgagttcactttcagtaacatgctaggttttctaactcccctcgacatctgatgcccaacttagtatactgctgccaagggaaatactgcgtgctctgttatttacagtggttttctagtcagcttgaaaacataatgcactttttaaaggagatcctttaccattgacaggtgattaagtgacgttcagtttgccccttttcaatggcaaatttattccagttttagttcattaagcaggggtcatatttgctcttctctgttaagtatgcctctctgcagttggagccttgcctgtagagtttattttctttcactccttccgtttgcatcttacttggttcttgcaggaattccttgagtcatgttgggatgctatcattgccctccgttttagggttagtaaacgttagcttgtgttgccctaggttatacagctcagatgtgtcagagctgggacacggtacatctttgaacgcctgctgctgctgctgctgctgctgctgctaagtcatgtctgactctgtgcgaccagagcaaatatgcgactctgtgtgtcccatagacggcagcccaccaggctcccccgtccctgggattctccaggcaagaacactggagtgggttgccatttccttctccagtgcatgaaagtgaaaagtgaaagtgaagttgctcagccgtgtcttgactcttagccatcccatggactgcagcctaccaggctccgctgcccatgggattttccaggcaagagtactggagtggggtgccgttgccttctctgctttgaatgcctagtcccacccttttctgttttctatacaagtaatgccatgagactatcatattctttagtaattagtatggttttgggggtatactatttttattaacatttaaatttcaccaagagttcaagaatatgctagccttctgttcagatttttgaaatgaaaataaaatggacaaagagctttaaggatgcaatatatttaacactgcataatatattcaccagctggacaatctagggggtggtgtaactatacagttaggagacaagccctggaattggaggaagaacctaccattcagcactaaacagaggactctggttgctgacagaatctccccttgacttcagacttgacacaaactgagcaaatctatcagcatacacaaaccagtgagttcaggacagttatacaggatagattggccagagctggttcggattgtgggagccagtctcaagcaagcgagattggttgcaggatggagtcatcttttaaaaactgctaatttatggggtcgcaaagagtcggacacgactgagcgactgaactgaactgaatttctacgcaagttcctaagatgcttttcctaaacagggtagtaattggtttctaaaagattaacttccatggtggtaaagagggtgaaagggagttgttgctagtggttatagaaattaagatttgcaagatgaacaagttctggagatgtgctgcccgacaatgtgaatatacttaatgcaattgaactatacacttaaaaacaattaaaaacggtgaattttagatgatactttttttaaccacagaattttttttaaagactaaattccaatgataaatttccttggcaagggaatgtggtagcttttacttatttataccaaaatccctagaaaaccagtttttttatagttacattttcttttctgtcttgatccagtcctttaagtcaccttctaagtcttgaggagtaaggactcccctcaaaacctctgagttttttctagagtgtttagttttatcaatttactacccgtttaaactcaccccgcattttgaaagcactaaatattatttctaacaaatgttcccatgccaaacttgtcccactctctttgagccctgggtcagctgctgtggaaccctcttgctttcagctttatgcatccgtgaggcagactgtgcctgtcagtagtcagaatcccaggacagacaggagcaaaacccttggaggagcttacgctcaggaatttatatttttacatatatccatggggttgctaggggtcagacacgactgagcgacttcactttcacttttcactttcatgcattggagaagggaatggcagcccactccagtgttcttgcctggagaatcccagggacgggggagcctggtgggctgccgtctatggggtcgcacagagtcggacacgactgaagcgacttagcagcaatagcagcagcagcagtccccttgcagcactaattagcaatggccgagtcatttcagaagaactttgctgaaaagggtggtaattttccagtggcatcaaatggatacctgcgcatactcaggagaactgtaggattgacatgattcttttaaattattcttttaaaaaaagttttccccagtgatgaggacctcagatgtcatctgatctaacctagtactcactgccttaatttcctcttgcatatcctttgtattcccctccaaaatatcaggctttcagcttcttgaaagcttccaaatccacactcacaagtgaagcagtgtaacacagtggttgggagttgacgatttaccatcagacctggattcaaatcctaagtctgccatttacagcctgaccttgcacattatttagtgtcttgaagtcctccatttccttatttgtaaaatagaactgatcattgtttctccttgacatggtcatctcctaaattatgaattgttgttgtttagtcactgagtcctttccaactcttttgtgaccctacggactgtaccccaccaggctcctctgtcatgggatttcccaggcaagagtagtggattgggttgccgtttccttctccaggggatcttcccgacccagggatgaaacccctgtctcctgcattggcaggcagaccctttaccaccagccccctgggaaaccctaaagtatgtacagcatttagcattggaaacatagcttgtactcaacaatgtctaaattattatatataatttattatagtttaaataattttgatagtattttatccgggtgatattcactcagcaactgtaatatgccaactctatgttagaataatatcatactcaataatggaaatatttatcatagtgagtctctctgtggatgtggatcccagtttgccccgtggagaacttgtccttgtgacaaccctctgaagacatgacctttagactgaatacccgtgtctcctcggtcagtctacggtggagtagatatcctagtccgattgctcctgaactcactttaagattgatttggcctttattagatgtctcatatgtgaccagtgccgggtgaggtgctttggatgcagctgagtcaggtctccttcctggtctcactgggctgacaagcttagaaaaggagaccacttcagacttgaatggagaaggatgattcagaagcagagagaccatctcaggggagtccccagataagaaagaatccccagggcagactttgattaattcccagtcaagagaagggtaacctgcaacaccctcaggggtcactgactttgtcctggtccccatttctcttctgtgttctccacatcagagctttcccacaagaaactatttcggcattttacaactggcagaaagacacagtaacacagcagttaggaacacagactctcagccagacatctgaattcaatacacactctggagtgagttgtttgtctttgcctcactttcctttgctggaaaatggggataataatagcatctaaaacaagagaacctatgctgttacttactagctcttattcttgataaaattgggttttagttgttagaattaaacaatagaaccactacaacttactaacatgttaatcttttctccacagtggagtttaaaattaatattctttatgttggacattttttccttttagttgattctttgaaatggtctatttcaagttaactgttttaaaaaataaagtggaaagaacacttagagaggaaactatcttagagaggaaactatcctaagggaattggagtctagaaataactattctgagagcacaagggccctcttgtaccatcgcaaacaaagaataaaagtcccagtttacttgtgcttacagtacttaattgatattcagagaaggggaccatccagggagaaaaaaataataacattttgcaattatcattaacttggaacaatattcattttggtggagcagaacattgaagaacttgattcagacaaagtttagggaacatacacacacatgtctaccttctctttatttgtcctaatttgactgtgtcttttactgtccactgtacagctcgtgcactggaagtgaaatcttgtccatcaggttaatgtgctggataaaaaccctgcaaagacactatgtttatgttaacagaaggggtgcttcctcttccttagcttttttttttaatgtaaatttatttattttaattggagattaattgctttacaatattgtattggttttgccatacatcaacatgaatccgccatgggtgtacacgtgttccccatcctgaacccccctcccacctccctccccgcaccatccctctgggtcaccccagtgcaccagccccaagcatcctgtatcctgcatcgaacctggactggcgattcatttcatatatgatattatacatgtttcaatgccattctcccaaatcatcccaccctctccctctcccacagagtccaaaagactgttctatacatctgtgtctcttttgctgtctcgcatacagggttatcgttaccatctttctaaattccatatatatgcgttagtatactgtattggtgtttttctttctgtcttacttcattctgtataataggctcccgtttcatccacctcattagaactgattcaaatgtcgtccttagctttaaaagtgttattttgacctagtaaagaaggtaactgggggaacttttcaaaatgagacaggaaaccactgaatcttttcctaaatttgcatggctaggagactgatttttaattagaaatccatattattttaatcagcctccctttgagtagctttatttatataacagctgttaatataaagcgtctaagccatcatttagagcagtctttcaaccttggtactgttgacatttgggatgggtaatcctttgttgtggagactgtcttgtctgttgtaggatgtttagcaggatccctggcttttacccactagaggccattcacaccttgccatcccacagtgacaactcagaaggtctcgagacagtgacaaatgtcccctggggaaaaggggccaaatcacccccattggaaaaagatttggaatatggagtagtcactttagccacacacatcccctcatttctcatttccgttgcaatccacgggatgcttggcagttcatatggcggatagttttgttaatcaaagtgaaaattagtttgcccccaaaactgtgacttccttggtggctcagacagtaaagaggctgccagcaaggcaggagacccaggtttgacccctgggtcgggaagttcccctggagaaaggaatggcaatccactccagtattcttgcctggagaatccccatggacagaggagcctggctagctgcagtccatggtgtcacaaagagtggacatcactgagcgaaaaaactgtagacaaagaatatactttcaggaaaacctcactggacatgaatttgagccactttgggaaatagtgaaggacagggaagcctgatgttctgcagtccatggggtcgcaaagaggcggatacagctgagtgactgaacagtgaaacatagtttatcagtcactttaaaagcaggtactctgtttcattcctgcatgcgtcttcagtcatgttcgactctttgtgacccccatggactgtagcctgctaggctcccctgtccatggaattttcccggcaagagtactggattgggttgcctttcccttcgtcaggggctcttccccacccagagatcgaactcgtatcttgtgtgtctcctgcactggcaggcagattctttatcactgcaccacctgtttcacccgctttatcttgtttactttttacaaaaccctgtgagatgggtgatatgactgctacttttcagagagggacatctcacctcacagagttgaatatcatttggcacgtcagagacaggcagcttctaacctgaatcactggctccttagccccggatgtaaatgactgcaccgttcgtttgtaaatttgagtacccacagttagtgagcaactgggattttatttgttcaggttcatttggagattaattgaaaattacagtttctaactgattattatcagcaggttgatccttccctcctcccatttatacaattaacatgcgatgtgaacctcctatcaaaaacatgcactcagagcagtacctcgatgttcctttttataaagtcagcatgataagttacacagagtgccttttaatctctgtgcctggctcagagtaggcacccacaaaattaagtttttctcagcaaaatatcccagcaggctctatgatgcccactcctaaccagcaagaatggaaaagctgccgaagcaagaaatcttttcaagaactctccagagggttataagctgccttttcaactggaagtaatgatgtttgacctcagtggagtgcccgataaggcatcttgttccgaagattttaattcctctctctttttggtcagccctgctgccagtccacacagtcttctctgggagttcttaacccctactcaatccatttctttctgagttctccccgcttccacccgacttgcccatccatctctctctcccccactcttgcgtttgtgtctctctcttcctgtttccacctgcccccttgtgtctttctttgtctcatccccagttttcaattctttcaccctctctttctctttttgtgagtctgcatttattaagtatatgtacacataccatcttcctttagattgtggttagaagatatattcttaccctggagaagtttataatagaacatatctgttcagtatcgatccagtgataatttagaggtttttttttaaagttagttgtatttatcacttgcctattatttattcctaacaaattatcataataacccagttgtatgttttgcacaccatttgcacatgtgatctttatttctcaagccatggaaataattgtttttagcttgtggcattgaatctcaagtcacattattggtttattaatacccgatagttctttccaagtctgaaattctagatggataggaagataacttgagcaaactccaggagacagtggaagacagggaaacccgaagtgctgcagtccatggtgtctcaaagagtcagacatgactgagcagctaagcaacaacaaaggaggagggtaaagctttggaatctcgaagtcttaccagatgtcataccagctttataacttttgactctctgactctacagtgctgtgttgagacatttgagcctctttcactttgctgtattaagttggacaagaataaaactaaacacagggcaaggctgacctgagaagatgacctgtttcatataaaaccactaagacagctagtaatcatagtcacttcttttatcatttccttaactagaggcccttgaatatggttcaagggcattttacatgatcacattttcatatgtatacgtatagtgagatatgtgtaatccatttcatatgcataatttagatgctgtcttcacaaaggaacaaaaggctgagtgcagaagagagatgtgctctgctgatctgtctgttcgaacagtgcccaaccccagtcataccagagcaagtgtcatattaacctgttggaaacttcccccatctctctacctaagggtttagcttatagactgtttatttagaagtcgtgacacgaatatgatacctggtggctcccaatgagaggaaacacatttaagtcgatctttatttcatggtatcttttaatctgtatgttagtggttatttgaaagaatgacacgtgctatattgtgatgtagcctctaccaggtacatctgcattactgagtattttaatcatacttaaatgctatctacacttaattttctcagattagagtaaaaatcagagtgtataatcaagtagagggagggctgaaagacataaactctcacctgggaatgatagtttcagaaattattcgagttgagctggaaatgggaagtttctgccatggaagtagtgagatcacttaactgttttctaacaattaatacttagacctttatttcagggagtgggaaaaggaaatgtcttggatctcatatgtttataaaactgggtacatcaaactcatagcagagagctagtcacagggaaatgcatacgtgacaaaggaaagtcattgttgggataaaacagattcactgcttgaaaatattcagttcagaacaagagacaaacacgcttaagctcgtttggaaaggctcaattttttttttttttttaagtgttaacattttgttcttttaggaaagtcagtgggctccctcttgtggctttgtggaagatttcagtttcaaggaaaatgcctttttggtataatagttaggatatcatttcttttccaataagaaaacacttttcattactttgctttgtagagagagagagagaggaagaaaaagaaggaagaaagtttactttggtgcaaaacctgacttggctacaaagctatgccacgtagaacatgacttataatagccaatatttactgcacatctaccataagctactagatactatagataatgctgctgctgctaagtcgcttcagttgtgtcctactctgtgtgaccccatagatggcagcccaccaggctcccccgtccctgggattctccaggcaagagtactggagtggggtgccattgccttctccaatgcgtgaaagtgaaaagtgaaagtgaagtccctcagtcgtgtccaactcttagtgaccccatggactgcagcctaccaggctcctccatccgtgggattttccaggcaagagtactggagtggggtgccatcgccttctccaataatgagttcaccacattatcctttgtctcgatgctcacgatcaacctgtcagataggttgtatagtgatttgatgtgtgtgagattctgcctcctttcctgtctctaagggaacccctaaggagaccatatgtctgtgaatgaatgaaatggtaaacatctcatttcctgtattaacaaatattttttacgtgaaatcatttctttttttaaaatcagtttctgttggagtctagttgctttacagtgctgtgttagtttccgctgtgcagcgcagtgaagcagctgcacatgtacatatgtctgctcccttctggacttcctttccattcaggtcaccacagtgtgttgggtagagttccctgtgcagcgtgatgttctcattagttttctgttttatacatagtatcagtgatgtatatacgtaaatacagtctggaataggatatgggttttagctgactaatttaggaattgttcagtgattcatttccattactgtttttttctctttccagttacctgtctctggaaacttgattgacctttatggaaatcaaggcctgccacccccaggcctcaccatcagtaactcctgcccagccaaccttcccaacataaaaagggagctcacaggtaaatactcagcacttgtgcctctcactggaggttttctgttcatgttctgttcagcaaagttatccaagtagtgacctccagaactatttccaactcacacacatatgtttttaggtctgtgcagtggttgaaacattgagctacgttttagcgtggggtacttatacttgaaaatcctggtttccagtattacttgagatgctgggaatcgggtccccattcctccatgactggaatcattgtgtctgtgaccactgtcccctttgggctgagagcagcaggttcccagtctggatttttcctggcccttagtagcatatgagtttgagaactctgatctgaattttctgatagttcagacccacagctgggacagactaaggacatatttcttacctcttaagatgctttctgttacttttgctgtatcatgtgcaaaagattcactcacagagtgaaaaaataatttatcaaatggagcaatgggtatcgtttgctctggaggcaagtgtgaaattacctgtttcgccatttttgtttaatgctttagcgaaggcatttggccattacaacacgatgaaacggcattagaactggcattctaccctgctggattttatggccttcagctcatccgaaccctttttattatttgattcttgcatcctacaggattcggtgtatagactgagactatggaatatagatttggtgcaaaaaaaaattcctcttctattcaagtgtgtctttgaaagaacaaaaacaaaagttcagaaaattgtggcaggagaaagacattaaaaaaagaagacattgatttggtttttaaaaagatgattaatacataaaaaccatcaaaagccaacaaacacgtaggtattgtaccaggaagtaataatacaatgaagttttagaaaacatagttaaatgaaacttgtattaaataaggataaaatatggttagagtgacatgcataaaattcttgagtgtaaaatggggtgttgaattatgtatatgattgtttcttcagaaataagaccacagcagcaaggggaaagaagatataagaaatgggtgaagagggtgtacatttattaaattttttaaaaagcagatataacagacactacctctagagtcactggtatcttagaaaatgaccaatccagtctggacaagggtaaaatggcagggaaaggggtaaagggacaggaaatgaggttctgaacactgatagctcaggaagcagcatgctagacacagaaaagaagaggcttacaagttagcaaatctgacctaataatatataatacattataacaatataatgaacatgctataaactaagctaagtcacttcagtcgtgtccgactctgtgtgaccccaaagacggcagcccaccagactcccccatccctgggattctccaggcaagaacactggagtgggttgccatttctttctccaatgcatgaaagtgaaaagtaaaagtgaagttgctcagtcatatctgactctttgcgaccccatggactacagcctaccaggcttctccatccatgggattttccaggcgagagtactggagtgggatgccattgccttctccgaaaagatatatatttttaaatacaattctggattatgataatgtaatgtttttatatcacttctgaaaggaaagtaacagaggttcctgaatccccagtgatttttaaaagtctaacagttctgtaaaataaaaattttttaattttttaataattaagaagtattaaaacagaaaaaatagaagcaacctgatttgtttttctttgttttgttttactctctgtaaggcagctaataatcccttattgcatagatcgcaccagagttgctatgcaaacagatcaaatggagttgtcaccaaatgcctctgtcccaaatgcctatttttgtttttataaactcagagtagtaaatagttgccctagaagtcattgaatcatttcattctaacaggttctgatggaacctggctcaaagttcttaaataatgaattcatttccgtgaaccagttagagatccagtttgggagcttcttggctcagcttctgtctcagtgtgttaacacatcaaagaaagactgaaaagtgctatttcctgaaaagaaaatttgactgctgacaatactctattgacagcaacttctcataatctctggttatttattttttttgttgttcgtacctgtctgtcgttccagcctgtcagacatctttgttactggtcttctaccattttgtagaagctaaatttttgcatttattggatatatattgcttttgaaaaaaaaaaaaaggaagtctttgattcaaagttaaacatttttaactctggttttatttatagttaagtcagataaacatctatctgtttagacaatgaagtgttgttttagtttacaccactgtgttccttgaaaggttctggtttctaatgacttcattcatgtatacagcatgtatttttcccacagagtctgaagcaagagcattggccaaagagagacaaaaaaaggacaatcacaacttgagtaagttggttttatgtttattacagtagagttgaggttcccccttatatcagagagtttccaggcattttgaagagaaattgattttacctgttaaaggtacattttatggaagaaaattgttttttgaagagtccaaagtatatactttgcctcatattttaatctcagattaaagtgaattatatacacacacatacacacacttgttttcagtatcttgaggactgatgttttttcttttttttgtaagagggaatcttgatccctgactacccaattataagttgctcacactggaacttaactaacaaaaggggattatggaatcaccttctccagtgagatttaaaagaaaaaaaatgaaacatcttcaggagagtcattgagtgaggtgaggtagcctcccaaatttctaattttaactttgatttttaaaaagtcttctatcagtagaagaattaccatttgttgtataactttctatgaggaagtgatttttaaaagtctaacagttctgtaaaataaaaatttttaaatttttttaataattaagaagtattaaaacagaaaaaatagaagtcttctaacatttaaaattactttcttatatgcttaatttactcttgatcacatctttatgctttttcctatgaaaattcaagatttttgttacataaacaagttcaagaggctgcaaaaaaaaaaatattgggcttagaagtagaaaattgggtctgtgtgaatttcttatctcaagatcctctgtcctctttttcctaaattgatttttaaggatgaagttatcgataaacactttgtccatgtaaaaatgataggataagctcacagttcttctctgagctctaaaaataatcattgttggtttttttttccaatttgttgtttgtctttgcaaccttttcctgtgtatttaagaatacacacccttatgcatgcagagattataacagaatgattttgtctatgatttaacacaaatagtctcatattgatgcctggtttttcactccacagtgtgtcctaaagaccttttgctattactcatctagatctatctacttttttagaaaattgttgcatggtgttccacatgtgacttgtgatatttagtaatcctcctactgctaagtgttagttctgtttccagtttctccctattataaacaatgccacagcgaacatttgcagccatggctctctgtgtgcagcagagttagtttctccagtgtaaatgctaagaaatggaattgctaagtccttaggggaaggcggttgtgtctgtgtgttttctttgactagatcctgctcttcccagttaccctttcacttagaggaaacttttctcaactattaaccaagagattttgactaatatttctaaagtctcttctggtttccaagtaactctaagataatttcttcttttaaaatacattagaaatgagataatgaggcaatctctaaagcttctcctaaactgaaatgtggaaaactaagttggatgttggcaagaacagtatccgcctttactttgtcacctgaactctcaagttcagggttgtctgtaaagtgcaaacataatcagctccaactctgaggacaataaagcagtcttaagatttcattgaactgttagaaattaatactcgaggttcacctgcccattgacttttcctcttctaggaatttatcttgtaagagttcctgacaaaatgagctaaagattacattcatttattcacacgtaactactttttgagccccattatgtataaggtacttttctacagaggtgaaccagacagacagatttgtcccctgtcctgagaagcttacatgtgagtcaggggcaaacagaatgggtgagcaaacagattcatgcagatgttttcagcataggctaagtaccgtgaggggaataaaaagtacatgcgaccactagcaaaagtagtcattatacctttgaaaaagaaagacattggaaatagtctaaatatttatcagttgcggatttgtaaaaaataaattatggtacatccttataaaggacactcagtggctcttaagaagaatggtgttggtctgtttcatctgtctacaacgaattactgaatgaggagagcaaacagcacaatgatatgtataggatcccattatgtaaaaggaacacactgtgtatgcgtgtatgtgtgtgtgtgtgtgtgtgtgtatgtagaagatctaggagtcagccttgtcattggcaatttcctcaggcatatagatgttggatggtgtacagagttgtttcttacttttttctttacacacttttgcatgttttgcatatttttcaagctgataccacttttatagtaaaaacatagttgagggaggaggcactgaattaaaaatgtagtacatacaaatgttgatgataataggtgtcaacaatacactgttaagtgagaaaagatagatgcagaatgggttttcatgtaattctgctttagtgatgttatcctttatttggttcatggttggaggcctggtgtgtgctaggctcatatgggtacttggaaggcatcaatgactaagcatatatgaataaatagaaacatgcaaatgttagatggtagacaggtctatgcttaagtgaatgaatgaatgaatgaaatatatagatgtttatatatatttatatatatattatatatatatttatatatcagaaagtcctatgaggaggcagagtgcagagaggggagtagagtgttgggatgggtacgggaggaggtgggtcccttctaaataggcagtcagggaaggctcataggtaaatttgagtcactactggaggagggtgagggcagagccattcaagtatctgggggaagagtgtttcaggcagggtgaacagcaatatgaggtcctaaagtggggagtgtgtctaatttggttgaggaagagcaagaagctcatgaagctgaggataagagaaacacagatgagtcacaataaaacctgatcagaggaggagaggaagagaaatgagatcagagggagggaactcccagatcctataggacacctcaagggcaagcaattgaagggtttccagcaagagattaacaagttctgaaaaaaaaaacaaacaagctctgactcatgttttcacagcttatgcattgtagatagactaatgagggtagggaatgaagagcatgggtgaagcagaagtaccccttgggaggactgcaataatccaggcaagagatgctgattggtttctatcaggcagcagccgagattggaagtggacaacttctggaaatatttcaaagatagagccagcagattttgatgatggattgaatataggatgtgaaagaaatagagctacaggattgattctaagtttctgccctaagcaactggaaagatggagttatagtgaggtaagaaagcccgggggtaaagcttattgaaaaaaggaagatcaggggctgaagtttggagtgtcagggctgcccattggacctttatatggaggacttccatatgaccttcgtaagtctctagtagtagatttgtgagtctagagttccagggagatgtttgggctgcaaatacgatagtcatcattgtatatgtggtattcaaaaccataatagtaaatgaggttaccaggaattgaatgtagattaagaagagccccaagatctgtttcctgggtgcacccctaggccacgtatgtgcttttcttagaacataaaaataatcaccaaggatatgtaacaaattttacagtggtggtatcaggctcattagagacttttatttcattttatgtatttcagtaatgtttgattttttatgaatattatatgcttggaaaaagaaaacatgtcatacttcagagttttggaagaagttagctagatcagaggtccaaaaatttcttcttcagagccagtgattatccctaactatttctgttttatagaagtctgatgataagactgtgttatgcataactgatttaatcttagaaataatcactcagctaagaaaaaaatgtaatatgcattgagaaagtagtgaataatactatttattaagcatgcagaatgttagtgagtcaagtataaatatatattagattttgtatatgcaaagtaaaatattaatacctttaatccaatttattagactttatttggaatttcttttcagactaggtaaatttaaaacatttattaagtcatatgcctactatttcacccctcttcccccaagaagatgattattcagttcaacatacacctggatttataaaagaatgctgttaggatacatagtatagttgaagatgcttgacttctaggattattttattcattattgtagccagtggacatgtctgcctgttgaacatttgaaatgtgcctaattcaaattgtgatttgctgcaagtataaaatgcacactggattttgaaaagttagtataaataaaaggatgttaaatacttgtaaattttgatagagtccacatgttgatattataatactttcaatatattgagtttaataaaaatattaaagtagatttcacgtctttgtttttactcatttaatgagactgctagaagactaaaaactacacgtgaaacttgcattatgtttctgttgggtattcctggactggaggaaggtttttgtatggcttgtaggctgagaatgtttttttgcatttttaaatggtttaaaatgcccggagaataatattttatgacatgtgaaaattatataaaatccaagtttcaatatccagtgattcttttcagtaaacttgcatcattgaaaatcatattcagttaatatcagtacattttgaattttgtcaacacaaaattcatggaaatctgttttctcttttgctgtgtaggtacttaattatatgcttattttttctgtttggcctacagagaggtcactatctggccctttgtagaaaacttgctgcccctggtctgggggttcagggtcgagtactggctattctctgcctattgtgtcctcatcagctctctgatatcacctaggtagttttgtcatttgtaactaaggatggtagctctaatttcaggagttactagggtcaaatgagaaattataatctcagggcttcataaatgatacagttctgtaccaaggtagctcatcttttaaagggctttaacctcagtaccaaaaacaggaaagtaactgggaaatatagatttaggttttcattgtcccaaccaagcagagataatacacacatgcctttaatgagatgtgctaaatgcgtatatggcaccattactaatagccctttcctgtgctctttttttgaagttgaacgaagaagaagatttaacataaatgaccgcattaaggaactaggtactttgattcccaagtcaaatgatccgtgagtacaattgcatcatatattttttcataccttaatgttttttcgtatgttgcaaaaagtgtgcagataaaactaaagaagtatcccttcttcctttggtttcatttatgcataccacctgctcctttcttttggttggttcatcaaactaaaatctcaagagacgtgaactgagttgttcaaaaagattattggacatgagctgttcagctttggaggtgggaaggtggcttcctgaaatctgaggatttttgacaaacactgaactagtaaaaaaattattttatcagttcatactggacagagacttcagtaggagataaagcaagatttgttggctatttatttgcttttaagctcatacaatataggaactgagagctgaaattggagatttcaagtttaacaatcttcagtagataaaaagtcagtttttccccccaaattatatgccctttgtttgttttaccaattaaggggaaaaaggaaatttttaatcctcttataagcatcggtcagctaatttggatttcaacttccagtctctaatgcactctttcagagataacggttgtaaagataattttcctaccagcaatgtcagcaaataggacaacaaatacacaatttttatccattagaaattggcccatttgaagtaaagggctcgaagatgtatacattttaatggctcccacaggcattctatgaaattagcctccgaatatgaccttttagctacctaataaaatgtaaagatgaaatcaagcattattcatgcaaggcttattaaatttgctattcacattattgtcagagaatttgtgacaaaataaaaccattgcccattctaaggtggttttgatgaatgttcaagcaaagtctccatcatcaacatttcactttcccaggtttcaaggaaagccgttttgaaactcaaaacattcaaattctcagttctgcagcacaaatgcatcctatgaaggggctgtgaccttcatttcctatagtcagtcttgcatgatagttgaaattgaattcccattttcctgttctttatcagctttcactttttagcatattcttttaaactgcagcacatggatctctttagcaacatattatgaaattatggggctgcagtgaaagcctctatttgcatatcttctttattgtattagaatacttatgtgtttataatctgaactgataacaatctttaattgtaggcattgttttaagatacagcggacagcatctgttctgtcctaagccaggtttctgtcacagaccttggggctgctatagagacatagtcaagctgatcacagtctcagctccacaccctctcctaccctagactaggtctgcctttagtgacttatgtattggggatctgtttacacttctgtgtgaggaaaaaaaaaaaggattgcgctcattgcaaaaaaaaaaaaaaaattgaaaactccaaagcataattaattaattgggtctcacaaggaagtgaaacccaaggtaagtgattttaattctgagcttagttgctcagtcgttgtgactctttgcgacaccatggactttagcctgacaggctcctctgtccgttgccatgccctcctccaggggatcttcccaacccagggatcgaacccaggtctcccgcatggcaggcggattctttaccatctgagccaccagggaagcccaagtgattagaatcatcacctcttaaaaccagagtatctgctttcaggtttaattacgggtttctcaccttactgaaggcatctttcattataattttatttctctctggctggtgaggcaggtctgttgttttccttttagccctgaacaggttggctttgtgctcactcttagcatctcaggacacctccctgggttgccacttttggtgcccagaccccagagatcagccctagggagttctccaggggctgtaactcagcatctcatgggagagcttctgttttgttctccatctaagccatgtgaggatcggttacctggtggcttgttttcatgttcctccattcacacatcccagctgatacttccaatctttttatcagctatagattatggggtgtccctcatagctcagttggtaaagaatctgcctgcaatgcaggatacctgggttcgattgctgggtcaggaagatcctctggagaaggaaatggcaacccactccagtattctcacctggaggatcacatggacaaagagcctggcaggctacagtccatgggattgcaagagtcggacatgacttagcaactaaaccaccaccattcacatgtcccagctgatacttccaatctgcttttagcagctttagattatggcacaggaggttttccatacataaaattgtttttggctttaccattgtcattattatcatggatattttctataaaagagctcaggttaatttcaagcactatagaaatatcactgtttagttgtaattttattcttaatgatattttgggggcactctaagtttttcaacttgcttttacctacatcttccctggtagttcagttggtaagaatctgcctgcaatgcaggagacgggttctatccctgggtcaggaagatcccctggaaaaggaaatggcaacctactccattattacttgcctagaaaattccaatgacagaggagcctggcaggctgtagtccaaggggtcgcaaaagtcagacatgacgtagctgctaaaccaccaaccttacctacaccttaatggcctttttaatgttctcatataggaatgcattagaacgatagtgtttaaaaaccctaaggcaccaagctcaggctgcctgcgtttgaattagaaaacctgttagatgtgtgacttggggaggaaattttccccaagtatttcatttttcttacctgttaaaaaaaaggaggcggtgcagggggcggcgcagagcagactatttctatctagtctagttgatttgaggattcagtctcttgagagaaaggtggtttaggggatggagtctggtgccagattctccaggcttcctggctcgaccatttcctagctgtatatttagagcaaattatttaacctgtctgtgcctctgtttttcagtctatagaatggggataatattaatgtctaccaattgaggttgttatgattaatgagcagaaaaccactttaaaaagtacctgtcaggcagcaaatgctatttaaaggcagctgtggttattacgatgttgaatcctagcacagcacctgctccgttgttggaactgtattctagacttttttcagcatactcatataaagtgtctactttgattctagcaacatacctatggggctgctcacagaagcatagcatcaccattttattgatgaggacatggagactgagagaatttataactggcctatgaatattcgtgataaaacccaaggatgccactttgatgatgcatacaattaagcattgggatctcacagaattttttttaactgtatattactctgttttaattttataatcctagaaagctatagctattgaatatagtgtttaagaatattgactttgtcatcaacagacctaaatttaagtcctgactcggccttcatgtagctctggaatggaaggctatttgaatcatctctgattcagtacatgctcagtggccctccttcgccaggcacctgtctggctgaagtaagataaagtagaagatgtgggtagactgtgtccagcataactagcactcagtcaatgacagtgattctcaacttctaattgttatttcatcttgagaaactgaatgctctgagtattgaattttcatggagcatccaacactaaaactctgtttccttccattttcattccagagacatgcgctggaacaagggaaccattttaaaagcttccgtggactatatccgaaagttgcaacgggaacagcaacgtgcgaaagagcttgaaaacagacagaagaagctggagcatgccaaccggcacttgttactcagaatacaggtacctgccgtgcgcagggtggaggtgactggagatggagaagatgggctgtaatgagccataaggggcctgacttacgtgaaactgtctgtactcattatttgtggattctattttgtgcttttgtttccgtgcaaaacagttatctgaaagccccaaatcgactcttgtggcacttacatgctcattcacacatgtgcagagtggcaaatgtggcttagctggtgtgtttattccgagttaaggttgaacaatgctctatcttcttctttcagctcatactataaacaggtgtcctttttgctgtgttttcagtgtcttgttgttcacatttttggggttttgggatgatttgctgtttaaagtggctggtgagcatggccctgaagcgctttctcatctttctgagcacagcaaggctgtgatgtgctttatggagatatgtttcattcaggcatgagttgtggtcctcttggccttgagtttaatattaaagagtcagtgatatgctgtaaacaagttgtctttaaacagagacacataaagttacatgttggttagttggtgaaatgtgcctggatgctttattgtagtgttttagtcgctaagtcgcgtctgactctttttttgcgaccctatggactgtagcctgtcaggctcctctgtccatgggatttcccaggcaacagtactagagtaggttgccatttcctacgccagcagatcttccagatcaggaatcaaaccttggcaggcggattctttaccactgaaccactgggggagctcatgttcagatgcttgcaggaaagtaatcctctgttttcaccaggagcagtgttcagcattcacgaattcagtgttcatagcagctctgtagcacataaccgtctttgaccaatcatgctcatgtgataaaaagctgagaggtttacacatcaaacatttatttttcacagttctagaggctgggaaatctgatgctggccgtttcattgtgggattgaggtcctgcttcttagttcatagatagctgccttcttggtattacttcacactacaaaagagttgcgggatctctctggggtctcttttataagggcctcatcccatttgtgaagggcccctgcttgtgacctaatcacctcccagaaccctatctctaaataccatcctattgggaattgtttcaccatatgaatttggtgggggcgggggcacagattttactccatagctataactactgtaagtcatgacaactcacaggagttgttaagtacaaaggtgtcttagtattgaaggaggtgcagtccatggtcaaagctcatgtttatagggaacctggggacaccttgaaaatcttatcatcaggatataaattttagaaattgttccagataatgaagttttccatatgtatctttgacttgctcttaaagggagaaaagtgattttaataatacctggacttcttatgtcattccattgagggagcatacataccaatgtaagcatatcagctcctgttggttctttgtcacttggcttttcatgctaaatataaagatgcaacttcctttcaaactgtcttagagaaagaaaaactgactttttggttatgattaaaggagttggcaagagtcattttactttacttgctcactttgaacacaaccaatgaataagggttaatgatattttatcttcttcttgagtagatggacctacttgtacccagttttgccatataccaatggtttctttctttcttttcttttttttttttcatgtttccagtgcaaataattgtggaatagcaatgcagagtatggcaattgaaaggctatctagtgatgtttataccccgacattacatttacttaacagagcagattacttatgatctctgatcttgttaatgccccacaacactgtcaacatttctagatgtcacatctcttgtttcactgcagtaatcttcagtcccggatcagagatgcagaagatggttttcttcttgggagagcattttagaatcttggtagtgaaacagaggttatatgtcatttggaaatcccccttaccctcttcccttttttggcctttgctgcttgctttatgtaattagctagacgtcttttggtctcttatactttgtatatatacccatttttaaaagcaactcatactaatgtgttatttctttatgcaagtattcagttcagttcagttgctcagttgtgtctgactctttgtgatcccaaggactgcagcatgccaggcctccctgtccatcaccaattcccggagtttactcaaactcatgtccattgagtgggggatgccatccagccatctcatcctctgtcatccccttcttccgcctttaatctttcccagcatcagggtcttttcaaatgagtcagttcttcacatcaggtggccaaagtattggagtttcagcttcggcatcagtccttccaatgaatattcaggactgatttcctttgggattgactggttggatctccttgcagttcaagggactctcaagagtcttctccaacaccacagttcaaaagcttcacttcttcggcgctcagctttcttcatagtccaactttcacatccatacatgaccactggaaaaaccacagccttgactagatggactgttgttggcaaagtaatgtctctgctttttaatatgctgtctaggttggtgattacttttcttccaaggtcattacttttcttactttttgtcttttaatttcatggctgcagtcaccatctgcacctcaatacaaatattaacatataataactgttctgaaagagaggctaggtttaacaaatcaatgatattattgtaaacaagatgtctttaaacagaaacacatataaaatgaagttacatgttgattggttggtgaaaggttgtgcccagatgctttattgtccaaatatatccattcatgtgaaatacaaatactgtgaaaaatatgaattggaaattgcatggtgactatgtcttgggtttctcccagtgccagtgaagcagcctttagaacttctgtgtatcatggaaagcattattaattaggaaagctctgtcatgcagtgaacctgaattttctagatgagacttgtcacactatttaacaatctaagtaaaagtttaattggctggtaaacatttttaattaaacaacaaaagattagaataagacgtgtgcctccattcattcaacttgttttatttttttaagacatactacaagtgtggaggcactgctttcatcttgtgggtgtagatttacagtagtgcatgtgatcagcttgagcctaagggattcctttcattttcaccctaagtgatgcatgcaaaaatgttcacagaagaaagaccatgaagccttaatatcactgggactggaattttattattaaacagcgcatggttttcaaatgatgcccagggacacttgtgtgtctggaaatcacgtgaaggaatatgcagatagtgttgtgacatctcagactcctgtctctcacttgtactgaatctagagaatgtccttggagatcagacagcctttcatacaggctgaacatgacatgtgtttctaggcttgtgggcaaaggttgagaggtttgacctgttgtgtcctttgccttctctcctgatgcaaggtgacttgcttcagatatatagtctattatttttattgtatcataaaacataggaagatagcataggagcatagcataacatttggcacataggagcaaatgttctctggggtcagttgttgtctatacggttcattttacggaggatctaaggatactcttgtatcttgggcttcccttgtggctcacctggtaaagattctgcctgccatatggaagacctggattcgatttctgggttgggaagatcccctggagaagggaaagggtacccactccagtattctggcctggagaatcccatggactgtatagtccatggggtcgcaaagagtcggacacaactgagagactttcacttcaggatactcaggaagggaggcaggaaggagcttgtttgaaaggttttccctatttgtgtctctgtgtccttgcagtgcctcatgatgaggacccaccccaaggatctcattttaacttaatcacctctttaaagacactatctccaggtactgtcacattccgagttactggaggttaggatttcaacgtatgacttgagggtgattgtttttcagtcactaagtcatgtccgactctttttcgacctcatggactatgaccccctgagcccaccagactcctctgtccattgaattttccaggcaggaatactgcagtgggttgccatttttttctccagtcattttggggaggggacacaattcagtctatagtaggaaggatgtgaaaaagttgtaggaagagattgttcctcttacacataagaactttcttgtggaattaaaacaaaataactccctttgcctggatgagatgggttaaatgatgtgactttagttactcgtatggcactgtcataacttctgctattattattcaatctttatttgttccccgtgcccttagtatcacagtaaccttttcattgcaccttaagccaaagaaatacctaccatttccttgttaggtcttaacaatttagtaaccatttcagaagataaaatgtataaattgaaagaaaaatcatattttcattttatttttaaataaccatgttactaccagggagatgtgtgcacctgttggggcacggcttctccagccttggagtcattttggacgctgttaccctctttaccattccccatttattttcatgcaggacttggtattttttgtttgttttctttttgagtcacagtaaccgtctgagacctggctctgtgttgatatgatatgatggaaagagtgtagcacaatctcatactggaactatgaaactatattgagtttgatcattcttgcagtaaggtgcattctccttgaaactttaaaatagtcccaatatcccgggagtttattgtagtacccacggatatctctgcacagtttagggaccgtgggactatattatttactgaatattttcctttaatcagctcacattttgacattttgctttttatattttttgacttatcttcactgtgaacattaacatgtatgagagactgtcttacctaatatataataaaatccatataccaccttaaaaatcattttatacattaccagtgatacagtgtactttttaaaaaaatgacacttatgaatttgaaatagcaaaaaaatgtttattttaataatttattgtcttctgaggatatgatttaaaaaaatactttactttttataacaattttaggttcagagcaaatatgacctaaagtcatagatagttcttatatacctcctactcctgcatatgtatagcttcccctgatattaatacccccaccaaagtgagacattctaacagtggatgagtctacactgacacgccattatcactacttgacctaaggattgactgttagcgacgcacatcctttgagtttggacaaatgcatagtgacagataaccatcattataatatcatgttcaatattcactgtccccaaatcccctgtgcaccaccttgttaagtgtctgattcctgttgtccttttaggaacttgaaatgcaggctcgagctcatggactttcccttatcccatccacgggtctctgctctccagatctggtgagtcggatcatcaagcaggaacccgctcttgagaactgcaaccaagacctcctccagcatcatgcagacctcacgtgtacaacaaccctggatctcacagacggcaccatcaccttcaacaacagcctcggagctgggaccgagagcagccaggcctacagtgtccccacaaaaatggggtcgaaactggaagacatcctcatggacgataccctttctcctgttggcataactgatccacttctttcctcggtgtcccccggagcatccaaaaccagcagccgaaggagcagtatgagcatggaagaaaccgaacacgcttgctagcaaattctccctgctctgctttctcacaaactgcttcctttcttgatcagcagatttaataatttacctgaaaggggttttcttgatcattttcttttaatatgaaaaaaaaaattttttttcatgctttatcaatagcccaggatatattttatttttagaattttgtgaaacagacttgtatattctattttacaactacaaatgcctccaaagtattgtacggtcatgtacagtatctgtgaactgaatacacccagactttagctttcagagcaagaggattttggtgtcagaaaaatttctgtccgtttttattcaggggaaacttggtttgctatctgtatgcctgcaacttccttggaaatgaaatgtaaagtttaattgaaagaatgtaaagcaaccaaacaagagagagagcgaaagggagagagagcaagacagagaggagaggggtggggaaaaacagaagaaaaaaggaatctgtactaacctttttc

SEQ ID NO: 77 - DNA, 196511 bp, Hippotragus equinus
  source 1..196511: mol_type = genomic DNA
ctatatactgttaagaatgaagtaaagaggtaacagatgatataaatcacttacaagcagttgggtgatgtaaagtgaaatgggaagaaaagaaaaagaaagaaagggcaaaacaagccaacaacaaaatcccaatccttgaagcactgagtccgtgaatagggcttacttgttccaattttagaaaaatgaaataaaaatcactgcctgattattttttcttttatactcatgaattcttaaaagttaaagtaagaaaaaatatatatttaatggaaagtatataccaatttcactttattagcctaatttaggaatgggatgaggacgacggggtcaaggtcaggtgtgaaggaagagggttaaaacttgtgacagcaaagatcccttcaaaactctggtgcagtcctcagtcactgtagcctgtcagtcaacagagttgaaatccagaataccaaaagcagactcctgtgctccagttctgtccaggggctcttcagtcacagtgtgatgaggtccaccaggttgcctttaggaggagtcatgctgtcaggaaagaaatttactaaggtgtcaaagagctgagttctttgagcataggtgtgatccacatccgaaaagcctggtgaaagagagataacaaagaaactcatccactgtgtttaacgctctacacgtaacagtaaagctagttgacaaaagcagcaatgtataatggaaaaatcaaaaccaaatcaggctttgaaactagagagcaatgggctctgattccagttctgcgacacagcaatggtatgatcttacgttaaggtaagcagcctttctacaactgtttcctcagctacaaatctgtgataatcctgtttatgtcataacctttacagtgcagattaaatgcaattatctgaataccatccagcagaatgattagtattttagtaactaatattgatttctcttcctttccttgtaagcattttccttttctggtccactgaggaattttcatttctcttttctttttaatgcttttggccactaaaactgttttgataataaaaatctaatgatattaaaggggtctttagaaagcagtgggcttcccttgtagctagctcagccagtaaagaatctgcctgcagtgcaggagaccagggttcgatccctgggttggaaagatcccttggagaaggaaatggcaacccattccagcattcttgcctgtaagatcccatggacagaggagcctgttgggctgcagtccatggggtcacaaagagttgggcatgactgtgcaactaacacttacttagaaagcagtataaaatcattatgccactgacagctggaagaagtctcaaagaacagtgaaaattcagatagttcagaagaatgtccttccagaggatggaagcaacattttttatttttttaaatttatttttaagtggagggttcttgctttgcaatgttgcgttggtttctgccgtacaacaacaagcatcagctggaactatacatatatgcctctctcttgcgcttcctgccccccaccccgaccccagccctctaggtcatcacagagcaccgagctgagctccctgtgccatacagcatcctcccactagctagctgtttcacacactgcactgcatgtatgtcagtgctaccctctcgtgtcatgtccacaggtctgctctctaaatctacgtctctatgcttgcactgcaaatcggtttatcagtactatttttcaagattccatatacgtctattaatatacgataactgtttttctctttctgatttactccattactctttgagtacctcctcactttctggcacagtaagacctccaagcttatctttatacagctttggaatctatcattttccctaacagctctagttccttttagtggcaaatgatatttacaaaccaagatcggtggtgctgtttctaggactatatatatgcacacatataatacgcatatctcttttaaaaggaataaaatcattagtccatgcttttactgctaattcatttttaaaggagcctcacaggattcttcctctccttatttcattccatatttatatctcttttctcctactagggaaaccatctctctcagcaataccatcgtatgtattcatttgctcaacctaaaacacacacaaaagaagttccagaattactataccccaatcagtaccagcaaaattcaagatttccttgcttttgctatctttagaatatacttcacttagagtatacagtttaagctgtacttaaaagacttaattctcttttttcccctattgtctgactatgtcacaaatttgataaacatgtttgtttctgttcacattcaacttcagggcatttaccacctttgttttttttgtaaaaaatgttgtagtataaaaaaatgttgtggtgtattgtatttttaagagaggacattgattctgtggtagtacttatcattgtcatgagatcaagtgatgtaggagggaaggaaataaacggagtctcctactacctgctaggttcttcatgtatgaccacatttcactgtcacaaaaatcatacgaagcagttaccataaactccaatttcagatgagacacttaagagagattcagtcattcagtaatgtatcacagttggagaggaaagagaatggagtgtgaacccatgtctgtccgactctaaagctcatttatttatttttatcaagtatctgagtacttattaaatagaaaacctattttttatttttattcaccatttaccaataaggaacatgaaatttacacgatcattagatgaatggttaaattatggtagattcctactatgggacattgtgtatcacttacaaatacgataaatctagtatagtttcacataagcatccccaagccatgttgttaaattttaaagagttatgtggagaatacacatttttatattacataataaatagaaccagaacacataaaaccaaacatctgtgtgtgtgtgtgtgtgtgtgtgtgtgtgtacacgtatccagttgatcctcattattcacagatttcatatttgtgcgtttgtctacctgctaaatttgtaatccctgaatcagtattgtgccacttttgtggtcaatcacagacaggcaccaagtggcaaaaaaatctcagctgccacatgtaaatatacgttctcaactgcggtcaaactaggtagtgctctgcccacttgtttcagctctcagactataaacaagtgctcttttcacaatctacttggtgtcatgttcttcacattttgtgttttctgttggtgacttcactgcttaaaatgccccccaagtgaggtgctgaagtgatggctagcgtttctaagtgcaagaaggctgtgatgtactttatgaagaaaatacatgttagataagctttgctcagggtgagatacagtgctattggcatgagttcaatgttaatgaatcaacaatataaatatgtaagtaaggtatgttcctgctgtagcaaaacaacattaagtattaattagttgaaaaaattctgtgacaagaggcttgaaggaccctaactctgtattttccatagaagcaatgggtcagtattaaacaaattcagggttacaagtaactgtatagaatattattgtgaattgtgggaatcaagtctatctatatgcccgtgtgtaaatatctgccaaatgcaagcagtcacacttgaaggaaggagacagagattgagggaagttgttcaaagacaacctgaatattaaaaaaaaaaaaaaaacaaaacaccctttaaaatgtgtggggcactgggaaactcagcaacattactatataaatggtagtgacaggacaaaaaggctgtattgattttaactttcatgttcttaaaacataccttgctgaaaatatgcttttaaaattagctaaaagtcagaagtcaagcttccaagtgtccacagccatagccacagcagcctaagctaaagatcctcaaaggttatttttctccgaagtcagtcatttttcaaaactaagacaatgccagcagtttgtaaaccactttccatctttctaaatttttaaattacaaataacattagcaaatactttttaattctgagaggttaagataaacttggatgaattctgaaggaagtcagaaattttagttgagccaattttgtgggtaacataatttagaaaatgaaatagttatttatacatgaaaagtgtacacatccatacattaaaaaaaataacccactagatttaaattctaagtggagtgaaggtaaaacaatcagatagaaaatgaacgagaaaaactaggaactctaaataggcatgaaaccttatgaaaaagacttcttaaaacaaatgtcaaatttctctttatgaaaattggcctatagcctgaatttactccttattcaaattcaccagtgttacaaagcttacatttataaggcaggtaacagaagtggtactctaaatagaacacttaccaagcatttcattttgctgttttcaagaatacttaattctctcaacaacctgaggtcactactctgcttacctccattttacagatgaagaaattaatgattaatgattagaaaggtgacttgttcaaagtcatttttaaaattagcaagtggcaaagctgatatctaaacctagattctgacctttaaccactatactatactcttccctcttaactactacaccgcttcccttcagacaaggtaggaaataaaacttcacagaaaatttccctttttgtatttatttctgttgtgtctgtactgatctcagtgtatctaaggtctgtttagaatccaagtaaaacaaactgttcctgacaaaatatattagctgacagtgaacagaccaaaggaaagagttaagctacaggtaaaatatttgctgacaacagtttaatatatttaaatgactgccaagaaattcttgttctaaaggctaaatataagtcagccagagacattttagtgctatccaccattaaaataaaaataatggctctgggctgtggtatccatacataagaaggcacgcattcactcaaactcaatatctatgtgccaggctcccagtttgtctatcactaaatccatttcaaaagataaaattcaaaagggcatgaactttctaaaataatgcatataactagactctatctcagggttgagattcctaataacctgaagacagttaaaaaaaattttttttaaactagtttatttatttatggctgtgctgggtctttgttgctgtgtgtggggggccttctctagttggggcgagccagggctactcttcactgcattgcacaggcttctccttgcggtagcttcttttgttgctgagcgagggttcaagagtgcaggcccagtagttgtggtgcgtgggcttagttgccccgcagcatgtggaatcttcctggaccaaggatcgaatccatgtcccttgcatttcaaggcagattcttaaccactggactgccagggaagtcctttttaaaaagcctttcagtgtatggaatggtggtaaaccattatgtcaatttttagaagaaccttctgaagttatgttttatagcggtcctcttgccttgtggtggaatgttaactcatggtaagtatatcagtaatacagtctgcattccaaaacaatggtacacaaattattttgaccaggcttctgtgctgtctatttgcataataacccagcgattggtataaagggaactgcaaactgacccatgaactgggaactgatgccagttatcaagaattttttgcatgttaccttgagaactgtttcatttgtttggatgacatctcatctaatgtttcattttgaagaaatcaaaatcaaacctccccaatgctagggcatatggccagataaagtacactgcaatacttacctaaagctgtgaaatctgaaccagatttaaatagagctgaagctaggagctgaaactgtggggaaaaaaagaaagcaaattagcttagctaggaactgcagtgtcagtcactcagtcatgtccgactctttgtgaccccatggactgtagcctgccaggctcctccatccatgggttttcctaggcaaggatactggagtgggttgctatttccttctccaagctaggtaagcacactggagaaaaaaaattcctataatttcaaccatttattagttactggatctatctccatatgtattgcttaggtctatttaccaaatagaaagactgaaggcgggagaaggggacaacagaggatgagattgttggatggcatcaccgactcaatggacatgagcttgagtaagctctgagagttggtgatggacagggaagcctggcatgctgcagtccatgaggtcacaaagagtcagacatgactgagcgactaaactgaaccaaactgattcaccaccaaataccggaaagaagaacattgtatttaaagaacacgctaattttttttactggactctcttatcatttttcaaaatactagactaagtcctggaattattttattttaaaaatatattaaagtatgtacttgttaaggaacaatttagtccctagtactgtgttcagtcgtatctgattctgttggaatcccctggactatagcccaccaggctcctaaggaacaagaggtcaactgaaataaaaaattactgctaccatgtgatccaacaatttcactcctgagtacatatatccaaagaaaatgaaaacattcattggaaaagatacatacactctgatgtttcacagtacattatttacaatagcttgatatggaagcaacctaactgtccatcaacagatgcatggataaaaatgtggtatgtatacacacatccacacccacaaccctctacacactggaacactactcagcaataaaaaagaaaaaaatcctgccatttgcaacaacatggatggatctggagggtgttatgctaagtgaaataagtcagacagagaacaataaatactggatgtcaacatttgcatatagaaaccaaaaaataaatgaatgaataaaacaaaagagaaacagactcacaaacagaacaaaatagtggttaccaatgggaacacagaaagggtaggggtgaaacaagggtaagattaagaggtacaaactactatatatataaaaactagacacaaagatatattatacagtacagggaatatagccagtatcttacaataaatctaaatggagtatagtctgtaaaaatactgaatcactatgttatacatctgaaactaatacaatattataaatcaactatactttgattaaaagaaaaagacaattacttatgtgggaatctatcatagagagattgatgccccaaatacagttactgaactttagggatggcttatacataatataaattacaacttagactggtattccatggtatttataactgtagtattatataattatataattttaaaggctcaaagtaaaaaaatgttgtgttgattagcttctcagattagtcagtttaaatcagacaatgtagctgaatgacgacaaaataaaataagacaaaactattgcactggggtactttaacaaattggtaaacaaaaatttaggctcccctggtgtctcagatggtaaagaatccgcctgcagtgcaggaggcttgggtttgatccctgggttgggaagatcccttggagggcatggcaacccactccagtaactcctgcctggagaatccccatgggcagaggagcctggtgggctacagtccatggggtggaaaagatggacatgactgagtgactaagcacatgacataaaaatttaggagaactattgatatttatcttgactgaggatcctggaaaacaggtcaggtaaaggtcaaataaacagaatctcaacagagttacttgacactttgcaaagcttgagccactgattcttcaggatgaatctcacacttattcttgtagcctttaaaatttcagctatcagtcacctgattaatcatcctttgaatgtaagaaactggacaaataatccagaagcaactaaacaagagttagagggggaaaaggggtataaaaggaagagttaaaaatatatgaaacttcttcatgtattttgggtatcagtactgtgtcagacatatctactacaaatattatctggtctgtgcctcgtctattttttttttttttactgcacggtttagcttcgggatattagttccttcagccagggacagaacccaggccctctgccgtgaaagtgggaagtcccaaccactggaccaccagagaattcccttctgccttaaaaaaaatttttttgacaatgtcatttaatgagtagaaattttaattgtgttgaagttcaattcgtgaagttttctccttatgattagtgcctttatgtcatatccaagaaagctttgcttatcccaaggtggtgaagataatctgttttcttcttttagttagttagttcagtcgctcagtcgtgtccaactctttgcgaccccatgaatcgcagcacgccaggcctccctgttcgtcatcaactcctggagttcacccatactcacgtccatcgagtcagtgatgccatccagccatctcatcctcggtcgtccccttctcctcctgcccccgattcctcccagcatcagagtcttttccagtgagtcagctcttcccatgaggtggccaaagtactagagtttcagcttcagcatcattccttccaaagaaatcccagggctgatcttcagaatggactggttggatctccttgcagtccaagggactctcactcttctccaacaccacagttcaaaagtatcaattctttggcgctcagctttcttcacagtccaactctcacatccatacatgaccacaggaaaaaccatagccttgactagacggacctttgttggcaaagtaatgtctctgcttttcaatatgctatctaggttggtcataacttttcttttaaggagtaagcgtcttttaatttcatggctgcagtcaccatggctgcagtgattttggagcccaaataaagcctgacactgtttccactgtttccccatctatttcccatgaagtgatgggaccggatgccatgatcttcattttctgaatggttagctttaagccaactttttcactctcctctttcactttcatcaagaggctttttagttcctcttcactttctgccataagggtggtgtcatctgcatagctgaggttattgggatttctcctggcaatcttgattccagcttgtgcttcttccagcccagcatttctcatgatgtactctgcatagaagttaaataagcagggtgacaatatacagccttgaggtactccttttcctatttggaaccagtctgttgttccatgtccagttctaactgttgcttcctgacctgcatataggtttcccaagaggcaggtcaagtggtctggtattcccatctctttcagaattttccacagtttattgtgatccacacagtcaaaggctttggcatagtcaataaagcagaaatagatgtttttctggaactctcttgctttctccatgatccagcggatgttagcaatttgatctctagttcctctgccttttctaaaaccagcttgaacatctggaagttcacagttcacgtatcgctgaagcctggcttcgagaattttgagcattactttactcgtgtgtgagatgagtgcaattgtgcggtagtttgagcattctttggcattgcctttctttgggattggaatgaaaactgaccttttttccagtcctgtggccactgctgagttttccaaatttgctggcatattgagtgcagcactttcacagcatcatctttcaggatttgaaagattttcttcttaaggatggactattttgggttttatatttagatccataatccatcttaatttttgtgttaagagtgaaacagaggttgagatagccatctatttagcatcacttgttaaaaggactttcttttccctattaaacttggtgctttggttaaaaaaaaaaaaaaatcaactgactgcatatgtaggagtctatttctgaattttattctgttcttttgatctatttgtctatccttaaggcaataccatacccctgtgattactatggctctatacagagccctgaaatcaggtagtaagtaggagaccaccaacttttttttcaagattcttttagctagtccagagtcttcacatttccactggattttagaataagttgggatactgacagaaactgcagtttaaattggtttaaattataaaccaatttggggagaatgggcatctcaacacttttacagtctttcaaaccataaatgtggtttatttctccatttattcaggtgttaatttcttttaattacttctgtatatttgattatgatattaatataaaaatttaaaaattttcattctttttttttttgaagcaaggaaaatgatttatttggaaagccatctgatcaagaagatggcaggttagcacctcaaaatactcatcttatcagggtctggatgccaggttcttttttatagatcagagagaaaaaagcagtgaggaactaaagtgaaaaggcagaatacagagtaaacagttcatttctaagtgctcattgctattataatattggaactgctttttaattctattggccttgtattctgtaagcttgttgaattcagttatcttagtatatcttttgtagactgcatgatgttttctatgtacacaataatgtcatctcaagatgcaaacggtttcacttgctccttttaaatctatatgctgtttatttcttttttttattgcactagctagtacttctggcacaatactgaatagaggtgttgacagcagacatcttttccttgtcataatcttaacagagagggtttaacgttttataatgaagtatggcactagctgtatatttttcataaataccctttatgagacttatgacttttttttaattcccagtttgttaagaatttttataatgaatgggttttggattctgtcagatgctttcttcacttattgagatgatctatggtttttctctttcattctgccaaagtggtgaaatatagcgacagatttttaaaagttaatacaaattcaacctctaattccttaagattttctaattcttcttgtttttgtaagttgtatctttaaagaaatttgttcattttatcaagctgttgaatttgttgacaagttgtttataatacttctgtaatatacttttaatgtacagaggcttgtaatgatttcccctttccatctgtgatgttgataatctgtgttttcattatttcttttcttgataagtcttgctagagattgactaactttagttactttttcaaagaaccatcatttcactttttacatttttttatcataatccattttactaatttcctatattctaaacacttatttgggattaatttgttcttcttttctaacttcaaagatgaaagataaacttcataggctctatgtagatggggggggactgtcattttcactattcaattaagtaagtagcgctgatatgtactggcttagaattttgacaggtaccaagcctactccagtactcttgcctggagaatcccatggatggaggagcctggtgggctacagtccatggggctgctaagagttggacacaactgagcgacttcactttcatttttcactttcatgcattggagaaggaaatggcaatccactccagtgttcttgcctggagaatcccaggggtcgcacagagtcggacacgactgacgtgactcagcaacagcaacaacagcaacaagcagtagtacacaatctgaataaagtcagacctctccctgcaactccagacttgaatatccaactatcacttcaacgtcttaagtaggctatttcataggcatcttgaactgaacacatgaaaaattaaactcccaattcaagtcagaagtctccaccttctcatttcatctgacagtaactccatcctttagtttttcaggctcaatactctagagtcatttctttcaaccctatatccaatcataaaatgttgttggttccacctttaaagtatattgagaatcaaagctattttactcatcgtttctatcattactattttgatctgagcaatataatcccccttgcttagatttatacaccgccctcagagctctctttgcctccatctgtgttcctttttagtctattttgaatacagtaatcagtgtgacctaattaacacataaagcagattatatcactcctctgcatgcacaataccctgatctggctccctattcagaataaaaaccaaagttctaacaatgacttacgaagttatttataatctgttctgccaatagctgttcttacctctctgctgctgctaagtcgtttcagtcatgtccgactctgtgcaatcccagagacagcagcccaccaggttcccccatccctgggattctccaggcaagtacactggagtaggttgccatttccttctccaatgcatgaaagtgaaaagtcaaagtgaagtcgctcagtcctgtccaactgttcgcgaccccatggactgcagcctaccaggctcctccatccatgggattttccacctacctctctgacctcacctctgattactgtctccttacctctctattccagccacaaggggtgtctccttgatgttctaaacaaagccaaatactctcatcttaaggtctttgttctagccctccttttgctaggaattaccttccccaaactatctacttagatcactccctcataattcttcaactttctgtgcatatctgatttctaaatgaggtctactatgattactctacttaatagccacaactgtccaattcttaccccttgtatttttaattctgtttaactttcctataatccttatccaattctaatgtactatatttatttacttaatatgtttatcgctcctccccactagcttgtaagtatctcctgggcaagtatcttgtttggttcactggggtctctcgtatgcctggcatattgtagagactctacacatttgttaaataaatgacaccagtacttcagaagctcagtagaagataattaatacaaaatgtgcaaaactgcctgaaaacttgtttttctcattccttctttattatagaactctctctaaaaaatggtagaatcagttttaggcaaccttttcttggcccttttctagaaaaagaaatataattttcataaacttttttataatctcatcaccaatttagattccacgttctagagactgaagaaagcaaagaaccattactgggtacatagttaacagtctaccagcattttccactaacaggcacaatgatgattcaaaaaagggggagaaatatctaaaaaccatttgtaaaagcgaaagtcactcagtcatgtccaactcttagcgaccccatggaatatacagtctatggaattctctagcccagaataccggagtgggtagtctttcctttcttcaggggatcttcccaacccagggattgaacccaggtctcctgcattgcaggtggattctttaccagctgagccaccagggaagcccaagaatactggagtgggtagcctatcccttctccagtggatcttcccgacccaggaatcaaactggggtctcctgcactgcaggagtattctttaccaactgagctatcagggaagccaattgctgataaaatcatttaacattttgtaaaacatacacagaaaacgaaaccaagctactacagaaaatgaacagcagtataggcctttttcaataaggggaatgatttcttacaaggaaaagtgaagatctacatgccccactaacaaatactgtaagtacatatacatactggagctgtcaccaagggatttctttccccaaacaaaatctggccacacatttttaaacaaaatactaaacttacagatcagcaatcctcaatgttttagatgtgttttcagttttccattataaaagagtaaacagagaagaatctttgagtgtgggtattgttttgaaaaagtttctaaagtgattctgatgctgacacatacatgaataacaagaataacatcactttttcctaacttctactctatttaagaaatagaatggaagtctgtggcatacaaaatcataatttgatagtcttcaggaaaacagaaactcatcatcaaaattcttaatatgactatttgaacttgagatacctccctgtcctggtttttcccattagcttagctttaagaacaaactctctgttttctttggcctacttgcagctcacacagctgaaattatttacttcgcagtattttgctttggtttggtttttaaaaataagacaaaaatgaatgttcccggtttagagccattttagacagagtatggtgaaaacacaagaaaatccatttatctcccaaatgtacaagtctaacaaaatgaacaataatgcacttttcacaactatcttcagcttattaatataatccacaacaggttaatctaaatatactctgctatttggcaaaatcatgattgttgttatagctaatctgtgcccaactttttgcaacctcacgcagcacgccaggcttccctgccctccactatttcctagagtttgctcaaattcaagtccattgagtctataaccatctcatcctctgccgccctcttctccttttgccttcagtctctccaagcattaggggattttccaataagttccctcttcgtatcaggtggtcaacttattggagcttcagattcagtatcagtccttccaatgaatattccaggttgacttcccttacgatagactggtttgatctccgtgcagtctaagggactctcaagagtcttctccaacaccacaattcgaaagtatcacttcttcagcactcagccttctttatggttcaactctcatgtccggacatgactagggaaaaaccatagctttgactatatggacctttgctggcaaagtgatgtctctgctttttaataccatgtctaggttggccatagctttccttccaaggagcaagcagcttataatttcatggctgcagtcactgtctgcactgactttggagcccaaggaaataaaatctgtcactgcttccactttttccccttctacttgccatgaactgttgggagtagatgccatgatctttcttcagggggttttaaattgtgttttgctgatcctccacctgctgaagggctataaccaatactgagtaagagaactggggcttattttcatcataggcaactatgaaagaatatttatttgttttggtgccaagaacatgcaggctcttcttcttgaaagtacaatgaacctggtgccggaaagtcattcgacattaaatctgaaatctgtgtcagtgctgaacagagaaaaacactgtgtgatgttgctattacgaagccaaagcactgcaacagctaacagggaaagagatgaaggaagggaaccacatatgatcaccaattctgagaatgaagataaatggactgcagttcagatgctgttggatgaagcatgaacaagaatagctgatgaaaggaagaagtgacaaaaggagtcttagaagttagcaggaagaaacgttagtaagaccatggaactcacggcaggtgtattcacacaatagggataagcagatacaccctaagaatattcttacaaacagttgcttcgtcccatgttatgtatcaaaagagaaaaccgaaaagtaatgatctgttactaatttctcaagcttaggggctactgatgaaccaagcttgaggcctatagtaaaactgtagtgctacaacattcatataactaagtatcaagccagcaaagatgttattcctaccaacctctcttcactctcttcttatattaaaggagagttttccttcttcttttaagggattttggagtaccaatagaaaaagtttatactgaacattacgtaacccttaagtaaaagcagcatggaactatggtagaagtcaaattttctatttcgttcccaatacaaacactaatgtctaagttacaacttcatacctgagaattcttttctgaatggatcacaggtttctgacttgaatcttacattattaaatagaaatatgtctattcaatttctatttcatctgctccataccatttaaaaaatatttagtgttatcatatattcctcacttccctttaaacactcaagaacaaagtcaacaaatataagttagaaactttttaaaaaacgttcaatttctgaagtttattatcacctttacctctttagtctcttctgggtctgaatgatccacagttatataaagatcattttgtaaatatttcagagcactaaggggatccatttgggccttttcttcaaacctagaaaatgcaaacaagaatagtaattgctttagagttatgaaaaagcatcagaaatgtctttcaaatatggagtgaaataatctgtatctgaggagatattgtggatatacaaaaaaatctgtgtttaagaatccagaagtaagaatactgccacttatataaacagtgtacatgtggagcctctggaaacaagggtaatgccaggctgtggtgctagagactagataagaacatttcctaccctattcttagggacttccctggtggctcagccagtaaagtgtctgcctacagtgcgggagacccaggttcaatccctgggtcgggaagatcgtctggagaaggaaatggcaacccacttcagtattcttgcctggaaaatcccatggatggaggagtctggtaggctatgttccatggggttgcaaagagtcagacacaactgagcaacttcactcattcactaccctcttctaaaactataagctaagattaagtcaactactaacacagtggatctatcaaatattttttataacaaaactacaacagtcaaatgtgtttcaaaaaaatgtaagtagggataaaataaaaatactttcctagatttgtgtcacatactttccactggaggtgtttaacagatacttcagaaaccaaaatgactatagtttcttttaatgattagatattttttaatgagactacttccacatctcagtcagtaataacaataacaaaaacaagtgtactaaccgtttatcaattgtttgtgctagacactgtatcaagcatcttatatatatcatttcatttatcctcacataacctctatgacaagttgatgatcatttaaaaagcaagagatgaagaactgttggccagtaaaagaatttggccatgctaaaacctagtaagcagcagaaatagaattaaactcaagtttctctgattccaaagcagaaaggaaacaatgagttctcctaaattaaaagtctgcttcgactatatatttatttaaataatgataattccttttgtaatagaattatatatggatttatttccaaaaaattggtatgcttttcaaagtattatacaaaaggaaagaaaagacattaaacttcatttggaaaaggaaaatagtaatgagcctttcatgactatgttcagctgacagcaccaacaatttcctgtgtttggaactaacctcagtgaaagggtacctgcaggaggggcagagactggcaaaatattacagtattcctgtaccagatagtaccctgattgtcagccagccttacaacccgcagctgagagttttagtcatgttactctaccatcctgcccataatgaattatggcacttgaaccaaaagcagtcatcttgagcttgctgagccatttataaagtggtctggcaaaattctttccaggatacactctccagggaactttctctaagataatctcttagagaaactgaatgagagatacacaagaacacgaaaacacaaaccacagacagcaacaggtagaagacacgaaatggtagatcctttcccttctatcctctcccttcctacctagctacctaccaaagccgtaagggaagacagaatcaagaagtagaacaagaaaaccagacagaaagaagcagaaagagaaaggctcaattacaacgaaagttacttcagtagcttctagctaatcagaactgtctcagtatcttaaacaattcttcattaggcctcaatgttcaggtgctaagaaagtactttaattctctggatatactctttcttttccagtgagatactctaagtatgtctttatcctttgtaacctgataacttaatcaacacatatctatggttctattaaataaatccagcaaaaggatccattttcctgaagttgtgttctctctaagcttttttggttagcctgctaaaacttattactgccatctagaattatatttcagccactaattgtgccctctacctaaaggaacaagggactaatcctatcaataacgggtttttttgcccctttctatcccccaatcatatgtttggaaacgaatattacagaagagcggcactttattttctgtatcatgtggcaccattaagaacaaagacacattcttggcagtcaacacacttctctccctccaaatttgtattttaactaaaatttatattttaactaaatagtcacaaatttcaaaggcttattatttgatcacacaaaactctttcaacttcagtcactttatttcatgaatcacactcacaagatttgctagtctttcatcatataattacaaatgtaaataatttgttactgattattattttccttattcactttcatgcctcactttgtgcatttactagcacaagtcactaacaatgatgctctgtatctaaaacttaaaagatgccataatatttcatagtatttcagagtcccataaattgtcattttgcctgcccactgatagatttttaaaggagaaaaactgccaaagatcaaaaataatatcttttaagatgagttggctgtgtggaaatgaataattctacttatttctagaaggaatgaaaattattttttctgaagggcaacttataaatcatcagatctgcctctatcctatagaaattttggataggggtgcatacatgcatgcttagtcactcagtcatgtccgactctctgcgacctcatggactgtagcctgccagactcctctgcccatgagattctccaggcaagaatactggagtgtgttgccatttccttctccagaggatcttcccaatccagggatcaaacccaggcctcctggattgcagattgattctttaccatctgagcaaccagagaagccacagaggagcatacagacttatatgataacattaaccacagtgttatttctgttatttataactgcaaataagtcagaaataatctaaatattctacaaaaggagactagttaatgtaaattacacagagtagaacactatgtagccattacatttatatttactaatgtaaggaataagacatttatactacatcacttattaaaagaaatcaggttcaaagcaagatgattcctattttttagttaaagaaacaaaaatttgtgcacttatagttcacgggatacataaccaaaatattatttctgaatggtgggatgagggatgattcaattctctgcagtagagagagaggacttttttattctttattaaccatgtattacttttctaattaaagccagagggaagtatttacaagtaaattccaattctttacatatagtactaaacaactcttttaaatctctagtgggcttttggtcaggaaatttttttcaaaaaccaaattcaacattctaactatagttgttgtatctgaagtagggaaggaaaaaaaaaaaaaaccgactatgattttcccaaacctgtcttatccctttaaaaacaaagtttaacattaagtaaaataccaaggaacaaaattttagcaatgcaaaataacattagctgaaggaaagttatgaccaacctagatagcatattgaaaagcagagacattacttggccaacaaaggtccgtctagtcaaggctatggtttttccagtggtcatgtatggatgtgagagttggactgtgaagaaagctgagcgccgaagaattgatacttttgaactgtggtgttggacaagactctttgagagtcccttggactgcaaggagatccaaccagtccattctaaaggagatcagtcctgggtgttcattggaaggactgatgctaaagctgaaagtctaatactttggccacctcatgcaaagagttgactcattggaaaagaccctgatgctgggagggattgggggcgggaggagaaggggacgacaagaggatgagatggctggatggcatcaccgactcgatggacgtgagtctgagtaaactctggcagttggtgatggacagggaggcctggcgtgcggcaatttgtggggtagtagtcggacacgactgagtgactgaactggaactagactggaaggtactttaagcttaaatgttgctagtaagacagaattgatctcttgctatccagccaacgtgacaattcagcccctttctcctagagatcctataggaaatactcttacttattcatagtaatgacaaagcaacagaagcaactcatatctctttgtttcttaagcacaacttgtgaaagcagagtaagaaataacaggtaaatatgatatgataaagaaataaaactctattttatacctgcacagaggttttaattttattctatatattaatataatacataattatataataaacatataaatacacataagtatgcatgtctgtgtatatacatatgtgtatgaagtggaagtggcggcggtggtgaagtggtaaaaactctggagtcagaatactcaggatcaaatcctgctgtcacagctgaatgaccttagatgagttacacaatccacttaaaaatggctccatttcctcttttacaaaaagagtaactgtaacaataacttctccactgacttattgtgcaaataacatgtaggatttagcatacaaaaactgttcatcagttcagttcagttcagtcactcagtcgtgtctgactctttacgaccccatgaatcgcagcgtgcaggcctccctgtccatcaccaacagccagagttcactcaaactcaagtccatcgagtcagtgatgccatccagccatctcatcctctgtcgtccctttctcctcctgcccccaatccctcccagcatcagagtctttgccaatgagtcagctcttcacatgaagtggccaaagtactggagtttcagcttcagcatcattctctccaaagaaatctcagggttgatctccttcagaatggactggttggatctccttgcagtccaagggactctcaaagagtcttgtccaacaccacagttcaaaagtatcaattcttcggcgctcagctttcttcacagtccaactctcacatccatacatgaccactggaaaaaccatagccttgactagatggacctttgttggccaagtaatgtctctgcttttcaatatgctatctaggttggtcataacttttcttccaaggagtaagcatcttttaatttcatggctgcagtcaccatctgcagtgattttggagccccccaaaaatgaagtctgacactgtttccccatctatttcccacgaagtgatgggaccagatgccatgatcttcattttctgaatgttgagctttaaggcaacttttccactctcctctttcactttcatcaagaggctttttagctcctcttcactttctgccataaacgtggtatcatctgcatatctgaggttactgatatttctcccggcaatctatggtatctatcatcaccattaaaagctgtctctccccgcaaactgtaaattttaattacaatctaacactattagcaaccaagggaatagatgtatttttctacatttttcagtagcttatcatttgctaaggctaaaaaacaaactagactgaggagatatatatgaaaatgtttgattacatgattttgcaattatattgcaaaagtaatgatgcaaaactataatattttaaattgtattctgaaacatcaaagtataaagagattatttagccaactatatcatcatatttactgttaagagaatcaacaataggtcagtcaaatgccaataattctacaaatgatattatttgtagtgggttaggccttgagttacttgaaggtaagttcatcatgttcatagaaactttttccattattgtgacagttgcaatatatccttgcttatctttaataacttttagcattaagatctatcttcactttgtacctttctttgaaaaagaacgaaaaaaataaggagagtaatagggcatttacaaaagtcatgatcttcacaatatttacactgtcgtgtcactaaatttccaaagataaagtcacatctccaaagcttaggtaatatcaacaatagctgataatgctaaataaaagtttttagtgaattatttttatacctgtgttttcttatgaggtacttgcaatgccgcagtaagtaatcttttgaaggcctacacaatttcagtgaccagaagtcatctaatctcatctttggggagcatgattttcctggattcccaccaaataaataatgaacctataataaataaagcaaatcagatttttaaaaaatgcatgcatactcaggaaagtcgtagtaaaatttcttcattttggtagtagtgtataacatgtaacttgtttagctttactcatacaaaaaaactaaaacattcctgcatgtctaccaaaggcttcctctgatttttctcaagtttccattttactttaaagtactgtgattacttccttaaattacatttcatgttaaaataagttgtattaccacagttacactgaaaatggaagacataaaaataaagcaatggtagtaagaagctattctaagatacagtttggttaggcaacaaataatagggattatcaagttaatcaagtgtcgatcataataaaaaatcatcttttaaaaaaactgacacacaagttgaatcactgaaggtcaaaaatagctagaagttttaaaaattttagcatcttaacttttgtagaatgtttcaatatgaatataattgaatattagccttaatgctgaatattaaatgagatgtacgatttgtgaaataacttttaaaatattattctatcatataattaatactgttagatagttagaataggaaataggagtccaatatagcagtggctaaaagacaaagaaaggaaaaagcccacaaaaacagaacaaaggaagttccaaggactggagtgagaacctcaggtgaagcaaacagccctcctggctagcccagtttacatagggcaagctcaggtggaggagaaagtcacataaaaagaggagtcaaaactgagccccgcacttcttttgggttggcccaccctcactcctagaggatgcattttcccttgcttgccaaataaaactgagctgtaactgagctgtagcactggtccactgcttaaactgagctgtaaccaagctgtaacattggtctgccacttcaatttttgctgtggcaagacagaatgaggaaattacacgctcccctgacaataccacataagaaaagtgaaaggaatgcaataatggcataatgacactattaaaggtttagtaatattctgtattcaaagtggtaaagcattttttgatattttgaaacatttataatcagcagtgttatacaagagatattatttctatcctatagatgggaattcatttaaccttcactttgggagactctcagagaaaggggttttagttattcgaatggtatcgtttacctaaagatctcaaatgattgagaatttaacagaaagaatacagttctgtcagtaatttactatataatctgagcccgatcattaaactatatgtaaagtttaagggagaaatacctaaagaaaccacactaaacacttagtgacacgaaaacttcagaattcagaactattttcacaaggctgatggaatagatatgtcaatcataggaaaaataaagatttcttacacaacaggaaaatctaaaatcaggaagttatatatatcttttcatatcatggaaaaaggtatacaagtgctgaaaactgtgtatcctctacttgaatattcatattatagaaacaataggccatgctatatatcagatctatgcagctaagaagcaatagccactggccattttcataagaaatgtgccaggaactatggattatgcaaaaatgtttattcttttaaggaatttcagggagaagtgatatctgtgctacatattctagtaaatgttggttatttttattcagatctactgaaaataatcagaaacagttattttgagattctttctgattgtacgtcatagaaagtttaccggtcaatgtagttaggataccttgtgtaattcatcatatacaagctgatgggcaaatcttggacatggttcttcctcctgcagacttttacttggattatcctttgcagcttgatcattcttatagacacaagacctgcaagacattgcttttaaggcattctatcctagaaaattagcagtacacataaggttaatataattgtagcaagcaaattaatgcaatgtctaattaccaacaaaagattataaatttgttcacatcaaatcttaaagttctggtcactctcatataaaataatccgaatttgttagaactgagttctgaagttctttaatgtccatcaaaatctcatttaagaacaacctactttgtgttatgaaataggatcagcatatatgaaggcttaaaccaaaggttgaaagagatgatatcatatttatctattatacaataaaaactcacaacagactgctttcattcttactataaataaatgtcccatttagaagataacaaatcccttagttgccgagcatcaccttccattactgaatggaagttctcagaagttcctctgttctggagaatattcacttaggtagtactacagaacattaaagctgggtcctctaagtcagtgtttttcaaagaaaaatgtatagcagttctgtgaggtgctctgtgacaaaagggtcctaggtttgaatatgctaaataaataatactccccttccctcaatcttgctctagtcaaactgcttcattccataaaaactaagaaaggcctgggaacattaaaaatacattcttctcaagcttacccatctacatggtagcaaaagctaaactaaaatataattctcctgatgctcagaccaggagatatctactaactgaaaaattcagaggtaaaatccattgctggacatcattgtaaacatgggcaccaatactgactcttccaatacctaatattgatattaaaatatatgacatcacaaactaaggtaagccttctacctccctcttcttctgaataaaccaacaacctcaacctcaaagaaatgttacacagggatttcaacacagacaagagctacttaccaactatttcttacaatatcataaatccagaatgaatttctgacattctcttccctcttttccttgtctttgctgagtccagataagacatgtatttcattcagctctggatcaatggttgctctctgtgtgaatcctgtcattggaactataaattgaaagagaaaataagaggatagtgttaacattaggtaacaggttagtactacttcagcacttatcttctaacatatgacataacttttatattaaacaataatcaaatgtttattgccctctcctcactctaaaacataagctctataagggcaaaggttgtttggatcactgttttgttcccagtacctaaaacaactgccaggcatgtaacagttactcaactgtttgttgaaataaatgaatgataactatcaggatggagttaggaggagaaaagaggtagaacgagtgcaatataattatttttattgagggaaggggcaatgctttatttaactgatttattctcttgactggttctaatttaatagcagagacaaaatatttcaatcttgactaagaaaaacaaaaatttgacacacaggtttgtttaataaagtcaaagtcatctaaaatacctgttcaagacatataatgaaatgacaaagtttccaagaaaaatacatatttgggggtaaaatatgccattttgttttccagagtggtttggactcccttagtcagtcagttcagttgctcagtcgtgtccgactctttgcgaccccatgaatcacagcacgccaagcctccctgtccatcaccaactcccggagttcactcagacttgtgttcatcaggtcagtgatgccatccagccatctcatcctctgtcatccccttcttctcctgcccccaatccctcccagcatcagagtcttttccaatgagtcaactcttcacatgaggtggccaaagtattggagtttcagctttagcatcattccttccaaagaaatcccagggctgatctccttcagaatggactgattggatctccttgcagtccaagggaccctcaagagtcttctccaacaccacagttcaaaagcaccaattctttggcgctcagtcttcttcacagtccaactctcacatccatacatgaccactggaaaaaccatagccttgactagacggaccttagtcagcaaagtagtgtctctgcttttgaatgtgctatctaggttggtcataacttttcttccaaggagtatgcatcttttaatttcatggctgcaatcaccatctgcagtgattttggagcccaaaaaaataaagtctgacactgtttccactgtttccccatctatttcccatgaagtgatggggttggataccatgatcttcgtttagagtcaattttatgagaaaatattttcctgagaaacccattaaatgagtgatggtcattttgcattatccagtaatttgcaaaacactaatacggcaaatgcaaatcttctcactattgttacttggaaatattcagttcagttcagtagctcagtcgtgtctctttgcaaccccatgaatcgcagcgcgccaggcctccctgtccatcaccaactcccggagttcactcagactcatgtccatcgagtcagtgatgccatccagccatctcatcctctgtcgtccccttctcctcctgcccccaatccctcccagcatcagagtcttttccaatgagtcagctcttcccatgaggtggccaaaatactggagtttcagctttagcatcattccttccaaagaacacccagggctgatctcctttagaatggactggttggatctccttgcagtccaagggactctcaagagtcttctccaacaccacagttcaaaagcatcaaatcttcagcgctcagctttcttcacagttcaactctcacatccatacatgaccactggaaaaaccatagccttgactagacggacctttgttggcaaagtagtgtctctgcttttcaatatgctatctaggttggtcataacttttcttccaaggagtaagcgtcttttaatttcatggctgcagtcaccatctgcagtgattttggagtccccccaaaattacctatttcccatgaagtgatgggactggatgccatgatcttcattttctgaatgttgagctttaggccaactttttcactctcctctttcacgttcatcaaaaggctttttagttccttttcactttctgctataacagtggtgtcatctgcatatctgaggttattgatatttctcctggcaatcttgattccagcttgtgcttcttgcagcccagcatttttcatgatgtactctgcatgtaagttacataagcagggtgataatattcagccctgacgtactccttttcctatttggaaccagtctgttgttccatgtccagttctaaccgttgcttcctgacctgcatacaggtttctccagaggcaggtcaggtggtctggtattcccatctctttcagaattttccacagtttattgtgatctgcacagtagttgaaatagaattttgtgattgacaacatacttgccacagatctaaaaacaatgtcattgttacagtattaaatttcttttatacattaacaagtatcatatgctggaaaagctacacaaacatcagcttgaagtaaaatatctcaatcaagccataataatacggaagcagatgctaaccacaccgatactcatccgtctttatctactttagtagggccaaataatgcaatattgactttttcctagtttaattcatctatcttttatattcatattcaataaatttgttaggaatattttagagactatccgaatgtaccccacagtaaatatagtaaaaactgtatgcacacacacatatgtaacatatgcatccatagacaaatacatttatcttgatacacacatacaccaacctaaccttaataataacctcaactctcattctacaccgtttttagtggtcatgtaaagcctggtattttctaattaaaccctggtaaactttcaaaagtaccttggttctgacctgttcctcagataatcttggaagataaaacagtaaagaaattaaatcattttcattaatggtagaagcagaggacataactgcctaaatattttgcccttaaatttcttcattccatttagaattctatagcatgggttgacaaactatggctccatctgatttgctgaggttcaaatcaggcctcagtcaatcattcacactgtgtctgtggctgatttcaccccacaatagcaaggttgagtagctgcaatggcaataattacagctggttcttcatagaaaacatctgctaatccctattctataatcttttaaaatgaaaatatcagagatgtatgacttataaatgaatgcagcaaactgcttaccttaaataaggacccactgaggaaatggaaatttctgggtggaatggaaatcagtagagtgggaaagagattttgaattctattaaaacagggctgaagtcactaagaggacaataaaggagtcctgggctacacaaggcaaggaagaatgcagagggatgtaagaccaagttttacatgcttcctcgtccatactgtcacatttttacctagaagcaggtttgcaacacatgaaaaaaatgacaagtgttccttcttaaaaacaaaagcagtgggccggtttacaatacttagggaggcaagacttccatgtttaccaaatgtgcattataagaatttttaaaaattactttgattataaagcatattagaaaacatatatttcccatttctttgctctttcacatacaatatgccttttactctatgtaacactgatttttgcatccgacttatatatttaaatcttttattggctttttaaacaactttactgaatattaaccaaataccatgtgattcacctatttacatagctgggttgttttttttatatccactgtaaaaatatcatcataatctaattttagaatattttcatgactccaaaaacaaaccctgtacccatcaggagtcatttcccaccccctttctgcccactgggtcacagcatcatttgacatgtctaccaacaatgagtgtgcagcagagacaggcacagggagaggatcctgagacacagagatcaatcaggaggctgttaagaatgcgatagagtggaatgaacaaaagccggaaggaaggatcaataaacaagcatttatttccatcagcacaaaaatataaaaatctctgaactggctgaagagagacttggaatggaaacttgtgaaaaataagagtaaaatgtttcactgaaattttttggaggttttcaaatattttactctaaaatattcaaatgcaaaatctttcaaggacagaatttctactaattcttaagtttacagatctttacaaatataatttttattgcatactaatgacaagaaaaatgttcacatataaaatatttacatacatgtgaatagaaaaaaatatgacagtacataaaaataatagttattggagaggggaagttaggacattttaactttctaactgtataatatgaaaactttcaatatatattgcttttatagttataagaaaagaagaacaatctaaaccaaaatatatataaaaaaaaatctgggtatacatactgggaacttttagtaataagtgaaaaactctcacacatcctctcaaatttctcaaggacaaaattttacattaatatttgaaatgctgctatttacatggaaagagaactcaggtttcaaaagacaattttaatggcactaaaaagccctatgttttaaaatcatttagttacaaaactaaaactagagattaaagtattttttctctaaaaactaaaaatgaaaacatatctaaagagttcctaaaattaagggttaattcaaacttacactgaatgcatctatgttaatggccttttgcttaaattttacaaattgtacttaagtttaactcctatttccattccactctacagacactaacaattcaaagaacatttcaataagaaaccaataaaaataaagcttttcctctaatttgaaaagatacactcagcccagtattcatagaaacactattttcaataaccaagacatggaagagacctaaatgtccactaacaggtaaaaggataaagaagatgtatgtgtatgtgtagatatatatataaacatgactctgcacaaaaagaatgaaattatgccatttgtagcaacatggattttgccttttcatactgttcatagacagatgggcacaataaaggacagaaacggcaaggacctaacagaagcagaagagtttaagaaaaggtggcaagaatacacagaagaactatactaaaaaagatcttaatgacccagataatcacgatggtgtgatcactcacctagagccagacatcctggaatgggaagtcaagcgggccttaagaagcatcactatgaacaaagctagtggaggtgatggaattccagctgagctatttctaaccctaaaagatgatgctgctaaactgccacactcaatatgccagcaaatttagaaaacacagcagtggccacaggactgcaaaaggtcagtcttcattccaatcccaaagaaaggcaatgccaaagaatgttcaaactatcagacaactccactcatttcacatgctagtaaggttatgctcaaaatccttcaagctaggctttagcagaacatgaaccaagaacttccagatgtacaggctggatttagaaaaagcagaggaaccagagatctagttgtcaacatcgggtggatcatacagaaatcaagagagctccagaaaaacatctacttctgcctcattgaccacactaaagcccttggctgtgtggatcacatcaaagagtggaaaattcttaaagagatgggaatactcagttcagttcagccgcttagttctgtccaactctttgcgaccccatggactgtaggacaccaggcctcccttccatcaccaacacccagagtttactcaaactcatgtccgttgagtcagtgatgacattcaaccatctcatcctctgtcgtccccttctcctcctgccttcaatttttcccagcatcggggtcttttcaaatgagtcagctctttgcctcaggtagccaaagtattggagtttcagcttcaacatcagtccttccaatgtatattcaggactgatttcctttcctttccttggtccttcttgcagtccaagggactctcaagagtcttctccaacaccacagttcaaaagcatcaattctttggcactcagctttctttatagtccaactctcaaatccatacatgattactggaaaaaccatagccttgactagatggacctttgtcagcaaaggtctctgcttttaaatacactgtctaggttggtcataacttttcttccaaggagtaagcgtcttttaatttcatgactgcagtcaccatctgcagtgattttggagcctgccaaaaataaagtctgtcactgtttccactgttagaaatactagaccatcttatttgtctcctgagaatactgtatgcaggacaaggaacaacagttagaactggacacagaacaacagactgattcaaaattgggaaaggaagtacgtcaaagctgtatactgtcaccctgcttatttaactcatatgcagagtacatcatgcaaaagactgggctggatgaatcatgaactggaattaagactgccagaagaagtatcaacaacctcagatatgcagatgatactaccctaatggcagaaagcaaagaggaactaaagaacttctaaatgaaggtgaaaaaggagagtgaaaaagctgacttaaaactcaacattcaaaaaactaagatcatggccatctagtcccaacactttgtggcaaatagatgggggaaaagtgttaattaacagtgacagatttcattttcttgggctccaaagtcactgtggacagtgactgcagccacaaaattcaaagatgcttggtccttggaagaaaagctatgacaaacctagacagtatattaaaaagcagagacatcactttatcgacaaaaatctatatagtcaaagttatggtttttctagtagtcatgtacagatatgagagttggaccataaagaaggctgagcaccaaagaattgatgctttcgaactttaatgctggagaagactctgaagagtctcttggactacaaggagatcaaactgtcaatcctaaaggaaattaaccctgaatattcattggaaggattgatgttgaagttgaagtgccaatactctgggccccctgatgcgaagagctgactcattggaaaagaccctgatgccaggaaagactgagagcaggagaagggggagacagaggttgagatggttggatggcatcaccgactcagtggacatgagtttgagcaaactctgggagatagtgaaggacaaggaagcctggcatgctgcagttcacagggtcacaaagagctggacaagatttagtgactgaacaatgacaacagcaacatggatgcacctagcaattgttacactaagtgaagtctttagaaaaagacaaataccatcacttatatgtggaatctaaaatatgacacaaatgaacttattcagagaacaggaccagactcacagatagaaaacaaacttatggttaccaaaggagaaagggtaggaagggataaactaggagtttgggatttgcagatacaaatcactacatccaaaataaacaacaaggtcctacttatggcacagggaactatattcagtatcctgaataatctacaatggaaaaggatatgatggaatcattttgctgtaccagaaactaacacagcagtgtaattcaatttaaaaaaaataaagtttttcatatctaccttcaaaagaagtctgtatttgttatctcctttgtaaacagaaggaaaaaaacttttcattttaagcaaagattttatgaattcttactaaagaaaattacatgttaaatgttacatatatacagaaaccaaaaattatggtctagccctagtaggcattttagagttgaatttttactaccaacagctgctgcttattaaatcaaaaggttagggcttttggttttagatagcaagctaaaccttaaccacatttttcttccttcccagcatcccacttgaaatggcagaattctagccaaaagaaaaacaaaaaaacaggactggaaatgtcaagaaagtaccaacagataagaaattctgaggaatcttgagaaacagcagttgggattatactgagaaagaaatcacagccaaggaagagagcccaactcactagcaatataagatggaaaatttctgagtaaatcatcaaatacaaaaggcaggagtggaccatgagaaagactcctgtggggagcttataataaggacaaagagtaacaatgagagcagagctttagtgactccaaatcttcaccacagacgttaggtgaagacagcaaacaaggcagctgtgctgtgataaccatgtacatgtcccagcctgccttcttatcctcagtttatgcatcctgtaagaaagcttgcatgcatataagcctgcatcctgtaagaaaggctgcaaaactgtcagtcagattctggttaaagtgagacgtctactgaaaaaaaaagagacatacaatgcacaggaaaccagtgtcagctaccttctttaactgatatagtcctttattaaaaatttttaatgtttagataagaatcacatcataatataagaaaaaaaaatcagcaatgtaaagagagggacctagatgaacaaacagaacaacaagaaaagataaatcacagaaaggaacagaactctgaagaaaaaacacaaactcattatccttgtagaaagtaaagaaaatattacatgtgtaacacaaaaataaacttccacaaaaaagaggcagagagtatgaaaagacattaaaaagtaaaatataacagaaaatcaaatagaatgaaaacaaaatgtgtacagtaaaaacaaagtcagtcatttcaagatataactgacaaattattagaatatatagcataaagatatagaaattatgattaagatatagaaaaatgttaagggacacaaaggataaacccatggaagtaaaaaatttctctgaaaagtacaccagaaggagaaatgaaataatgtagaaaaaagaaataaagaaaactttcctgaatgaaagaagtaagtgggtgttctgtttgaaagacctgaggtactaagcacacacatacacacatatacacacatctcccagtgaaatttcaaaaattcagggattaaaagaaaattctaaaagcttccagagagaaaaggcaggttattatatacagaggaataagtatcaaactaacattagaccttttatcagtaataaagaatgctagaatacaactaagcaattaacttaaaatttttcttggaaatgaagatatggaactaaaaattctatttcctattaaactagcaatcccaatagtgagggcaaaataaaggaatttttggaccagcaaatatattaaagtttatactgatgactgcatctgaaaaaattctttgaggagctagtccaactaaacaaaaatgaatccaacaaaaagaacgacatgggatagaagaaacagtggcagtgattcagtgacagtgaagtcactcagtcgtggcagattctttgcgaccctgtggactgtgtccatgggattctccaggcaagagtactgtagtgggttgccatttccttctccaggggatcttcccgatccaggatcgaacccgggtctcccgcactgcaggcaggtgttttaccatgtgagccaccagggaagtctacacatgtgatatatgacacaggaaaagaaaagggagcttgaaaggaaataaaggtccattgggtcttaagcactgtgtataagacattttggaatgaaaaagttttaataatgtagaacattttttcctctgtaagtccaatcacaacacttgaatttatatagtgccccttccccctctgtcatatttggatgcttagaattttgatcctaatgttttccttcagtcaataataaatttcctcaagataatttgattaccacctctcacctctagatttctcatgtctcgctttcaaacgggtttcaatatgggccttcatttggtaaacttcaaggcaaaaacatctgataatattttattttatcatcatatgaaagttagggggatataaactgcttggttcatagacattttccttgagtatttttaaagtttactactgtcattcactttcattcactttgctgttgaactgatacctagctagctatcttgttccctacagatcaccaactttttctgaaatctttaagaatttgctttacatctttaacattcctaattttactttaataaatgtgtcttaagtacgtgttctcccttatttttcccatttagcatactataaaccctttcaccaatctgaagccttttatcttttctgaattctaggaaacttatctcttcaattatctttatttcttcaattatttcatcttcttgaaatttcatttttgtcttctcctgaaattgctgttaagatgttggtacttgcacaattcttctctatatcttttcctttcccatatatatgagtgtctcatttcaaattctttccccatttatgttattactatttactgagaattctctgtgctaattagtaggtctgttggctatctattttaaatataaagtagtgcgcacctgtcaatcccaaacttctaatctatccctcccccatgacactggctctctgataaccaaaaattggttctctaagtctgtgagtgtgtttctgtttcataaataagtgcaagatactggagtgggttgccattgccttctgtttgcatattaaaaagcagacattactttgtcaacaaaggtccatctagtcaagcctatggtttttccagtggtcatgtatggatttgagagttggactgggaagaaagctgagcaccgaagaattgatgcttttgaactgtggtgttggagaagactcttgagagtcccttggactgcaaggagatccaaccagtccatcctaaaggagatcagtcctgggatttctttggaaggactgatgctaaagctgaaattccaatactttggccacctcatgggaagagttgactcattggaaaagactcatgctgggagggattgggggcatgaggagaaggggatgacagaggatgaaatggctggatggcatcaccgactcgatggacatgagtttgagtgaactggagttggtgatggacagggaggcctggcgtgctattgttcatggggtcgcaaagagtcagacacaaccgagcgactgaactgaactgaactgaatggtagtatccacaggaggggcaaaggacagaagatctgcaacatataatattttaaagcatttcagattcaactgctaaaaagtgactgaatgccaggaactttagccattcttgaaaaatggactcacagagtaaaattaatcaaacagatcagccaacaagatcgtatgttagtcaggaacacattttggaaggacacttgtctgcgacaatagagaataagaattgtacaacatacaactattattgccaatctgttatttttatagtttttccaagaaattacaatgataatcattcaactctactatttttttgttagcatctttaaaacttgaaatagaactgataaaagggaaatccagtaaaatattttatctgccaggctgactcacatttttttttcccctttgatttacctaataggagagtaccagaatttgtaatacaaggaaaccttacagggaggataaaaacataaaaagttatttcaatttctgaggagatactcttttgccttcatgaactaatctgaattctatttttgcttcatgatccaatgcacctacattttcattattattgctttaagacaggaaaaaataatttttagaattgacacagtaatatgagcttcccttgtggctcagatggtaaagaatctggctgcaatgcaggagacctgggttcaatccctgtgttgggaagatcccctggagaagggaatggctacccactccagtattctggcctggagaattccatagacagaggagcctggcagcgttgaaagaggcggacacaactgagtgactttcacagaaatacaaagtttaacaaaaacaaatttccacaaattctctgttagaatattttcagcttcaagttacaggaaatctgaataattataaattagttcataaaataaatttttgcaaatagatagttccagaatggtttcagcaattcaaccaaataataatgctaggttgtcattcttagaattctcttggctttccattctttccaagtcgccagtaccagctctaagcatcacattgttttatagagtattcaaaccagagagggaaaggactctttcggcatttgttttcttctggaaaatagtttttgcaagtgtcctcctggagcctttccttgtgctcattggccagaactgtatcacacggaaggcagggaaaatgaaataatctggcaaaggataaaaatgactattttagaataatcactattcaactcctgggattggacaacttgtcagtaaacaaaatcatggtttggttaacaagagctaatgattatagggtagcaactgacagtgtctgccacattcttttcttctaaatctgggacatttaaagttttgaatgagatcctactcagtttcagtagtagctccagtttaaaacttctactatttgctttcattgaaattgatttactgtgttagttttaggtgtacagcacagcgattcttttttctgcagattatattccattatatgctgtgcactcagtcctgttcaactctttgtgagttcatggacaacagcctaccaggctaccctgaccatgggatttttcaggcacgaatactggagtggctcaccatttccttctccaggtagtccattatgggttattataacatattgggtacaattccttgtgttatagagtaaatccctgttgcttatgtgtttataaacagtagtttgcatctgttaatcccttattcataatttgtccctccttcctcctctctttaggtaaccagaagttcattttctatatatattcatttgtattatttttttagattccacatacaagggatattatatagtatttgtcttcttctaacaagtcactaatcattatattctgtaagtccatccatgttgctgcaaatggcagtatttcattcttattttatggctgagaggagcctggtaagctacatatagtccatggggaagcaaagagtcggagatgactgagcaactaacccacaaaaatatttatacacacacagacacagtgagccatcttcttaggtcaactgtctgttgacaggcacttgggttaccttcatgtcttggctattataaacagtgttgctattagcatcagggttcatgtatccttgcaaattaaagcttttactttttccaaatatatacccaggagtggaatagctgtatcatatgatagttctatctttagcttttaaagtaacctccatattgttttacatagtggctgcattgatttacatttataccatatccctttcctccacatcccctccaacatttgctatttgtatacatattgatgatagctattctgacaggtgtgaaccaataccacactgtggtttttgatttgcatttctctaataattagcaatgctgtgaatcgttttgggcttccctggtggctcagatggtaaagaatcaggagacttgggtttgatcctgggttgggaagatccccagaagacggaaatggctactcatgtcagtattcttgcttggagaactccacggacagaggagcctggcaggttacagtgatggggccacagagtcagacacaactgactaacagccagttagccatcagaatgtcttctttggaaaagtttctattcaggtcttctgcccactttttgattgggttgtttttcgacactgagttgtatgagttgtttgcacattttggatattaatttcttgttagctgcatcacttgtaaatgtgttctctcattccatagatcatctttgcattttgttgaccatttcctttgttgtgcaaaaccttttaaaatttcattcagttcagttgctcagtcgtgtccaactctttgcaaccccatgaatcgcagcatgccaggcctgcctgtccatcaccaactcccggagttcacccaaactcacgtccatcgagtcggtgatgccatccagccatctcatcctctgtcgtccccttctcctcccgccctcaatccctcccagcatcagggtcttttccaatgagtcaacacttcgcatgaggtggccaaagtattggagtttcagctttagcatcagtccttccaatgaacacccattaggccccattttgctttcatttcttttgccttgagagtaatctaagaaaatactgctaagatgtatgtcagtgttgcacctatgtcttctaggagttttatggtgtcatcatacatttaggtctttaaaccattttgagtttctttctttttttttccacaaataatttactataatcacccacatcattaagtacacccacattatgcttactgtgaaaatggctttccttaatgcagattcaattcaggaaaaatataaattactgagagtttatttctgtatatggatgaacttgagtttatttttggacaagggaatgttctaatttcattgttttacacatagctgtccagttttcccaataccacttgttgaaaagactgtcttttctccactgtatattcttgcctcctttgttgtagattaactgaccataagtatgtgggtttatttctggacttccttttctgttctgttgatctgttctgtgtgaataccatgctgttttgattactgcactttgtagtatagtctgaagtctggaagggttatacttccagctttgtccttctttctcaggattactttggcaatgctgggtcttctgcagttccacataaatttttggattttattaaaactattattttacctgaacctatgtttctaccactcattatttgctttctgtaaaattccaactggcttttgacacccaacaatgtagtatttattaatctatctcaattacatgaagttacaaagaattcatctcatgaatcaaacataactggttagctactggtggataaagttgtttctggatttcttaactcttgcaaacaatgtcacattaagtatctctgtataacttacttttatgcatcagtacatatctgagcagggtaaattctggaaaaaaatgcttggtcaaagagtatatgtatattttattagataaaaacattcaatgagtgatcctttaatttacatttaaaaaattatgaatggagctgtgcttatacaaaagtaaatctgtcagctacctgaattgtatttttctttgaattatctagttctatcatttgtcactgttctaatagaaaattattccttttttaaaattgatttgtaagagtcttttgtttaaaaagtaggacattaacctttgtctcagttcccagtttgtcatttatcatttgatatttaaatatttttatatatataatttttaatttgcaaaaaatcaaactaagtctctttcttttttttttaacagcttctgggttttatgtcatggttggaaaggcttctctatcctaaattattaaaagcaactagacttatatttttattaaaacttgagtctacccagaattttttttctgatatatagacatcaattcgagtcaggattttgctttttgcttgtcaggtcttaagtgacatctcagtgtcatttattgcataatctattttccttctctgactggcgatgcccctttaccatatactaaattctcatatgtaattaggtatattttatagtgtctgctgcattccattccattaatctgcacaaaattgtagctttctaaatactcggtaatattatattatctttcatttttgaaactgtctttagtgtttttgaatgcttctttttacagatgaacatgtactatcaaatgacctgttttattttttcacttttggctgcactggttctttgttgtttgatgcagcctttctctagctatggcaagtggtggctactctccattgtggtgcacaggtttctcaggaaagtcgcttctcttgctgtggagcacaggctctaggagcacgggcttcagcagctgtagcacacaggctcagcagttgtggcttgcaggccctagagcatgggctcaatagttgtggcacataggcttagctgctctcagcatgtggaatcttcccagaccaaggactgagcccatgtcccctacactggcaggctgattcttatccactgctccatcagggaagtcccatatgacctaaattttatattgaaaatatgaaatacctctataagcttataactagcaaaaacacccctggcaaaggtgaaagggggaagttatggaaagttattaccaccagtaatgttgagaagaaaaaagtacataatccagtttatcagaataatggcacacctaatacaaaagatgttaaacagaaagcaatgaagtctagttacattaaaaataggcactcccatctcctagctgagtaactaatctgtgtaaatgacagcaaaacattagtttcagagtcttctctatactgccgaactggccttatttagttaactgttaagagtaaaagggtcaaaaatataggaacttacacacacacacacacacacacacacacacacacacacaaagattaaagaaaataagcacattctcaggctgaaaatcagtagattttgcatttaaagttttcatgaaaatgtttatagataaatcaaatcttgcagacatgactaacacagccctcattttttattttcacagcctgataacggcaaaaaggaacaaaatttaactgtcaaaattctagagctagatgatgagcctttacgatcaactggtccaatcccctgttttcagatgaacaatcaggtccagagaaattacacaattttgccaaagctacagaaggatgagtggcagacccagatgaagaaagatcagatcctctgattctgaattcactattctttcaattataacaagctgccactatggttaggacagaatggtataaacactggcagatgtgggaaaatagagttgacagaatttaaggaacacaacaagtaaacacactaattactatagaataggaactagatgtttgtaagagttctgtatcatcaatgccctatttagtatctggcaaatgttgaagacacaatatatgtttgttaccttgaattaaaaaaaaagatataagaaagtagttctattattgtcagctgagtttctagagcaaaccataaagttctggttgtgtgacagatcttctaaacataattttcaattagtgttaaacagagcttacatatgggaagtctgctaaaccccctgtgttcacagacctattgccaaaagttatgcagaaataaactcaaatttttgatgtgctgaattttgatgtaattatgtatgtgttagacacaataccagtaaatccttttttcctaagcagctgtcaatccactgatttaaattgtaatttccttctaaagaaaacataaaactgttatactctagttaaaaaaattagagttaaaaaaaaagagttgatgtttctttagatcttaaaatgctaaatctgagttaattcatttaagtaatcataaatagcaatcatttacgattttacagtatctgacacagtaagaaattataacaagaagcagtaattttacaactagatatactatctctaactggtggtctcaacagttcatagaaatttcttctatgagtgtaaacagtccaatttgaagctcatataaaagcagttttaatcagataactcacattactgaatcacagaaacatagcaattatgtgttaagtccatctcaaattatactaattaactataataaaacaggtttagaagaacagttaataaatagaatgtttaaataaactacagagcatccatacaataaaattggtattttctaagaatacttaataatatagaagtttaaatagtactgtgtcttgtccttaaaaggactttgaatggcttacaaaataagtaattatttaacaagataaaattaaaatttaaacagacgtttaaaaaccagctaaaagtaactctacgggaggacaatacatacaccatagttctgacatgaggtcttctaattggtctaacttaagccagtgaaaaaaattttagactaagagtactgaaaagattgaatactctttgagaaatcctgaataaagtctgtgtatttcagtaggtttttttttttttttttgaggttctgaaaagcagagtcaagattttactgccagatgaatattcagaatcatgtaaacaactaaagttaaaacaatatgctctaatccctaacctgggtttgaggagtttcaggagacaatgctttataagctaagatctgaaagatgagtgaaaatcagctacactttggaggtaggaggaaagagtgacttaggtagggagaacactatgggaaaaacctcaaaggcatgaaaaaatatgccaccgataattacgattcagtggtcatgaaaaaaagaattggtggcaaggtcgagggtgaatatcaagaatggggaactaactaagctgaggcatattataaaagaatctgtgaattaggctgagtttagacttaatctgagggcaaagaagaacaattaaaaaaaacatcttaagcaatggagagaaaaatgatcaggtttatatttttaaaagattttctgggaatcctggggtggtctagtgataaggactttcagctttcattgctgggggtctgggttcgatccctggttcaggaactaagatcccacaagctgtgtcacatggccaaaaataagggtattttcttatcttagtagtactaatcaaaaggtaaggtgttaatctacttctttttcttccctatgcacaactctaagatccatgaagttagagctcttagttttatccctagtgcttagattatctggcacctagaacgtgatcaaaagatatttgttgaataaatgttaaagtatacggttctgtacttaattggtaacacagaaacagttgcattctgctcaaagtgtgaagaatgggttaggggagggatgggatacacaggaagaagaatactagagacagaggtcaagcaagtgttggcagtccaaactagtgaaacagcaatgagaacagagagaagatggaggtaaaactaatatgacttgattactggatagatcaatgaacctgtaggcagtactgacatacacttgtgaaaaccgaggtacccaacaataacatcagctcaaactagcgtcagtccacttctactcctagagtggctacaaatgagataccatttcacttaacatataatttgggtcacttacagacgtgcaaaataaggcttaacattcagtaacctgtccaagcttacttgattaaggactgagataggctctggagagctagaagagtgaatcttcttaatcctggccactatttagaagtccctcttgagggaggagtggacgatgcaccaggaagacagacaaagagagagaaaaaaggggacttaaagaagggagcagagaaggggaaaatgggaaggaagagagaggagtaaaggaagaagagatggaaagaagtgacctaaggaaaggagaaagggagagatggaaaaaacaagaaagaaaaatgaaaagaaagtaatttcagtctcactctaatatgccagcagagccactgaggtttcacaactccaagtaataatggcaacagttttaggcaggttctaaccagatgctcaactctgccataaaaatcttcagttaaaggatgtacacatagcctgttgtacacataacctttggacaatgcaatttacaggcatactgtcaatattaaacacttggaaaaagtacatttagacaaaagaatgctattttcaaaactttaattagatcaaaaccctagcattcattttcagcaacatggatggacctagagattatcatttgaactgaagtaaatcagacagagaaagaaaaaaatcataagatatcatttacatgtggaacctgaaatatgacacaaacaaacttatttacaaaatggaaacaggctcacagacaaaacaaactaatggttaccaaagcggaaaggatggggatggagggataaaggggtcagtagataccaattactattatgtaaaacagataaataacaaggtcttactgtatactacagaaaactttacatttagtataataaactacaatggaaaagaacccgaaaaagagcatatatacacacacataaatatgtatacacacatactcagttcagttcactcgctcagttgtgtgtgactctgcaaccccagggactgcagctagtttctatagtatgtgtgtatgcttggcaagaggtggcaagaatatgcacatactatagaaaattaaatcaactgtatgccagaaactaacagaacactgtaaatcaactacacttcaattaaaacaacaaaaaaacccttagcattaaacctttcgataatcttctatattttttaggggaaaaaaaaacaaatttcttgtatttgtattgtacaaggcactgaataatcagacttaactatttctccaacctcacttcacgtaacttgtctcacctttgatatgcactagctccctctgctttgggaacacattaaattctttcctgctttgaaatctttgtacatgcacttctctcagttcgtaacacagttcttcctaattctctgtttcttgtctgaaatcttaaagattgcctcctcggaaacagtttcccaacctattctatctaagtgggtcctctcatgttactcactattatagcattcattttcttcacagtacttagaaagcaagcgtaggtctctcttcactaaaatgagttctttgagagaaggtatcttatcctctagtccacagctatgaacctaaacacacttggcatacataaggcactgaaatatattgggagaaagggagggagaaggccaaacttcgatgttagtagatgatcaacgattactattaaattaacaaaaaaacttgcttgcactgtgggataattcaccacaaagcaataaaaaaattaaagaacccatagcaatattggtgattttcattttataaaagttgattaaagcagtaattaagcaataaatccacttatcttttggtaataaaaccataatgacaaaaatataccacaatttaatataagtttaaaaacagaactgtcagtcactcagtggtgtctgactctttgcaaccccatggactacagcacaccaggctcctctgttcatgggacttcccaggcaagaatactagagtgggttgccattcccttcgccagggacagaatataaaattgtgctaaattttataaaataaataagcttaaaaagactagaaggaaatacattaataaaattttaacagattatgtctgaatggtttgatatagtttcttttttacatctttctgtatttttcaaattctctacaacaagcatattattactcttataatcaaaacaaaattgaacaaaaagaacaattatggccattcattgctggccttaaagttagccatagcaatgaatgaaatatattgaccaattctgcaaattactaaataataataattcacttttaaaatattcaaatgatagtcattaaagcctatttattgtcatattgcattttttttgctcagtctttaccgctatcacttcgccactttttccttttaatcttggggagtactttagtatggtcaagaaaaaaaaaaaaaaacctttgcacctcaaaaaaacaaacaaaaacccttctttgcacctcagcttctaaaccctggctgtatcattatctagttgtatattaataagatagtacttcactaagtttaatttttctcatctagtaaatgagactaatactaccaattagaactatttatgaagttccatgcttagtaactggcatttagggtctaaataaagaatagccattaggaaatcaactctgaatattcatcagaaggactgatgctgaagctgaagctccaatatttagccacctactgtgaagagctgactcactggaaaagaccctgatggtcaaaagatcgagggcagcagaagcaggtggcagagaatgagatggctggatagcatcatcgactcaatggacatgagtttcagcagactctgagagagagtgaaggacagggatggcaagctgcaattcatggggttgcaacgagttggacacgacttaccaactgatcaactacaatccatcagaacattacttactagatacataataagcactctgagagaccaggatcatctagttccaatgtaccttcagtctagcatgagccagcatgtagaagtttttaacacacacctatcgaatcaattactattttcactacctgtttttcaggcagagctgcgtcagaattgtagggaattattattccatctttccagtaattttaatggaaaactagattaagttttaaaagctagaggaaatcaaaaattaaatcatatacctccacattatcctatggtagtagaaaataaatgagtaaacaagatagaaaattttagacatgataaataatgttattagtcatttcttagaatatttctttctatggaatttcagtccatggaattctccaggccagaatactgtagtgggtagctgttcccttctccaggggatcttcctaacccaggtctcccgaactgcaagcagattctttaccagctgagccacaagggaagcccacttctttccacagttttacattatatcagcacctactgacttcttgttatagtagatgaagaattttactaccttgatgctatcttcccactaaattttatcccaatttttggttaaactgattttagcttttgcattattatgaagaggggaatactgctcattgtagagccaaaaactgtactatgatgaggtctgctttttaaaaaatattttttttcctactgtgttcctatcctcttacatcagatattatttactgattaataccttttagattccaattgttcaaacatctatctagtctacttttatcttttatctacttttagtcaacctcactttttggtgaggagaggtctattttcctatgttctcctgctccaatatgaactggttgttcatacatttgttgtgcaggtatcatgttgggatggcccttcattgctttcctgtgttagattctcttttcctcagttctcagaatgttttcaactacttttactcccttttgttagtatatatgacgtactaactttcaaacaagagtgcataaaagatgatcattttttaaatcttgtgtggcagacactgttaactgcatgatccaatagccatttccaaatcccttactctgtatactatacaaaggctggaaaagctaaatgcttggctttcccagactctcctgaagccacgtttcacagttctagtcaatgaaatgtcagtacggagctttctgggcacatttggctctgcttccttttttcctatttggaaggaaggcatgatgttagaggtgtgtcagtcaacttgccatcatgaggttcagttcagttcagtcactcagttgtgtccgactctttgcgactccatgaatcgcagcacgccaggcccccctgtccatcaccaactccaggagttcactcaaactcacgtccatcgagtcagtgatgccatccagccatctcatcctctgtcgtccccttctcctcctgctcccaatccctcccaccatcagagtcttttccagtgagtcagctcttcacatgaggtggccaaagtactggagtttcagctttagcattagtcctttcccaggactgatctcttttagaatggactggttggatctccttgtagtcaaggtattctcaaaagtcttctccaacactacagttcaaaagcatcaattctctggtgctcagctttctttatagtccaactctcacatccacacatgaccactggaaaaaccttagccttgactagacggacctttgttggcaaagtaatgtctctgcttttcaatatgctacctaggttggtcgtaactttccttccaaggaggaattgcatggctgcaatcaccatctgcagtgattttggagcccaaacaaataaaagtctgacactgtttccacatctatttcccatgaagtgatgggaccagatgccatgatcttccttttctgaatgttgagctttaagccaacttttccactctcctctttcatcaagaggctttttagttcctcttcactttctgccataagggtggtgtcatctgcatagctgaggttattgagatttcttccggcaatcttgattccagcttgtgcttcttccagcccagcgtttctcatgatgtactctgcatagaagttaaataagcagggtgacaatatacagccttgacatactccttttcctatttggaacaagcctgtttttccatgtccagttctaactgttgcttcctgacctacatataggtttctcaagaggcaggtcaggtggtccggtattcccatctctttcagaattttccacagtttattgtgatccacacagtcaaaggctttggcatagtcaataaaccagttaaaaacagaaaaatatatgaaaaagaacctgagagcatttatgacatttcttaagtcactacatcagtcccagattatctacatctggatttctcatcctgtgagacaaaagattcctgatttgtttaagccattctcttggttttctattacgtgtaaacacacacataccccactgataaacctggtatatctgaaaataccatttcttccctcatttccttggtgtttggctagaaatagaattccaggttgatgataattttccctcagaatttttaagaccttgtttccccctttagcttccaacgttgctgaaaatttctagcattctaagacctgtttctttgaatgtgacctcattttacactggtagcttttcagatattctttttatgactgatatgtaaaattccacatgagcaatgatgtgtcatctgactgagaagggtttatttttttaattcaaagtactgacatccaaaaggggccatttataatctgtagaccaatacttttcagtttagggaaattttctgttagtccttcattttataatctagtctcgcacattctccttgctctccacagttagagaaactcattagtttaacaccagacctcttacactgattttctaaggtccttatttctccaatttctaccatctctgtctctttgtctatttctcgggagatgtcttactactcttctactttttaacaaaatttatttccaaaaggtctgtcttagtctctgatctttcactgtatcctattattgttttatggatgcaatatccttttctcttagaaaactgatcttgatcattaactgacagttcatttacagtgaagaaataaaatttaactgaaaatagcatgtatacaacggggaacaccgtaggggaactgggccatgaaagaaaccactgtcctgggggctagccagaaagatcagacatctcagtggaggccggtaccccaaacaacagtatctggaaatcttttctatgacaccacatatttcctctagagaaggtgatactaaacttttgttggagacacatgcctagaatcctaagagcagggaaagggttagaagttccactattcagtacatggacttaattctcctattttacatcctgttctctctgccttcacagagcctatatttctccaggatatgaaattctagcctctgcccaacaggaagtatgggagaaagatcctgagggtcaaactgcctcgcatgtacttttttattatggtgttatatttttttaaaaaaattcttcctaaatataagcaactattatatatatataataaatagtaaaaggaaaagcaaaaacagatagataaaaggaaaagcaagctaatctaatttcttaccctaatgctctaattaggcactttaaagcactgagtcttaaacaaatatcattattctgtgtatactaaatgcaggcaaagtgactactaagcagggtaactatgtaagttatccaaaataagaaagttttgagaatgaatgggacactattaataattatgtataaactgggattatttcaggcaaactaatcaccttattatcagtagaataactttctggatgctgagagtataaagttataaggcattaccaatgaacaatgtgaagtcttccctcaagaacaaagacatactcgactatatgtgtctaacatataagtcaccttagtgaaaatggaaggtggaaagaactagcaaatacaggatcatacagttttcaaaaggtattaattcttataatcacccttaacaagcacacatataaataatccctttacaaatttgcatattgtctttctgttaaagggaatcatcataataataattcatatagcatttttaaacaggttgaactaaataatttagctggtagagactttttttcctcttattcagaattactttgattaagcaaatgggaaaagcattaagaatggttagaaagaaaagctaatgggttatagtcttctatctgaagtaactaagacatgagagaagaatcactaattgcctttacccattccagagtctttcttggtaccatctgatattatgtctacatgatcagaatccacatcataactaaagaaatcattcaaataggtcttcgatcgctggccaccaaatacatataagcaacgatttttctgtaaaataaaaaaaaaaaagggaaagaaggaaaaaaagtcattttcacaaagaattcagaataattcttttaaaatttaaacgtctagagaagtaatttatgagcgattccatgcaatgaagtacttactgtactggtataaagtggaaaaggaagctctgcatatactgctaacggataatcactaggatatcctactgaagtaaaaaaaaaaaaaacccagtaatgcatatagggtgccacctctgtgtatggaaggagaagaaggaatgtgtgctgtgtgtttctctcttcaaaaaaaaaacaaaggaaactagcaataacataattagctacagggaaaggaacagaacagaaagacagggaaaataactgtatctctccaacagcataatgacagttttgccttgagaactatgtaaatgtttttccttaattagaaaataaaagtaaaagaaaaaataatgtctgaaatttggaaaaaaaaaaaaaagaaagaaacaagtaagcctatatacaaaacctatatacaaagatacaattggacagagacacatgatcatgcagacaagtagtagtatttctagtgattttaattctcgctttttgactacccatccctagtgggctatatcctaaacagaaaaataatcagaaagaaatcttaaatggcattcagtgattctattagttttgctatccagtaagctgttttagaaagagcaagtaacatatcatcatcaggaagtaggattttaaccataaagtttcacagaaacaaagatataaaattttaaattctataatcttaaatttaacttggatatcagtataaactcatgatttttttttctcttactaaaaaagacatatgtatacatgtgtgtgtatatatgcaaaggtatactgggacatgggtactcccacaggtcaaagacggagaaaaattagggaatcaaaaagaataatgacagcaagttaaatacatcaaatacataaaaatccataagtttataataatacttatgaaaaactcattggtaaattttggagcctcagctcattaaaatgaaaagacaatagaggaaaagaatcaaaatatttatattacctatcctgtgtggtttacatattagagtagccaattagttaatgaggataagtttttatagaagaatcagttaataaataaagaaaaaggtaattagaaaaatgaccactcatcaaaccctactaaaatctagtctatgactatagactatagtgactgctaaaaccattagataaaaagttgacaggaaacttaataactgatcaatcaggttgataacacctaaacccacctgaacaattttaacaccaccaaagttgtgacagctagacattaaatgctctttatattttataatcggatcagctgtgaagtatacttgcaagtccccttttggcccacccaaaaaaggagaggaatctaaaattaaccctccaaatctaaataccagctcacaggaaatatggaaaacagaggatcatgttaaatgacactataataaaaatcagtcaaactgagaacatgggaaactccaaagcacacatgaggctttcttaaacaaataagcagtatacagaggggggcaaaaaaaggaagggggagtattctcatggattaaaagaaatttaagagctattaacaaccaaatgcaatacacagaacttttctggatcctgactttataaaccaactatgaaaagtatttttcagcatggcaggggaaaaatgagtgcagtattaaatgatataaagaaactgcttttactttggttgggtttcataaccatacttggagaaggcaatggcaccccattccagtactcttgcctggaaaatcccatggacggaggagcctggtgggctgcagtccatggggtcgctaagagtcggacatgactgagcaacttcaccttcacttttcactttcatgcattggagaaggaaatggcaacccactccagtgttcttgcctggagaatcccagggacgggggagcctggtgggctaccgtctatggggttgcagagtcggacatgactgaagtgacttagcagcagcagcataaccatactacaattatgttttaaaaaaatctttatgttagtgacacactatggtatttatagttgtaatgatataatgtctggaatttgctttaaaatacccaacacaataaaatttaagaatagacacagaataatagtaattgttgaaactggtaaataagtacataggaatttattatactgttctgtccactttggtatatgttaaacatgtttcacagtatatttttaaagttttgttcatagcaggagcccatgttctcattataacacttgaaaaaattaaatgtctgtatgctggtttttgctgataaattctaattccaattctataaagtcaattcttaattctctgcacttaatggagagtaacaaaagagaaaataagaacagataataaaatcaacattccagatactaagagaaaacagtaagtaaaaagctatgtaagaaagagaaatagctacaacatataacagtgaagtcagtcataaaaatgctgagataactacttaggaattattaggctgataggaaatataattagcaaacagttcaccaataaaggtagttttgtttttccttattattgtcaacacttattcatttctaatgaaaagttttgctctcttactgaagaattagattgcatcacttcttttcctattgagagatacatgacaaaataacataagacaatgtacagaatattcttactgagtggaagagcatgcagtgtcctatccgagattggatgtcctcaggaccagcattacaggagtcctctcgaagaagtttccaggtttgacattgacagttgaaagcaaacagtccactgaattgtggttcactggctctgctgtcgtctacactgccattacatgtcaaaatcctaccaccaaaggtgtagatcatgtgtttttccgagtccatacacatctacagaacaaggcaacaggttgaatagctttagactgttcctgtcgcatgagttaaaatctaaccactgtatgcaattttagaatctaaaaaaactgaatattatcttaataataccaaataccatccctgattattatatgcacttattaatttatattaaaatcctgctctgctcactacatggaagagattcaggatcgatttcaaaataggttgaaatcgatccaggtttccttttttttttccccagtgagaataaaatatgttgggttaaggagttttacgctttctcaagttgcataatttttaccaaatcaaccaaaaataatttagttactgatttaatactgaacatattctgtgggtaaaccgtgatcatatcctccttataaaaactcccttttctccattctagtacgtgcatgctaagttgcttcagtagtgtccaactctttgagaccttatggactgtagctcgccaggctcctttgtccatgggattctccaggcaagaatactcgattggattgccatgccctcctccaggggatcttcccgacccagggattgaactcacatctcttatgtctcctgcattggcagggcgggttttttagcactagtgccacctgagaagccctttccattctaagcaagcattctattcctcttgctaccatttaataaaagaaaagatatgtgaataagagtgacgtagcttatatcattttgcatttattttacaaaattctcccagttatgtttttaccaaaacaaacatacgaaaagacatttgcagcaatccatctttgggctgacttctatgaatcttgcctccttttaacacaatatgtaaatttaattttctttgaggtacgtcaagcaattcatcttcaaaagccaaccctgactcttccattctttcaactcaagattgtttttacaaaaatatctctgggaaaacagccactggtcagaggacaataaataagaaacaaattctatttcaaagaatacataagtacaagttgataatcagagactgaatacaagtggcatttatgcttaagtaataaactgtatacataaaacatatattttttgttgttgctaaagcacaaatactaggcattatatgttcagttctctcctcctatcaaactacttctgctgtttatctatttctggtattgtttttaaccaaaaaactaaataattataaagcttattttaaaattagtatttcatcttaaaaagaaaggattctagtctagcaccttcaaatctttacctaccactaaagattcactcacttgccatttcccaggtttctggcagacttctataaattaagatgaaaatctgtaattcccagggatgaaatcttggggagcacagttcaaaaactatgatgtcaaagttttcatgtccctggcactcagaagaaaagtgatcctatgctttaatcttaaatgattatatcatgaaaagcaatccattatatccaagcaatccaactatatcatgaaaagcaatccatacattgctgaaggacacatataacgtgagcgtattttcattttcttaaattcagagtcacactcattttgttcagtctctgttatctagcccttatggttctacttcaatatgactacaaaggacatttctctttcctttgggggatatttaactttctttttgatatggctattctcatttgttatcagagaagcataaacatctttatttggtagctctttcttgcacagcaggccaaactcaaagacagaggaaaatactgcagtagcttgatgattctttctcatatcttagaacaaacaggacacaaaatagaaataattttattcctttaacttgggtgttccctgtaagatacctagtttcaatgacggtcaattatcagataacaagttttaatcactccaggaaactttgctgttcatcagtttatggtttcctttcaatttttttatctctgaaaaatgttttgaaaatccaatggcttattcaactatgcaatccacagtatctcttccctcaagaaatcttgagtctactctgtcaggataggtatttaatttctaaaatcaaataaataatggatagccacttattcctcacacctatccccaattgctttttaaattgaaagtatcttattttactttatcacatgaacacaaggttggctagggttagggtaggttcaaaattaatttcctcctcacaaaatctgaagaaattattataaagctttctaagtagtgttgtccaacccattaccctacctcccagcaacatccaaaaatcctcatgttaaactgattcttgtgtacgttgtgcatttatgctcagtcatgtctgactttgtgaccccatggactgtagcccgccactctcctctgtccatggaattttccaggcaagaatactggagcacattgccacttgctcctacagggggtcttcctgacccatggaacaaatccacatctcttgtgtctcctgcatgggcaggtggcttctttaccactagcgccacctaggagtctgatacttattactctcaaaggtaaccagttttctctctggttataggattttctctttcttgattctgaaatatcattaaggaagtatctaggcagggatatttttcatttattctgatctttacttgttgggagccagcgtgaggaatcccacccgtgacaaggtcatgagggaggaagctgacatacgcaaggccagtgatcagacttcaggagttccccctggcatttcctgagcatccacccccaccccccaaaaaaaataatctgcctgcttttccactcttctgacattctctggaaaaagtcaattcagggctttagtcttctgcatttgaaagagtgtttcaatccaaaatctcctctgatggctttctagcctgcctgcaggactcgtgcagctgtgcatgtgattgtttgaggcctcctggccgcaggaggcacaggaagcttaaaacatcctaggaatgtaagggcttccgaggagtcaaagtcattagaatacgactgattaaaagtttcatttgttgagccaatacttgctgccaaattttcatatcctttaatatagttggtatatagaaaaataagtagtagacctggtattagcaacattagatctttgagttaagtaccttctttgttataacgaactacgcctttgttctacagagatgtaactttagcgctttaaggagatgcagattaaagaaaaacacttaggggaaacaaaattaacattcattaagaaagagagccaaaaagtgttaacaagcctcttggccaaaagataacataaatcacctgagaccttttgtatacaaaaagatatacagaaagagtctgggctgttaacactacataattttgtattacccactgatctctatgtataatcgaaagtataaaaggccttgaaggacaatagaaggggagccagtcgctggactggtttcccccgtgtctctttactttaatttcaggctgaatttctatctggggcgcggaggctcgccaagtctacttacttgccctggctgttaagacctgcgcgaaagggagcctaaggcgaggcacccttagatattcaagcgagcgccggtggcccaacgtagatggtgcaaattccttgtctggaattttattggtcttccacgtaatccaagctattcagccctctttctccacttaatcttcctactacactatttcttcctaatctaatcttatattaataaataaataagtctttcctcgctgactccgtccacccttcgaattccctggatccaccggggctggaccccggcatttactaggaatttctttcattctgaaaagtatctttcttcagttctgataattttcttcatttttaccttgagtgggtttttgtttgttttttggcttccattctctttctagaactatcaggtgcatattcgaaattcaggtccttttgtttaatttttctctcataatttcagagagaaatgtaataatttagtaaccatttagaggtgaggatgtccacattgctttttaatctatttactgagtttttaaaatttcactatcaaatctttaattgataatttttctatatatttccttttcatggacacaatggcctcctgaattgctctaatcacttaaagatgtcttcagttcacactacaagctgtttttaagtcttaatttgttgagttcagtatctcttgtctcgtagtattaaattatcttcaaatatttggatttgggcattactgttttagccttctttgtatctgagaacccctattcatctgcctgttgcatatacagtctacctaagggactgcgtagggcaagacgagacataatgctgtgaagggtgctgcagcagctctccagtgctttatctgtccagctccaatatccacactgaacacttgacctgttaataatgaccacagtccagtgctactcagtcaaactggaaaccgtccagctgtttcatgcccagttgatcatgtactgtttgccccaaaatacatactgtgagactccagttgctgctgtcttataggttgtggtttattttggttggatctaatcctacctgctttctaactcacaggaattccctcaaatattttaagttacctaagggcaatctttcttgtttttctacacaattactgacgtattctcttgtcatttcacaggatgctgggcaggaagacggtaaaagtgcatgttcaatgatccacactggcccagggagaatgtcagtaagccaagatctgcaatcttgtgactgaagttcttcctgtcatttcttgattaggtcattttacatcttccagtactttatgtcaaatccttggctcatactgtcttttctttgaaaaccctcagatactgtctcttagcactgaatgtaactgcagagaaatctgatactagttttgtttcacctctggatcattttgtctagttcccccaaaatggcttctttatctttgaaattcatgtcactaatatattatcacagttgaattttttagagttgaatgcctagggcaattttctctggctataacacatccttttacactatgtgcaataggtttccttcttgaggaaattcttgaactttatgtataactatttcttctgttccactgttttggttttcttctttaatgtgtccaataatgtgtatgttggctctcttctgcatgtcttttctgtctatactttcctaggtagctgttatatccatacttgctttctttatctgctttttgtatttcttatgacccttacccagtcttctttatgttccttgtaaactagtgaagtttacaatatttttcttcaatttcttccctgagatttaccaggcccagtttcacctgctttgattatttggccatctcatctgcattcttgtagttttcttcacagtttcaagcttcattaagtcatttaatttatgttagaatattggaatataattttcatctgctgttagcatgaaagaaagcttctgctattgtttctactttcactgttttcctttagagtacttcactaaagatctgtttactactgattacactgtctactacttattagtttttcatatttaaataacatttaaatatggttccccatatttaactgagctgaatttccctgcaccagataatataaggatgctatggaggtatgatattctttctcaagttcttcctcctctatttctaatgaattgcatggcttcttcaaaatatggagcttctgtgaagccatgttttctccaactgaatctcatctggcttagggggctctatcttgagccttgagctcccccagttccttcaatggacatgcagaacaagccactgtccctacctgtcatggtgtttccaaacctcttatgggccttgctgggcattttccacatggtgaaaagtcaaagtgaaagtcgctcagtcgtatccaactctttgtgaccccatggactatagaggccatggcattctccaggccagaatactggagtgggtagcctttcccttctccaggggatctaccgaacccagggatcgaacccaggtctctgacattgcaggtggattctctaccagatgagccacaagggaagcccaacagtactggagtgggtagcctatcccttctccagcggatcttcccgacccaggtctcctgcattgcagatggaatcttcaccagactgagctattggggaagcccccatgttacttaactgatttcctcagtagcttcaatgagttcaatttctgctctgctcatgacacttccattaagatgtacctctgctaggcttcctctgcattcacagttctccccattaaacagttgtgagcttcaatacagcttctgggtattccagttgtttctgctaaatttacaaggaattgggagttgtgggttttctttggcttctggttttgccgaatatgtgacttgtcttgtttttttgcttttttaaaaatctttttgtttggttctcatggttcctgaagaatcacacaaagcaacaacatggaaagcttcagcactaagttgccactatgtccttaggaaatctaaaagtctttgaattttaatttttttaatatgctaaaattgaaaatggcaaagtaatttttaaacatatcttcaggcctctagttttctcacgatcctctcaaattgaatgttaagtgtcaaatcttatagtgttacaaacttagagtcggttccaaatcataactttgaatttgcatgaaacagaacagaaaatgtatgctagtacattatgttaattgtccaagttcacagaagtagccactggctgagtcagcactgcaatccgggcctcttcacccccagtgtcctgttaataacatctaatgagttaaaaatgaagcattatttaacagaacctaggcttcgggggacattctatttaaccaaagtcaagagaaacataggcccacatgagcacaacatatgcgatatcctcagactacccctaagttattctttttctcaacctgtaaaaacataagcatcttttggaaaagatatttggaacaaattggaagaaaataaattgtttccctaataacgttatctgttgatgttctatttttaaaagctcagagcaagtctaagttttttagagttcttattttctatgtgaacgacactgagtatgtcagcagaaagtgcaaagctttacagagctgggttatgcacaaccagcacaagttacaaattcaacctggggagcactctcaagactaatgtttttattttccacacaccacatactcggtaggcatataagccactcctctcaccattctcctataaaatctacttgttaatataaatatggcaggaggaaagttttaaagaactaacaaaaattggtaaagaagcagtaaataaagactttggttttaatgcctagatattaggcacagattatgtcataaattctagcaccacgccccaatttctcaagtgctgatataatgctttgttcattaatagtattatagattttttaaaagtccttttcttccccataccccaaaaactttggaccatgggctgagccaagcaaaaccgcctactgaattcaaagtggttactatttagtttgaagtagtactgacctaaactgaactgatacaaaataagaatttaaaataaaaaaaagaattcaaagacagataacaatgataacagggatgatgagagctatacacatactgatatttaaatgatttatgagactgctatatgcagtcttgtttacaacatcattatatgacttctcctggtcctgaatttaaacttcatctagtacatgccaaattcttatctatcttatactgagtttgtgattatacacaaaagtgaatatattgtacttacattggaagaaacactctacatttcaaatccttgaactcattataaagtaattaaaaatttttcaggaatgtagaataaaaaatttaaaattattgttatgatttatgaataccatagaactacatggtagtagttcctcacatgtactgctccctctactctctgtaaagttttcataaattaacgactgtgttctgagatcttattactttattttgtaccaaataagagaaaaaaaattttaaggaataactttaaactactgaaacaatagtttcttttattatttgtcataggtatttgtggtagaaatcactaacagaaaactcagcataacatctgaaattcgaagagcaagagtgactaagcactaattaattccaccatatagttatctaagcaccaaacctgatgatcaaacactagtttcggtcctccatcagcagcagtatcctcactgagtaacatccatgtgtttgtgtcaatgtcataacgatagaaatcacttttcagagatttgctgttcctcacagaggaatccaaataacgccccaaagtgtagatttgccttcgttgaatgtcaatgcacattttatgacatgatctagcactaggaccattctgtggagagcaaacaaaaaaaagaaagaaaattcaaagaataaataatacaaaacaaaattaaatgcctctttttgctgactttcacaacaggtctgctcagaaatttgatcaagtccaactaatatatatccaatattagacttaagtctctatagaaaaataaaagaagcaataggagacacaaatcttagcttagaaatgcttaaactctaccaggaaagatgagaacaactattttctattctattgcactctgtttataacacttctatggcttctaatgtacactgcattacattttagtcatttgtgtacagagcttaattcttttgtacatgtcaatcgactcaaagacacgtttggtttttcaaaatatttttgtacacttcatcagaatctagcattaaacagatactccaagaatatttagaatttcaaattggtaggaaccttaataaaacttgtagtttgatgttctcctttaaaaaataaagacgcagaagctcaaagaagaaagatagcctcctgaaagcagtaagctaatgaaagaagcagaatgagaatccaagtctttgactacttcttccacactttatattacataaaattgactctcctgacaagataaataattcagctacattaaacaattagggaacaaaatgaagaacagtatattatcaacagaagttaattagttgagatcacttgtatcacaggacagaacaaaaggttaaaaaaaattgtagtataggcttaaaaaaaaagaattcatgaaaaaaaaaaaaaggaacttcagctgggtaggactggattagttgaaagagggaaaaggaaaaatatcttgtatttgttaaatatctcctaaattctacctatattaatactgtgtatgtaagataagagaaacaaaagcaaaaatacactacagtatgtgcagttatgaatgagatgaagaattcctgcccagaaacagcagagttgaagtataaggtagaaatacaaagcctgtgaatgactgacagagaactgagtataatcttgcaagcattaaagagctattatagatttctagagaaggacacaacataaaaaagcagtattataggatgagtaatccagtattatttagattagatgaaggaataaaaatatcagacaggaaaaacagtttgacattcgtgtgagtattcatgctaattactattttaagattattgttaaatatttgtgtcaaggaaaatctgcagcagaaaggcagaaattttatttaagaaagaatttccgctctggctgccatgttgtgtccccacacgtgtgcacctaatttcagctggtctgtgggagaccccatgagcaccaaacctaatcccccagggaagccccacttctgctccagcagtatggaagaaatgctcgtgaaccagaataaactctccaaatggcaggcacaagtgcacatcagtggggaaaaaaccgctagcagaaagaagaaggtggttctcagaacagttacaacagacaataaagaaatttcagttctccttaaagaagttagaggtaaacagtatctctggtattgaagaggtgaagatgttcacaaaccaagggtcagtgattcacttgaataaccctagaggttaggcctctctggtagcaaagactttcgccgttacaggccatgctgagacaaagcagctgagagaaatgctacccagcatcttaaacctgcttggcacagagagtccaaccagttaaaggagaggggctgaggctctgcccgaacaatctgtggatggaaaagcaccacttgccacgggagaagaggatgatgatcaagttctagatgttgtgcagaattttgatgaagcttccaagaatgaagtgaagtaagtaaccgagtcaacttctgaagaagataaatctcgaagaagtgattgggagttgctatcttatattgtgactgctctttaaaattttatggatctaataaaatctagatctagtatttttaatcccaagccccaagacaatgcagctcttcccattttttgcttctatacaattcattctttgcagctaattaagctgaagaagcctgggcgtaaagtctgaaacgaaagttaataaagtcctttacctggttaaaaaaaaaaagaaacaatttcctctgtaattaagcaatttcaaaaacaaatatgaggcaacatatcatgaatctatgccatatttactacagtgtgaaatctgaagttttaataggagaatagaacttcttgcttcagtttaattagcaaaagtgctatttaaatgatgacaaattacttctaactaagaagaaaaaagggaataaagaagagaaaccaagaaactggggaacagaaggaaaaatagagaaaactaataaagttattttttctttcaaaaaaataacagaatgattaacagaattataaaccagtagtaaggctaatttttttttaaaagagagagaaaatacaaattaccagtaccagaaatgaaagcagtaccatcaatacaggctcactagaaactacaaaaaacccaagaactatcatgaaaaatacagtaaaatttgactaagaagataaaacggacatattcgtaatgctaattttttacttaatggtgaaatacagaatgctttcctaagatctgaaataaggatgtccatctggtgcagtaaaacattaaaaaaaattgtatttaagagtggaaacaaagaagttaaaatcatctctactcacagaggacaggactgtttaaaacatcctaagaaatcaacatagaacaaaagacaaactattagaaataattaagtggattcacaaaagtgatgatacaaaaaatattaaaacatcaatttacttcagtatattatcaggaaacaagttgaaaattaaaaatgtttaaatttcatttacaacagcaaggaaaagcaaaatatactggggtccatttaataaaaaaagacctctaatctgcaaactccaagtgctgagggataatgagtaagactcaaataaatggaaatttagccctgctcatggataagaaggttcagtattaagacatcaattatctccaggttgatttatagactgaacacacatccaatcaaaatttcaacagtgttagaaactgacgatgattctaaaatttgtgtgaaaatataaaggacttagaagagtcaaaataatttttaaaaagaacaaaaaggtcttatattacttgatctaaagtcacattggaatataaatagattaaaagataatggggcagattcgaatatcctaaaagacaaatatacttatatactccattgattcttgagaaagaagccaaacagggaaagaagataggaagtgaccagaactcacatacatttctggaaggaatgtaaaacagtacaaccactttggagaaagctttaacagttccatcagtggatgccaaaagggcaaaagtttgatgctgctgctgctaagtcgcttcagtcgtgtccaactctgtgcgaccccatagacggcagcccaccaggttcctctagccacgggattctctaggcaagaatattggagtgggatgccatttccttctctggaaagtttgatgagtaacacaatattttcatagtctcaaaatgtctcccctcaaattacttaatcatggagtaggaaatctgttgagcacatcagacaaactgaggtaatgtgcctgtctcctgacaggacatatttaggaggacctgatgttcacacgtggcttcccagctagaaatgcttaacctatatccaatcctagggaaacattaagcagacccaacagaaggatagtctacaaaactgccatatactcttcaaaaatgccatggtcaagaaagacagacaagtcaaggaactaaaggaaactaaagaaatatgacaccgaaatgcactgcattatcatgaactgggtcctgggtcagggacagagttgaggtaacagtaagacacctataacggacattaaggaactggagtgggcagccttttccttctccgggggatcttcccaacccagggatcaaacccaggtttcttgcattgcaggtggattttttaccagctgagccacaagggaagacaagaatacaggagtgggtagcctatcccttctccaggggattgtcccgtcccaggaatcgaatcggcgtctcctgcattgcaggaggattcttcaccaactgagctatcagggaagcccataaaggacactgcactattgggataactacctatatgtgaaaaaggaatgggggttaaaacagcacttcagggatcttcagggactctataaagtcaaagccatttttataacaattgttactgctgttcagtcactaaagtcatgtctgactatttgtgaccccacgaactgcagcatgccaggcttccctgtccttcactatctcctggagtttgctcaagctcatgtccattgagtcagtgatgctatctaaccatctcatcctctgttgccctcttctcctcttgccctcaatctttcccagcatcagggtcttttccaatgagtcagctcttcatatcaggtggccaaaacattggagcttcagcttcagcatcagtaccttccaatgaatattcagggttgacttcctttaggaatgactggtttgatctccatgcagtccaagggactctcaagagtcttctccaacaccacaatttgaaagcatcaattcttcagcgctccatcttctgtatggttcaactctcacatccatatgtgactaccggaaaaatcatagctttgactatacagacgtttatcggcaaagtgatgtgtctgctttttaatacactgtctaggtctgtcatagcttttcttctaaggggcaaacaagtatcttttaatttcgtggttgcagtcaccgtccacagtgattttagacgccagtaaaataaaatctgtcactgttcataacaatactattttcactcttattcacttataagtgtatgtgatatcttccagaagctacatgacgtgtgatatagcagcagactgaatttagaaacaaatataaacctacctgccttctattcagtcacaatttacgagacttagaaaactataaaacagtgctacttgacatacgatggctgtcttaaggaaaggcatctatgcagttgttttagttgcatgctgatctagctgctttttccacaaaacacggtatttactcaaaagaaaactaacaatccaggtacagttattcagagattttctgaaaaatagatgaagtattttactttgaaggaaaacaactgataaaatctgttgccagtaataaaacgtacattttaaagccaatttagaattttagaaagcttctccctgccactgtgattgtgacaccttcccaacacataaaagactttgctaatgagactgacagtgatattaacaaatgtggtttggtataataaaatatgtcaacatctgaagacctgcctaactcacagaaccaatatttttcaagtgaccatcaaacaagtaaaaaaacaagcacaggaaaaagatacattcaaagagcaacacagatcagtggattttactgtaacagaatacaaaacattagctgatgaggtctcagagtctatagtgcaattacctttaagaagcaaacaacaatttgtcaatttggggtataagattaaaaaagaatatgtgctattatataaaaaggctacaattaaaatactactaataataatattaatattctttccaagaatatataaatgtgaggtccaattttcttcatatattttacataaaacaatatgttgtaaaagatgacatgcacaagaacatatgagaatctagctgtcttccactaagatagacattaaagatatttataaaaatgcaaaattaaaaatataatttttttgaaccaataaaaacttacatgcatatatacatgaacatttaaaataattattctaaaagctgagccattctactatctttcgacctactacgtgttattagatacattacttaatctaaatgaattaaattacttttgtgtgtgtgtgtgtgtgtgtgtgtgtgtgtattcaatatttttatagattctattccatttaaagtcattacaaattaacggttctatttccctatgctgcacaatatatccttgttgcttaattattttacacacattgagtaatgtatgtaaaaaaacacattctgctttttaattgtatataatactttttaaaaaatatgcaccgaggtatcattaaataataaaacttgtacttactgtactaattttgtagaaaacaaaattggatacatgaacctcttcaattttggaaggaatgaggattttgcgagagccacatatcctcattcacttcactaatgaaacaaaggtttttaggtgtttaaataaagtaagtaataaaaaactataataaatcttaattccaatactggataatcaacttatctctactgatttgaaaataacagaaaagttttctcatcagaataatctactattaattgcattctaaatattacttagaatattacattaatattacttttgaggacccctataattcctctctcctgacaaagcagccactttcctggattttctatttatcatttctttgcttttctccagcattaactttttaatctaacttgattgaactatttactcactacagagtaagcatccatgccttaaggaatttagagtttccactggaaatagaaatataaaccaatcactgtagtaacccactcaaggaatgtaaagggttaagtggtcacaccaaaggaagcttccaattctggctggggaagtcaagaaaagcttcacagaggaactgaagtgtgaactgtgttttaaagggtaagtaggcatatacagttccagaaaaacatctatttctgctttactgacaatgccaaagcctttgactgtgtgaatcacaataaactgtggaaaattctgaaagagatgggaataccagaccacctgacctgcctcttgagaaacctgtatgcaggtcaggaagcaacagttagaactggacatggaataacggactggttccaaataggaaaaggagtacgtcaaggctgtatattgtcaccctgcttatttaacttctatgcagagtacatcatgagaaacgctgggctggaagagaagcacaagctggaataagattgctgggagaaatatcaataatctcagatatgcagatgacaccacccttatggcagaaagtgaagaggaactaaaaagcctcctgatgaaagtgaaagaggagagtgaaaaagttggcttaaagctcaacattcagaaaacgaagatcatggcatctggttccatcacttaatgggaaatagacggagaaacggtggaaattgtcacactttattttggggggctccaaaatcactgcagatggtgactgcagccatgaaattaaaagacacttattccttggaagaaaagttatgaccaacctagacagtatattcaaaagcagagacattactttgccaacaaaggtccatctagtcaaggctatggtttttccagtagtcatgtatagatgtgaaagttggactgtgaagaaagctgagtgctgaagaattgatgcttttgaactgtagtattagagaagactcttgagagtcccttggactgcaaggagatccaaccagtccattctgaaggagatccaccctcggatttctttggagggaatgatgttgaagctgaaactccagctacccacatgagaagagttgactcattggaaaagactctgatgctgggagggattgagggcaggaggagaaggggatgacagaggatgagatggctggatagcatcatggactcgatggctgtgagtctgagtgaactctgggagttggtgatagacagggaggcctggcgtgctgcgattcatggggtcgcaaagagtcggacacgactgagggattgaactgaactgaactgaaagtcttgtgggtacttgtaatatatggactatattgtgatatgtgggatgcagtaggtaactgaaacagtttgactgagattaattatagggtttaagcagagatgctatgtggcccaaagaaaaaaattttttaaagactatgttaatgcatgaagactaggtttggaatcaacaatggaggcaaaaaaaagtttaagaaagaaaccacaacgctgaaaggaataaaaaggaaaaaaatgtctgaaactcaatactgggtgctagaactggtggaacttaggccctaattcaacacaattcactaacgagaaagcatttcaggatgaattgtaaacttcttgcaaaaacaattcagacacaatccacctagatttaaaatagtttaagagaaataagaaaggtattcttttaaaatctgcctttgtatttttcaggagagaaataatcatttcagaaaatggtacttaatactgaaaaggattaagatctctttagaaacattaaaaaatactcaaatggttaacaaaggaacataccaagtaagcaaggatccagtttcctaagatgaaagacagcaccagagtttttaaaaaatggccttcctagattaaaattggtggctttgaattgagtcttttcctcttcttttcatttgctgttacaattgcttttagtttatttttcaccttgtaatctaaaactgcttggatggaaaagtacaataaaaaattctacaaagatatttaaaaaaaacatgaatatgtgccttatagcagtgtataattaattatacacttatttaattcaaaatcataaattcaagacattctattcactatggaagttttacgtgtatatgcatcaatagacagactcacacatgaatgaacaattttagttaaaaataaaatatatatcatttgtggaaactgataatacagtcaaatagtgaggggccaaagtagtaagatagtgaggaatcaaagcgtgtatttccagaggaaacaaaaataaatgtacaaaataagagtagaggtgacagaacatgagaaaaaagatagcttatacagttacaatttaacccaaatggttaaaatctaagttacattagatactcatttctatttatctctataacatagatttgttcatgtaactgtagttcaagaacctggtatagaagctggaatgcaagaatgcttaagccaaacttgtcaccacaaattcttctgctaccactgctgacacacattataaaagaacacaaatcactcagaaagagaagtgtatgcccacacccctctcgtaataaagatgggtgagaactcaagtctgaaaacttgcctctttctcagtgtctctagagatacaagtccactggttctctttcacactgtacgcccagaagtcagcaagatcttgcgttccatcccagccaccaaacaaataaacagtctctgtgaaaattagaaaaatatgtttaaaaaaataaacttaagacagaatttaagcaaaggcacccatatttagccattgcttctaaggtcatttaagaaggtacctctaagtaaccttacaaatgaaatttttaaactagtaacattccaaaataaatactagtatttcctaaacataagcatatggaaaggctactgtagaaccagtattttgatagatttataaatatgaaggtaactaagaggcatcccctaaaattctgattccaaaggtcctttgtgagtaaaaagaggcagtactttgacagtacccaaggggaatcccgatgagcagccagtttaggatcttctgtgttaggccatgaaaagtttacatttaccagcctctcaacaatccagcttcagtcttaaaaaaaaaaaaaattccagaggaatataccgtgcagaaaaaaacttcacagtaaaactgttttctactacaatatcaaaaataatagttaaaactagctgagttgaaattagatatcttaagaacaaagtaatgcatagccttgatattcccacggaaactgggggaaattactgcaaatatattgtggtagatttaactcctcagaaatcaacttttaagtcactccaggtatcctgaaaatttgatttcttctaactctgaaatgtctattatatctatgaactttatcatgcgacaaaacatttcttgctcagagactagtgaaaatttttatatacaacactgtgaatcatccactttctttaaaaaataatagtgcctttcttttcttcaaatatttatctccgttgtaaatatcttatgtctaccggttatacataccattggaaaagaccctgatgctgggagggattgggggcaggaggagaaggggacaacagaggatgagatggctggatggcatcaccaactcgatggacatgagtgagtaaactccaggagttggtgatggacagggaggcctggcgtgctgtgattcatggggccacaaagagttggacacgactgaacgaatgaactgaaccgaaccactttttaaaattaaataatatattacaggaaaactataaagccatctactctctaactgacatgacccaagcctatatatatggagactgtcatctacattacatcctaccatgaagggttaaaatgcagagtgcatatggaaatactgtaacactacttaagaaaattcctgccattcatagagatatcttataagagatttttgtcatgttttcaagtaatttcaaactctaagtgaatcttctaaataaaacaacctagaggaaatcaaaacaaagctgttggataagaacaaaccactggaaccgttctaacgctaacttagtaatcatgtgtaggtcacttcacttgcctgggtcccagtttcttcatttatagagctcttagtgtggtgataaagattttcagatataagttacatgaaaacattctgaagactgttgtcaagcatgaacagcatttctacctttaaaacatgcacacacacacacaaaatactttctagttactaagcaccacaaatgcaataaaaataggattactgtgtctgtttccaggtctgacttaagtacctagaacacttttgcttctgtacaaatgtgaaatagtggaaactattaaactgccatctctcagaaatacaaaacaatccattatcattagttaagtaacattctatttcccaaatgaaacacagtaatgcccggatactgagaactttacaggaaaaaatttaagaattttcatctgacataaaaattatttgccaaaccccattagattctaaagcctggagagggagagggtatataactaaaatagcaacagcaattgaccttttgttttaatagtgtttctgggcaacctctggataaggttaccctggttcattaactttaataacctttcctcttgggctctgggttctcaatgttctttctgaaaagcaagtttctttgtacacataaattctcacagcagagaaaacccacatttccacaacagcctcattgatagctgagcaaaataaaatctggcacagagcaagcatcccaatggaattaatccaagatgtcattcttgtctgtgaatgctttgtggtcccagttaaaagtttaatactaaaattgaatgaatcaagatagaaacaggaccttttgacatacctgaatgaaatgagtaacacaattttaattaaatcatctaatcatttaagttaaatcattaagagataaaatatctagaaatgaacaccagcaaaaatattatttaatgcataaagaatataaaaaacttaaagattatagaaataatcagaactgtagtgagaagtaagaaagcagaaaagaggaaatgctattatatgcaacatggcagtagcttggtttaaactctcatggttataggttatataacaattcacgtgcagctccaaaccaggaaaacagcccaatttaaaaaatgggtagaagacctaagcagaacttaatctcaaatgaagacatacaaatggccaacaaacccatgaaaagatgctcaacattgttcattcttaagagaaatgcaaatccaaactacaacgaggtatcactttataccagtcagaatggccattaccaaaactatctacatatagtaagtgatggagagaatgtggagagaagggaatcctcttgaactaatggtgggaacataaattgatacagctactatggagaacagtattctccattccttaagaaactatgaataaaactactatatgacccagcaatcccactactggatatacatacaccctgagaaaaccgtaactcaaaagacacatgtaccccaatgttcactgcagcactatttacaactgtcaggacatggaagcaacctagatgtccatcgacagatgaatggataaggacggtggcccagaggttaaagcatctgcctgcaactcgggagacctaggttcgatccctgggtcgggaagatcccctggagaaggaaatggcaacccactccagtattcttgcctggagaatcccatggatggtggagcctggtgggctacagtccacggggtcgcaaatagtcggacatgactgagcgatttcactttcactttctatatacaatggaatattactcagccatagaaaggaaagaaactgggtcatctgcagtgatgtggatgaatctagagactgtcataagtcagaaagagaaaaacaaatatcgtatattaatgcacatatatggaatctagaaaaatggaactgatgaacctatctgcagggcaggatagagatgcagatgtagagaatggacttggggacatagtaagagaaggaaaaggtgggaccaactcaaagagtagcactaaaatctatatgctaccaagcataaaacagctagcaggaagctgttacatacagctcagggagctcagctcagggctctgccatgacttaaagggataagatgagggatgataaggaggctcaagagggagggaatgttgttgttattcagttgctaggttgtgtccaactctttgcgaccccatggactgcagtacaccaggcttccctgtccttcactatctccgggagtttgctcaaactcatctcagggaagggatatacgtatacatacagctgattcacaatgctgtacaacagaaggtaatacattgtaaagcaattaccctccaattaaaataatttttttttaataattcatatacatgcgtagggtagtaaatcctcctcaagaagcagccctttctctattgtcttttcttaaaaggagcataggctacagagactatttctcccagacgcatgggaatgttcagtcaatattttctcagtactaagtctcttgatgaaagtgaaagaggagagcaaaaaccttggcctaaagctcaacattcagaaaatgaagatcatggcatccggtcccatcacttcatgggaaatagatagggaaacagtggaaacagtgtcagactttatctttttgggctcccaaattactgcagatggtgactgcagccatgaaattaaaagacgcttactccttggaagaaaagttatgaccaacctagatagcatattgaaaagcagagacattactttgccaacaaaggtccatctagtcaaggctatggtttttcctgtggtcatgtatggatgtgagagttggactgtgaagaaggctgagcgccgaagaattgatgcttttgaactgtggtgttggagaagactcttgagagtcccttggactgcaaggagatccaaccagtccattctgaaggagatcagcccggggatttctttggaaggaatgatgctaaagctgaaactccagtactttggccacctcatgtgaagagctgactcattggaaaagactctgatgctgggagggattgggggcaggaggagaaggggatgaccgaggatgagatggctggatggcatcatggactcgatggacgtgagtctgagtgaactccgggagatggtgatggacagggaggcctggcatgctgcgattcatggggtcgcaaaaagtcggacacgactgagcgactgaactgactgactgactgaatccgaactggcaagccgctttagaaaaaacaaacaaacaaagacaacattgtccctaccctcaaggagcttacaatctagtgaagaatataaaatgttgaagctcccatactttggcgacccattaggaaaagccaactcagtggaaaagaccctgacgttgggaaagattaaaagcaaaaggaaaagggggtggtagaggatgagatggttagactgcatcaccaactcaaagaacatgaatttgagcaaactccaggaaataatgaaggatagaggaggctggcgtgctgtagtccatggggtcacaaagagtcatatggaacttagcaactaaacaacaccaacataaaacaagtacataaatcaccacagtgcaagtttcataagaaaggtaaaagatcaccatgggagttcacaaaaggaaagagaatacaacaaactgaagggacccaggaagatttcatggtgacgagcagtatctgacctacacatcagaaggtggctctgttgacagaatgaaagaaagagaagacgactttttcaagcaggggacaaagtaaaataaaggtacagggacagaaaacacacagtgttttaaaagacacagaatctaaagccaggcagaccttgaatgatatcgcagctctaccaccatggctgtggaaccaacaccacattccttaaccactggtttcctcagctctaaaattctgtgagacagaatacctatctcataaaactgccatgagaattcaataatgcacgtaccatggtgaaagctgtgtgatgaataaacacactgttcattttaaaagaacaaaaaagatagaggaatatagttaagttataaagacaggcagcagccagatcatgaaatgggataaacggcaagataaatgttttgaacttgactccacagacagtatgaacttcccatgtaggtcagaggtaaataatcctctggtcaatgcaggagaggtgggtttgcgggttcaattcctgggtcaagaaaactccctggagaaagaaatggcaacccactccagtactgctgcctgagaaagcccatggacagaggagcctggtggactacagtccatggggtcacaaaagagtaggacacgactgagcaactaaacaacaactacacacagtatagatccacagaagactttatgcaaagatgtgacatggtcagatctgaacctgcagcatatggacttactaaaaaagatgagccaggaaacagaaagattgggaataatgtgatcaataatagccaatgttaaagatatcaagtcaatttcattctcagagactgaatggatcaatcaccaatcagtcattacttcagccacagaagttaaaatgcagccatattctttggcacaggtctttttcgttatcagttctagataaaccctacaactacttactaccaaaagtactaatctatacatctcagatacactaaaaataaggtagaaatgttatcacatcagtgtcttcacacaattttgcacaaagaagcaagctttttattttataagcccaactgcagtatctatcctcctctgattcttaggggtaaatcagactatgctgattgcataatcctccacaagatggcatactactattcataattaaaaaatccatttttccactttgaaatagtacagaatgcatatactatggactgacataccatgggtccaatctcagataaaattctaatgtgctgctgtatttaaaatggataaccaacaaggacctaatgtacacaggaactttgctcaatgttatgtgacaggctggatgggaggggagtttgggggagaatggatacatgtatatgtatggctgaattccttcactgttcacctgaaactatcataatactgtttgttaactggctataccctaaaacaaaattaaaaaaattttttctttaattcaagtctcaaaaagagggaagaggagggttagtagccttgtaaaagaggttagcttaatttctagtgtaatacacaatttctagtgtaatacaatagaaaaacaaatgaaatttttaaaaaagcttttaagaaacacaaatttatatccaaggttaaatgaactctgtcaggacatttagtttatgagtctaatccctctgaaaatgtagctaagatcttagattgacatgagaatttttgaagggaggaataaattagaagggaaaaagatattttatgtgctctttaaccttactttctttagccattctcttgaactctcaagacccagcagattatcaactggattcatctgtctctctttaaaaagggctatatttcttacataaagctatgattacaaaactacagactgatcttttgggttatttcaacatattgctatttccatgctaaaaggttgtattttctgcctatgacaatatactttatactagggctatattttagaattcctttctgataaccatatgagagaaacagatttgtgtcacatgaagttacagaaatataccatcacatgtagttacagaaatacaaccatatgaatgtatttgtatttaaaaactaaagcccatgtttacctactttcttcaatggtttctttaaagaatatcaaggaaaaccattatgtagaattaaaaaaagaaaaggaagaactttatatataaagtatatagaacagtcaggttcagatttccatagaagggctcttttcagcaacttctttaactctttaaaagatatcaaatactggggttttgcctaaatcttatcatctattctgcttaagtcagaaaaaggctggcaatataggttcttaaaattcaatgagagttaaacaaagaattgcctggtgcaatgaagttttcatctggacagacttccactctgaagcaaatcagacatgtcttttctctctattcgccttattttactcagacttgaaacacaactcagagttgaagaatgtaagtggaaaactgccaggtgtaggaattatgatcaataaaattgacatgctcttccaagtaggacaaaatacaacattccttctctagtaataacaacagaattcacttagaagaaaactttgaaaattagagtaaaatctgtgcctccatgtactttttaaaatggccctgtattcttagagctgtagcaaaattgaaaaaaaaaaaaaaagacctacagactgaaaaaggaaaagaaaatttaaggactattacatttttaatatttaagaaaacaagatacatgaaacactgggaatcaataattgctctgaaatacaagtcacttcaaagaagctgaaatgagctctatgaagttttagtctagttaaatacctggcacactgccagcactcaataaatattagcaattattaggaaacctgttgttcctcactctttatatctgcaatagcttttaacaagaatgtaaaggaattaactatgtttttaaatttcactttatggtattttataagtgaagttatatgctttattactatttacatatttaaaatttgctaaggtctcaggagttagctctcacaatctactgtgttttctcttttctgctattacaccggagattttcattgtatcttcagcataagaatctaagaatcaccaaggtaacagcagcatgaacacaggctttggagccagacagtcctatagacctaggttcaaatcccagctccacagccttggacacaacatcacctattctgtataataaggattatctacctttccagtagtaaataaaataaatgaacatattaaagttttaatccaaacctctacatattgtaggtattcaataaatattactcctcaggtttgaaaaaaacattttagtctagtgaaaatgttcttaactctttgatgatctgaattcatggattctctttcagaaaaatgaatatgcaaaccaaatattacatataattccaacagattaagagccctgctcaggaaacctttgaaatgcatatttaaaataaggactggacttctctatacttcactacataggcaccaactttataaagatagaacttctggtttcttcaaattctacttgaggaaagtcacaacctaactaattcttacgagaaagttcttaaaatgattttcagtatttttttctaaaaatataaaagtatacttatggtttcccttactttctaaaacatcagtaagggcaatatatacaaaagatgaaacaaatatactgaaataatactggttaaaatgtggaattatgggtaaaaatttttttcccttcaatactgcttgctttaaattgcttttcaaaaatttttaaactgcttaaaaatatttccacggtgagattatatcaaaaaacaaaagacctctaaatttacatcaaattctctcagaagaacttataagtatgtatttgtatgttaatgttgcatataaatagtatatatttatatatgttataaattatttcatttaactcccacaaatcaattattcctatttttatcatcattataactccttcaagatcaaataaaaagtcagtgggaaaaaaaaatcaggattgaaatccagatatgtttaacaaatacacatacacacttccctcccacaaactcaacctccaaccactatatctgattgttatatcaataagactggactagaaaaggttctttctaagacttaacaataaatgcatcttagaagatgattaaaatcaacctaatggtagcagttataagaatacataatgaagtaaagtatatgaaaccactttggtaaattatgcttttaattttataatagaagaatttgtagagaaaaaaaatctcaaagatatcccagattctcttacactcaaattaaatccagaaagcaccaaatgttatcctaaaaaaaaacacaaagtctataaaacattttatttttctacctacatcccaaggtagtaactacagctgtaagataatatagtctatatacagaacaatcatcagaaaatttaaatatattagaataaaatcaataatataaatttacctcaaaaaatatcagcatattaaacaaatggcatcatgacatgatctactcaccaaggtttaaagcaatgtaagaatgtagtttataaataaatatctttctttccactcaaaggaaaatagattttaaaattctgattcaattcaactaatatttagttcatactccataccaggctctggggccacagaaataatgcaagactcctctctccccgctcctcggccacaataagacttctagggatgggagatagaaaggggagagcaatgggacacataacacctacacaagcaaaaacctgtggtggattcatgtcaatctatgccaaaaccaatacagaattgtaaagtaaaaaattaaaaataaataaataaataaatttaaaaaaaataaataaataaaccaatatggaaatcactatagtgaaagtaatagggtgaacaaagttctatgcaaacacaaaaaaaggagatgattattcagcctggacctgtcttctgaaacccaaagtaatatagctaactacttattagaagtatctactaggatttgtaactggaatctcaaacttaacctgtctgaaatcaacctgctgaacaacggaccatacttaatcctctttttctacccatcttagagaatggctatactattttcccaattaatcagatcaaaaccttgagctatcctttactcctttcactcactcatacccagactgtcagtaaatcctgtcagctgtatgtgacattttcaaaatacacccaaagtttaattaattctcatcactatgatcaccaacctagtaaattccaatgctatcattacttctctggtaagaactgcttcctaaaaggtctctctacttctgcccatcacctaatttgttttgttaaaatgcaaagtcaattattaacagtaacatttctcaaagcccaacaatatttcccattaatctctcactatgaataaaggttaaagttcttacagaaaaacaacacaatcgcccatcactacctctctgactttattccctatactctcttcttcacccaccaccttataccaagcagcaaataatctggaaagaaaaacaagagtagaggaaaggttggcaagagtttactttgtaaacactattatttcaacaggaataccacttacacagagtgagaaatttcatttgaaattttatatgaataccaccaatatttacttactgtgcaatgtcaaaacttatgaggtattttaatcctttaaaaaataaataggtaatgaatcttcccagaaagctccacaaaagcagacaaaaatattacataccatttcaagagtatcatgggcctccttagagcccacttatgaagcctcatctaagaaaacaaagaaataccaaaagaatagagcatggcaatagaaaggactatagacagcaagagttagctgaaacaaaagattgagaatgccagggtatagaagttactagacttttgaatggtatttttaaagttccttttgttttctcttgataaagcagattcctggattacctacctcataaataaacacctgtttaaaccacaattctagaatctcatgaaaatacaaagcgttttctgacttgattgagtcctagggcatcttgccttactttatctctgcttccagacacctgaatcctcagaagctgcattcctgctctacctcaatctggattccaatcttaactgtatcactagtttatatgtgtgtgcatgtgtgcgtgcgtgcgtgcgtgcctatcagtcgctcagtggtgtgtgtgtgtgtgtgtgctagtagtcaatgttagcatttgtaagtgtgtgtgtgtgtatatatatatgtatgtatgtgtgtgtgtgtgtatatatatatgtatgtatgtgtgtgtgtgtgtatatatatatgtgtgtgtatgtgtgtatctcaaaaggaagaattccttaccaataagttttacacaccaaccctattactcacacaaaggatcactggaatgtggttaaactccttgaatttcaccattcacgtagttagtactatttccacactataagcagcaatggtaacactgaccatcaagctcacttgagttatggacaactttatgttaattgagattatcatgattatttagtttaccagactttaagtttctggctcctgttgtaaaggctcaaaatttcattttattgtcacatgcatgtgggcatgctcagtaatgtccaactcttcacaaacccgtggactgtagcccaccaggttcttctgtccatggaattctccaggtgagaatactgtgaaggaggctgccatgtcctcctccaagggatcttcctgacccagggatcaaacctgcatctctcttgtgtctcctgcattggcaggcagattctttaccactgagccatctgggaagcagcacgggcccaaagaaagcttgatcccgcattaaaaagtctagcgggggggaaatcaccaaaacagatacaaaatggctctaaattaaaatccctctatttggcacagtggatagagaagcctggtggactgcaaatccatgaggaagcaagagttggacacgactgagcgaacacacacacccacatacagacatattgatagataaatctctaaatttcctgtggtagaaatatttgctcaaaaatatattcacaaagtacttttattacacttctataaacaagtcctcaaacagaagtatagatactggtcaatttttcattgtagatctttgttaatctataataaatcctcagaagctatgagagattaatcctttaaagattccatctggtatatatcccatgcctataagttattcttacttatatacaatgacttactttaagtcattgttttcttatagtttctaaagcaaatgaagtaaatactgaaacaactcttttccattccctgaagtacttttttaaaggaagtgtagggataaggatcttgactaacaagagtctgctgaaatcctccccttaattcacaaaaccaagatattaccaaaaaaaaaaaaaaaaaaaagtcaatctttatcactacatgctggaagtattttacttcaaggatctctgacccgaaaagtcagattttaattgtaaatgtctctgcttataccaagttctgttaggacatctgcctatcatttgaatcttctcattttccattctcaaatatcataggttacaaaaaaagaaaatctttctcttttgttacaaatgtactttaacctattttatataggccacattccataataagcaacgcagaaagcactatgaaaattccttctgctccttgataaggaaaactttaaatgtaaaagtaaaccacattattttcatatttaagaaaaatagcattttatctaggagataaaagtagctttccaaacactcttttttagtattttcttagcaatttttaaaggatgacctaataatattttcatcgtgactgagaaaaaaaaggaatggcattaaaattccactgtatgttcaaaagaggagaaaagctactatagacgatctaaacacaaaattttacctcttttttcatataaacttaacttttttggattaaaaaaaatcaacttatatatagatctggttctctgagaaataagcatatgcattatttattgagctctcaggtagaaaaaaaagatgcttaagactacagctgagtcaaacctatttctgtgggaaggaagggggttgggaagagaagctaagactaagaaagcaaattcctatgcctcaaaatgaaccttttccaaagagaccctaataatactaaacaaactcacaggttactctacaaatttagcagtggattttaaataaaatattataatttctcctttaacttataaaacatgtgtgataatgttaatgcctagatcattattatctgcactgcaataatttttttaaattatgaatcaaaaggactattcctggagaactactgtcagcataacacaatactaataaaacagagtttctattacaagtaaaatgttatttgggctaatattggcattttatgtggtaaagtttttttaaaaaccaaataaaataaaattatacagaattcttgtattatttgcttctcaagatggtaatttgaagccaattataattttagcattaacctctaaatataacagtatttaagctgttctaggctatatgtagaaacctagggaaaatttgtattatcaattacagaaaattaaaaaggcaagaaagattaactaaaacaaattatttatacacccatggacagtgtttagcaattaatggatctaccaacattaggctacctaattttgtatcctctgcttctgaaaatataccttaatttctcttttactacaattcccataatatggcattaaaatataaatgcactaaaaatcaagaaatattccagctaactgtggaatcaagcacatataaaactacacacacacacacacacacacacaaaggtctgcacaatacattttttctaggttttctaatttcatctgtgcagcagcctccccaggctgatgtgccattgcctggttttagttatatctgaagctaatgcctattttctttgctccttggttatggccaataacatgtaacctctgcaaggaatggaaagaagtatatagacgcctgagtatctgatatttaatcatgtatcatttttttaaaaatctgctttccattccaagtagtccttacctgtctggacatcaataaccatctgatgacctcccctcattcctggccggttatcttctccatcacctgaagtagaaacaatatattttttaaaagaagtaacaactgcatatccagagtaacttcattcataagtctgtaatgagtagtgaatttaacacacttatttcttcaatattaagaataagaggactcatagaagaaataatattacttataattaaatttataataattatcttgctctttttttctattgctttcagggtcttaatgcactggaagctactttcaaccaatgccattaagcagcaaagacataggctattccacaaaaacataaaatctctaaactagtggaatgacaaagtgaaggtgtgaaacaattacagaattagactgcaggtcttataactctaggcatggtttattaataaaatgagcagttttatttttattataaaaaaaatttattcttatttggctgcactgggtcttagttgcagcatgtggggttctagttccctgaccagggatcaggaccccgacattgggaacacatagtcctaggcactggaccaccagggaagtccctaatgagcagttttaaagttcattaaactagctactgataactatgatgttatcaagtttcacattaatgataatttcctcactgtattaatttcattttccaatatttcagaaatcagtttccacataatccaccactttgagtagtactgtgtgacaaaatgtaagacttgctttcttttgactcttacttacacatcacagagcttaataggcaggtttaaatataatcagtgaagggacttccctgctggtccagtggttaagaattcgcctttcaatgcaggggacgtgggtttgaacccagttgggaaaaggtcccacatgctgcagggcaagtaagacggggcactaactacagagaaaccaagcactgcaacgaaagatccctcattccacagcaaagacctgcgtgacacaactaggacctgatgcagccaaataaataaatacaatgagggaaaattttaaacttcagtaggagaaaactattattaactttaatcttacttatatcagatcctacataaaagaaaataaaatttcatttccatggttcaacagctacaagattctaatgctttacttgatgtaaacttgaaaacctgaatttttctttgcaactctcccattaattaatgtattacattagctaataactttccctgaatcagccttcttctacgtaaaatagggactatccaagtttttactgatttcacgggggtacaatgaaaaagaccgaaatgtcagttcttatatattatacataagatgcaaaactgaagctatattcaagcactaatcaatcagaagtttcctacaaattctttctcctttttaatagacaggtttagattctgcagctcattactgtagaagttttgcccttttattccttcttctctccaatcagtaaagtcagtattaccactttcaggaacagattaagaaaacactgaaataaatttgttgtcagtatgcttgcattttatatatttaatccaatagctttcagatatacagctataatctgtttgctacatgtttgaagaaacatgctttcttcatctttgaagaaaattaccttgtatgtgactgataaaacaggaaaatgatgccaatgtaactcagaacttacggaggttcataagcaattttctccagtatactgatgtttaacactatctggggaagctttttcacaaataaaatgaaggctttgacaatgtatgaagaaagaccagaggaagaaagctgaacgtccacagaactgccttcctttaccacaagtagttgcattttaagaactgctacactttccattatgttaaccatctgacaaagcagtgagtggcgatggaggagtgacaaaaactcctcccatatgaaaagacagattaatgaagaacatcacacccaaggtcagattttaagttttgataaaaatagtcttcattagcatcaaatgtcctctagtgtctatagctcaaagaagaagtgtgtgacccgagctttaaagctccaaaatcactgtgatgcttaatataaacgcctatacttaactgttgctgttcagtcacgtcagactctttacatactagcattattcttattagaattactatactagtttttattagtatctggctattaagttccacagatatagaatggcatgtcccatttctacctctctcctaagtcctacaagctttagtgagcaattttgcggaatttaagattttctagggacacatgtttggcattataataccataacctataattttacagagactctatataaaagcagtttatgctgctattctctataaataatgcccaaccttctgttatagccataaaacaaaaatttagaagaaaactttaatgtaataaaatatctctgccttcttgctgaggaacctttgtctttttttaagcacctgattttcagtagtagggcacagtgaaacttgagtacaaatgaactggaacattaaagcaaaagcacccacaacctagaaggtcagacttacctttggtgcttttgggaatgatctgactccatcgtggcttatattcctgctgactgatatactggttaaacaagccatctgcgaatattaaaggagaaagaattacatcttaatagcttacactttttattacagcaaaaaagaccaaaatgtggaagcctacgttaaagaaatcactaatatgacactaaaacaacagcacattttcataaaatatgtcactttagtttttatgctacctcaaatacaaagagcaaaatataagttgacataaccatgtacacaaattttttcagtggcagctcatactaaacttactaagttctccccatttttgtactattatcccaaaaaactagaaaaggaaatgggagctccaacaactttggactaggcccttgtatctttgggaaaaaacaaaactagtcctttaaagtgaaaataccatttttacagtttaagtataaaattgtatagagataaaagtaccagtaactgtaataatatatttattgaatactaaacattagaatctgtgctatcttatctaattctaaaatcaactttatgaattacacattatcatcttcattttatatatgtggaaatgtgtactcagagagtcatcaatgaatttaacccaaataacagagctcttaagtagtcgggcggggactcatgtttcactatgctttactttcttcatttaataaattctaaatctcattcttaacaggagtttctacagtataataactagttatactaggtactatgatggtctatactaggtactatgatggagactgaactccccacatacatccattctactactaattattatcaagtcctaatcctgtgcccttcaacaaagattagtttaagaatggtatgaaaccaatctctggctattgaatcatgacgatcttctggcgggtggggtgggttgctttcagttcagttcagttcagtcgctcagtcgtgtccgactcttcacgaccccatgaatcgcagcacgccaggcctctctgtccatcaccaacacccagagttcactcagactcacgtccatcgagtcagtgatgccatccagacatctcatcctctgtcgtccccttctcctcctgcccccaatccctcccagcatcagagtcttctccaatgagtcaactcttcgcatgaggtgccaaagtactagagtttcagctttagcgtcattccttccaaagaaatcccagggctgatctccttcagaatggactggttggatctccttgcagtccaagggactctcaagagtcttctccaacaccacagtgcaatagcatcaattcttcggtgctcagccttcttcacagtccaactctcacatccatacatgaccacaagaaaaaccatagccttgactagacagaccttagtcggcaaagtaatgtctctgcttttgaatatactatctaggttggtcataacttttcttctaaggagtaatcatcttttaatttcatggctgcaatcaccatctgcagtgattttggagcccccaaaataaagtctgacactgtttccactgtttccccatctatttcccattaagtgatgggaccagatgccatgatcttcgttttctgaatgttgaggtttaagccaactttttcactctccactttcactttcatcaaaaggctttatagttcctcttcactttctgccataagggtggtgtcatctgcatatctgaggttattgatatttctcccagcaatcttgattccaccttgtgtttcttccagtccagcgtttctcatgatgtactctgcatagaagttaaataagcagggtgacaatatacagccttgaggtactccttttcctatttggaaccagtctgttgttccatgtccagttctaactgttgcttcctgacctgcatacagattgctcaagaggcaggtcaggtggtctggtattcccatctctcgaagaattttccacagtttattgtgatccacacagtcaaagggtttggcatagtcaataaagcagaaatacatggttttctggaactctcttgctttttccatgatccagcggatgttggcaatttgatctctagttcctctgccttttctaaaactaacttgaatatcaggaagttcacagttcacgtattgctgaagcctggcttggagaattttgagcattactttacttgtgtgtgagatgcgtgcaattgtgcggtagtttgagcattctttggcattgcctttctttgggattggaatgaaaactgaccttttccagtcctgtggccactgctgagttttccaaatttgctggcatattgagtgcagcactttcacagcatcatctttcaggatttgaaagagttcaactggaattccatcacctccactagctttgttcatagtgatgctttctaaggcccacttgacttcacattccaggatgtctggctctaggtgagtgatcacacctagagtgactatctgggtcatgaagatcttttttgtacagttcttctgtgtatttttgccacctcttcttaatatcttctgcttctgttaggtttgctttagggaaatattttcttacttttaaatgaatatacagagaaggaagaaaaaatctacttttgttcccctggaaatgtttatatcaacatgcaaatgtacataactgctacattcgaaaatgaaattcactttgtaatgatgacaggacagagagagagaaagaaactggatcactgaatccactaaccatgagatctaccttacctctggacttctgcttatatgataaaacaacattcccttacttttcaaactagggttttcttttacacgagctaaaacagattataatttacagagttacttttactgtaaattctgtcatttgactctgatttcaatctgaataaaggatttccttttgcttcatttagccactgaaagcaaatacttttgcaaagaacttataagtaaaactgtctgttctccctgacttgtatacttgccaaagaccgtgtaatttacagaacttccctaatgtcttttttttctgggcaattatgaagctcaattgctaccacacccttcagctttcaattcctttcacatagctttgagaagaaaagcttatctcataaactcaactcgtttctttttctttgcttgtggactttaaaaaattattgcaaaaagtaagctctctccttcttaaattagcactcataaattagcatttatattttgaatgttaaagtaagggtaacaaatagacttacagcatgttttattgagtgtttctatcaatattatctactcccataggttttcatgacagttcttgccccattcagtctattctggccaatagtattttcccattacaagagtgagaaatcttttttaatccagacaaaatgttgtggcgctcctactaacaataatgatgacaataaatgtaataattacaattttaggaataaaacagtacattttagttcattttgtgaaaggcacataaaagttaaatgatccttcttacaaaccgtaaataggacaagataaaattatttaagataaataatgattttaaaatattctacataatggctaactgaaggggagagagaggaaaaagtaaaagatggaactatacagagataaacagaaaacttagggagataagaaaatggcagaaaaatacaaagcaacagtagagacaattagaaagtaatacattttgtatttttttgcgtgttagtcactcagtcatgtccaactctttgtgaccccatgggctgtagtccaccaggctcctctgtccatggaattctcccggcatgaatactggaatgggttgccattcccgtacccaggggatcttccccaccaagggattgaacctgggtctcctgcattgcaggcagattctttaccatctgagccaccagggaggcccaagccaacacaggagacataagagatgcaggttctatccctgggtcaagaagacccctgaaggagagcatagcaacccactctagtcttcttgcctggagaatcccatggacagaggagactggcaggctacagtccacagggctgcgaagtgtcacacaagactgaagcgacatagcatgcaattgtcctattacctaagtctcctacagtaattaattataggacttttgataagtcaattaagttcctcatctataaaactggtgtttaagagctggacagagcctgaggttccttgcaaattctgccattctaggattccatcactgttagaaccaatatatttatttacttcaactgtgtgtgtctggctgattccaccttatgttcaccttagaaaagtcttcatctcctctttctccttaaagtcttctgtgactattctgaaaaagaaatcacaatccactgggggaaattcttctaagagctcctaaggtagtgatagtaggaacagttataatcagatgaaggacttcctaatctttaaagtcattctgaacactggaggtaaaattctgtttcttcaaccaatccttctatcctcactcttaactaacctgaaaagcttacaaatactttatccatcaagagcttcacaatttctcttctatcaaacacaactgtcttatgaaaatattgtcaggaatttttcaaagtaaaaaaagcaattctcaaaacattatgtaatttttgtaaaaccaatttgtacataccacacacagacagaaaaacacacagtaacatacatcaaaaacttaaaagtgactttctttggttggcaggagtaggataattttgatttttgcctttgtatttatttgtcccctctccttttttttttttgcactgagtgctattactatcagaagaaaacccacaaaacaactagatacaggtattttttcccataacttagggagaattttgcaacatactgttattatcaatataaaccattttcacatatactttgttacccctgaaatatctcttcttcaagcctcactagacatattcagtttctacaagcagtgctttgtacattgacattagcttgttttaacaaggacaaagagacctaagcatgcataaaggatttatactcaggcatgcagaggaacttacttccaaaatttaaatattaagtactccaaacttaaaattagaaattatgatgattttactctagatagatacagttaaccttcttttgaataatgacagttaagagtataacatcagagatgttcagtatataataaatgcttagaatggaaaaaagagcaagaggtggagggactttcctagccacatggttgacatttcctttgagtcatcttactgttactaagttccttacatttcaacaaactgttcataaaactcctactttcagtgaagtcaatttctagtacataatggctccctgacaagtcacaccatcttgcaaagcagtcaagcaaatatttaaaaaacattgtttggggaacttactaatttgcctccctctatcacagataaatcccttttctcttcactaaaggtcacacagttctctttggtatctcttattcattcttcagttcagttcagtcgctcagctgtgtccgactctttgtgaccccatgaatcgcagcacgccaagcctccctgtccatcaccaactcccggagttcactcagactcacgttcatcgagtcagtgatgccatccagacatctcatcctctgtcgtccccttctcctcctgcccccaatccctcccagcatcagagtcttttccaatgagtcaactcttcgcatgaagtggccaaagtactggagtttcagctttagcatcattccttccaaagaaatcccagggctgatctccttcagaatggactggttggatctccttgcagtccaagggactctcaagagtcttctccaacaccacagttcaaaagcatcaattcttcggcgctcagccttcttcacagtccaactctcacatccatacatgaccacaggaaaaaccatagccttgactgactatcagaaaacttgaagaaagttacttcaatatagaattatcaaacttggaagcaaatctttaaaaagatcttaacaaggaagagttgacttttattgcatacttactgtgtgcaagacaccagaaaggttaacccatttactccttaaaataaatctatgcaatggctattactaattattgcaaagtttagaaaatcaaggttcagagaaattagtaagcccaaagactctaaagaaaaaggtaaaaagcccaattccaaagtctaaagtattttcaactccttatagagagcatgtaaataaaaataaacacacacatataactaacacaaataatagtttttaaattatactctcagattaaacactgtagtaaaagacacaacaatgtacctattcaataacacttgaaaaaaagcaacagtctgggaaacaaaactcacacacattattaaatattctaataaaagtgggatagaacagttgaaatatgtcacattaattacaatttaaaggaaaaaatgtaatctcactgttaaataaaagacctattggacactgaagctcaagtttaacttcttatgtttcattttctctctgcaacactggtttgccactactccagatcactttcttatctgaagtattcatgtcagttggaagttgttccagaaaacaaatggctagtttgataagctaactgttctaccaaaaactaaaactaaaaccaaaccaagccaaaccacaacacctcttttggagataccataagacataaaagctagaaacataattccagctctctcatacctctccacactcaactctaaattcttgtactttcattttgtaatattaaactatatcatgactcagaattttaaagttacttaaaatgtttcattttgcagagaaacatgataaattaaagattaccctcatttaatctattagaatacatattattgcctattgtgagagaaactgggttatcgttaaatagtccagatcagatctgaagcaaattatatttagtagctattttcaatgaaataacatgcttaagaatcttctttcatgtcctcaaaaagaagaacagtaatataaagtttattaatatactgttttcttggtgaacagtcatttcaaacccataggagacatgctaaagatactttattttttaataggataagttaaaattttcaaagttaaacagtcataagcttgaaatacttgaggtgatcaataaaaatgctacaaacattattaaagcagggtaaagatgggacttccctggccgtccagtaattaagacatcactcttccactatgggaggcatacatctgatccctttcagggaactaaatgacaacccactccagtgttcttgcctggagaatcccagggatgggggagcctgtgggctgccatctatggggtctcatagagtcagacacgactgaagtgacttagcagcagcagcagggaactaagatcccgcattaaaaaatagaaaaaaacaaaaaagcagggtaaagattttttcaaaatatattgctttcagttccttgttttaatgttaaagaactcctttcaagatctaataacaaatgaaaagttcacacctctgctgcccaaataatttccatatgtttcccaaatttctaattctggaaaggtcttgcttagttaataagccttttgtctggtatatttacttgtatatattctaaatgattgaacacaaactgagctttctactgaaacaatgacattctcatctacaaaactatgaaaacaactgttatattattttaaaagtcccccaaacaaaaaaagtacagcatttaaatgtctaagaactattcaagcttaaaagattattttcatattttaagaagtcaggcagttgctaatattcctatatgtctatttttgacaaaaacctaaagcaggaaatcagaagggtctgccaagaataaactatcaaaaagaactgaaaacatgacttcagagaaatcacactaagatctagttgctaacaattctcaaactattgagagtctcccagcccaataccatctcattttttctctatgattacgactataataaacacatttcataaagtcttaaccagccacaagctgattctgtctctaagaatgaatacttttttaaaaaggacatggttaacaaaaaaaaaaaaaccttaggaaggaaattttaatcaaaaggaaaacactatggtcaaacttcatccaagattaaaaaaaaaagtactgaatacagaattagggcctacattcaaacttttatcaaactgatttcttaccaacacagaaatttttttataagattaaaaattcacttataagtatagcataaaaaagtttttgatagttcaagaaaaataatggatgggtaaaacagattttttaaaaaattatgcatttcagcagtttgatcaaattctgacaagggaaatacatgacttataaacatttacattacaacaataaatactggggaaattaaaccagtaaatatttacttggatggcaaagcatagtggtaaagtgaacagacttaaaatttagctctgccacttactaagtacactgtcttaggcaaattacttaatcaatgtcagctattaaattcaaataacaatacttgtctagaaagtaggtatgagaattaaataaattaattcatatatagtatttattatgtattaaaaagaagagacatcaatttgtcaacaaaggtccgtatatttaaagctatgatttttccagtagccatgtatggatgtgagagctggaccataaaggaggctgagtgccaaagaattgatgcttttgaactatggtttggagaagactctagatgtcccctagactgaaaggagatcaaaccagtcaatcataaaggaaatcaaccctgaatattcattggaaagactgaggttgaaagtgaagctccaatactttggccacctgatgtgaagagcccactcattagaaaacatcctgatgctggtaaagacagaagccgggaggagagggggatgacagaggacgagatggttggatgtcatcaccaactcaatggacatgggtttgagcaagctccaggagatggtgaaggacagggaagcctggggtgctgtagtccatggggatgccaagagttggacatgactgagcgactaaacaacatagtatttattacagtagatggcatatttgcctttgatataatgatatataataatataaaaaatgatataatatttggaactatatatggcagaaaactaataattttttatatacaaaataagaaaaatggcataaaggcaaacagaaattaagagatggaggagcaactgaagtgcaggaataattctgaaaaactagcttgaaagagctagccttgaagaatgagttggaagcaaacagtgataaaaaggtagtaatcagggaaggcaaatacagcacaaacaaaagtacaaaggccctgatggttcagatggtaaataatgtgccagtgatacagaagactcaggttcaatccctgggtcaggaagatcctccggagaagggaacagatacccactccagtattcttaacctggagaatttcatggacagagaagcctggtgggctatacagtccatgggatggcaaagagttgaacatgactgagcaaataacacacacaaatagctgattcaatctgctgtacagcagaaactaacacaacattgtaaagcaactatacactaataaaaactaatttaaaaaaaaaggcatgaatgaacaggagttagggaaacaagtcatgtttcaggaagcagtctggtggaaaaaaaagagagagagagattttgcattaggagtactgttgagaagaaacaatgtcccaagagaaaagcaataccataagaaaaaatctttctgttgtagaacacagtcctacgagcctatttaaaacaggaaaaatttatttctttcaaagattactaaatgccaaaaacaagcaatttaagatttttatgaagatataaaaaaggaagaaaaaattttgaagtggcaaaaaaaaatctgattcaacatcaaaatgtagtcatgtaatagatgaaaatggccaaatacttttctgtgaagataaaaaaagtaagaaactctcttatacaatattagcacagttagagatacaaacagaaaacagagatgtggaaaagataaggtttgagaacaaaggtaaataaaacatgaatgtcagagtcgaaggaaaaaaggaaggaaaagaatacataacaggaatgaacatcaaagtaagaaagaaaacattaacaatatagtaatggaaatgagataaagatattagagaagcttaaaaaattaagcataaatgtgcaattaaaatgagaaaatgaaagaaatgaaaaactagacaggcaatgtacctttaacttgaaagaaaaccaaaatacataatagttaacaaggtcaccacactgcagttgccctgtttacataattataaaataacctaaaacaaaggtatagctaatatacttgtatatttaaacaaccataggaaaaaagacagactacatctgaaaaagcaatagttgaaactgccaataatgaaaactggtaacagtgaaatgatacccaaaatgtacttgaagaaaataattgtcaatctagaactccatgtaagttaaatgctagtcactcagtcacatctgactctttgggaccccatggaccacaacccgccaggcttctctgtccacagaatttcccaggcaagaatactggagtggatcgccattttctctagaattctataccctgtaaaatatctttcgagaaaagaggtgaattttcaagcaaacaaaaactgagttaatcttcattagaagaaattctaaaggatgtgcttaaggcagaaggaatatgatcttagatataaaatcaaagattcaaactgcaatgaacagcaaaaaacccagtaaaatttgataaaattaatggatactataaaatcaagattagtaatgtcttctaagatctttgaacacagtatgaaactaaggaacaatagcatatgagctggaatgtaagttgatggaagttgaaagtctattacattcttgtactgataaattttgttaagtatttatatttgtagtcatttacagactcaccataaaaaaatataaacaggctgcactacttccaaataaataaagaaaaaatagaaaggttaaaagttaaaaaaaaaaaaagagagagataagaaccaaagagaagaaataaaggacatgacaaaatttttcagtaaaatagtaggattaaactcacatatttaccagtaattcaatcaagtaagtaaattaatgttcaaatcaaaagaagacagattttttttttttaaaacaaccaactaaatttacaggtgatacatctctgaaaaaaggatacagaaagcttgaaattaaaacatggagatagatatgctatgtaaacacttaccaaataaaggcagttatattaatgtaagacaatctatgccttaaggtaaaaacattactagagatagaaatacactttaatacaaaagctttcatccaaaattaaaaaattaaaaatctgtgtgcatctagtaatatagcttcaaaatataccaagcaaaagctgacagaattatatgaagagagaattccataatcgtagttggaagcgttaacacgttttcttagtaattgagagaatcagatggaaaccttactaggaaggcagacatacacagcatgatcagcagactagactagctggactgcgatgaagcaccgtaccagcaactaaagactggattccgtccaagtgcacatagtatgtttataaaaattgaacaaaggaggcaacatggttaagtcttctcaaattctgtgcaaaacatgtgcaaaacatgtactttgaccactatgcatttagttagatagaagttacaaagaaaagagccagaaaacctttatgtatttggaaattaaaaactatatttcttacataactatgactcacaaaagagcagtatcatttcctaatgaaattaatgaactggataaaaatgaaaacaattcatagcacaattaaaaaataagaagagggaaatttatgtccttaaatgtgcaatttatgtccttaaatgcatataacaggaaaataacaaagtctgaaaattaaaaagctaagtatccatctcagtaaattataaaaagcatattaatctcaaagagaaaaagaagacaatattaaacacagagtataagtcaaggacataaaagttaacataaagaatcaacaaaccagaagttggttctctcaaaagataaacttatggtaaaagtaatgaattggggagggagaaataattcataaataataaatattaacacattttaagaaatcctacaaacattaaacagataataggggggtattacgtacagtttcatgctagtaaagtttgaaattttaggtgatcttattaaacctcaatcaaccaatcaaatgactctgcatagtcctataaagtttaaagaaattgaattggtaacctaaaactatttctgcaagtaaatctcaagcacagatagttcaatggtaaattcagccaagcatctgagaaagaaataattcacaacttatatttattcagaaaacagaaagaaaaggttaaatcctaaacattttatgtgaattagtctaataggtattagtctaattaggtatgtcatgaaagcataaaatatgtagattctaccctatccatatttatataggcataagcctataaaatataggagatcaaaccagtcaatcctaaaggaaatcagtcctgaatattcattagaaggactgatgctgaagctgaagctctaatacttcggccacctgatgcaaaaagcagactcacaggaaaagatcctgatgctgggaaaggctgaaggcaggaagagaaggggacaacacaggatgagatgatcggatggcatcactgactcaatggacatgagtttgagcaagctccgggagttgtgaaggaaggggaagcctggcgtgctgcagtccatggtgttgcaaagagttggacacgactgagcgactgaacaacaaaaagggaagtttctaggcaaacaggaagtctattaaagaaataaatatagcccaacattttcttaaaatacagactatacttgaagaagagcatattaatacatcaaatgcactaaaagtagtttttgttttctccaccgtaagaagtctgaaaaatgctttggattccctagactttcttatgatcaggcaggaacttcttacccttctctactatgtttttaatggagcacaagccaaaaaactttgcagtgtttacttccttatttgtccaacaaatcatcatcagtgaagtcagcagcaaactgaataaccctggaaggaatgtttattaactaaacactgttccaggccagtgaagtgtaaaaaaagtatgacttggctttaagtctcaagcatagttactaccaatttccctaaacttggttccttcctagagtcagaaggataagttaactgtctgcaatagcagagttacacatgattttaacttctcttaaatgagtctattgctaaacaggcagttctaaaacctgtttttagttaattacataaaattgctggtgggtctgttgtttaccttaacaaaatattaaatgccataaaaagatttagaacataaagttacttgtgccttcatctacaaagttaaaaaaatataaactcattctcagaaatggtatacatacatatatatatatatatatacacacacacgtatatactttcattagtaacattttgattataagagattattacatatgttctatttgtatatagtccaaagtatattctatttaaacacagtaatcatttatttgaaagtatcatcatcaattagataaacagtaacaatgcataaggttgagaggcaggtttgttattattacacagtgaagctgggagcaattcattttaacttaactttaaatttataaactcaaagaaggcactggttctgtttctctaactgtaaaatactcaaccaaatcctaaaggaaatcagtcctgaatattcattggaaggactgatgctgaagctgaagctccaatactttggccacctgatgtgaagagctgattcactggaaaagaccctgatggctgggaaagactcaaggtgggagaagaaggggatgatagaggatgagatggttggatggcatcaccaactcaatggacatgagtttgagcaagctccgggagctggtgatggacagggaagcctggcgtgctgcagtccatggggttacaaagagtcggacacgactgtgcgattgaacaagaacaacaactctggtaagtgagtgcctaataataatgaaagatagtgataagattaaaatatatgaaaagaggaccaggaaagtttattattctttgtttctattaaagcaataggatttctatacaactttgcatcatttcacaagttttatactgagcattaagtgttctcactcacagtgcttctgactccaaatgtgtggattttctccttacaccaaccatttctccaattctctgattccaacttgatatccaacagagattcaactcaattctgacagtatctccctggagttagtgtcagatctcataagttaaaggacttagtctgacaagactatcctcacttcaaatttcaatcgtaaattccatgccactggtacttgtgacctaccagctgtaaattggggtttcccacagcacccttcagagtcaatgagtctagagtaatcacataatttaggaaagtagttactatcactggtttattataaaggattcaaatctgaaacagccaaatggaagaaaaatgtagggcaaggtacgagggtagagggtgtgtgtgtgtgactggaagtgtgtgtttgtgtaccttccatacccttcataccacgctccctagcacctcaatgtgttcatcaaactgaagtagtctgaaccccactgttctgggcttttggagagataccattaggtgggcatgactgattaaaacatggttttaggttactgaacaccatctttgactctgcttctctccccagagatcagggatggggctgaatcacatggtttgatctttatggagatctgaagttacctaaggacttccgcaccactcatctcagcatacaaaagacacttatcactctgcagatcccaagggttttaggagttgtgtgccaggaaacagaaaagatcaaatacttatttttcattataacacaagcacctactctgtactctgttactatgacagttaaattttttaaaagcatgctactctatacaataagacagagttccttaaataacaaaacacaagaccttaaatatttaattggtatcatcctccaaaacaattaccttgggagattatattgttagggaaaacacacaccctggtcaggcaccatagtaaccatctgcatgagttattttacaacaggaggtcctagtaaagaacatggaattaataagctacctaccactctttcccaggaagactttgtgaaaaggtcaaaaggagaccatgtgtcccaccttctcccagatttctcactggcatctatctcggctgagcaatgcgtgtggccccaggaaggactctgagtcaaaatgattggccagagacaacccagaaactaatcccataacaataaaacctgagcctgggagccacatggcagagcggttctcctgggttcccttatcctactgctctctgcctgggcgccccttcccaataaagtctcttgctctgttggcacatgtgtctcctgggatagttcattttctagtgttagacaagagcccactctcgggccctggaaggggttctcctttctacaacaatattatgctctaacattcacatttctttcagaatcagatcacaggccagccaagaaaattagcaattatgtaacattcacattacacagacaatgtttccaatacaaatctcttcattatcaactatatcattattaactgtatactaataaaattttttggcttatccaagcactccccacccccaaattgtatgcgtgtgtatatcaggcgctcagtggtgtctgactctctgcgaccctatggactgtagtctgccaggctcttctgaacatggaattctccaggcaagaatactggagtgggttgccatttcctcctccaggatatcttcctgacccagagactgaacctgggtctcctgtgctggcaggcagattcttaaccatctgagccaccagcgaagccccaaattacactattaaaaaaatgacaacttgttatcaacaaaaatatgtaaaggaataggtcactggtactgaaggtaacattaaaagaatttttctaagtcgctcagtgctagtcaatgttagcatctgtaagtacatggttttccaagatgaaaacttaaatttagatacgtgagttcaagtatgttatttgcttatttttcaagtttcattatcatggtatagacctgtcttacagaaaataagtccctaactcaaggaactaaatctttagagtaaaaagatggggaggagaagggaaaaaagaaaagaaaactaagaactgacataaacttatatattcttaaaaaaaaaaaatcctgtttcttgtatatacttaaaaatcgccctaataaccaatctaagttacatatttatgacataccatttacagctttttcaatcagttcttcacaggcatcaaaatcacccttcaataccaatttatcatgcagatctgttaacattggatgttccagggcaatcttagttttcttttgcagtgattcaaaggcttctgtatagttatgttgtctaaagtgttttaggcaaagacgaatagcttcctgttcacggtactactggaacacaagagaaggtatgaaaaaaagagatctggttagttattactttaggaaataagaagtgacaattactaacctaaagtgagcattttaaacattaactaaacatactaagcataacttagcattgtactaaccctattcattactatcattactaattctactattaaatggcaaagctaaagcttagtcaattgtaataacttgccaaaggtcacaaagtatatagcagaaagatattaaagagatgaagatatacagatatatatactggcatattatttcatgaagataaaagataccaaaagatgaaaccaggcctaattctgaactttcaagaaaagaaccagaaaaaatatttatcaaatcttacttaagatggtaaaaacaatagcttccaaggtttttactaatcgggcgacaacgctggtactgaaagcacagaagccattaaatacacgctctttgttcttagtagtaagttattagttgaatgacaaatatcatcaaatgttcatgtatttcaaattcacaaacaggttttatgactcaaaatcatcagggagaaactatttaagtttcacaattttttactaaccctgagctaattcattgattaaatagctataaagtaaaaaaatctcaattaattacaatccaaaaagaaatattcaaagtactaactctcttccctaaaaagatgaatgccaaaaaacaagatcacatatagaatttaaaagaaaatttaacttcaagtataagttatgacatagggaacagacttatggacaagggtaggggagaagtggcaaaggatgaaataaatggagagagcagcacggatgcatatacactaacatgtgtaaacagacagacaatgggaatttgctgtaggactcagggaactcaaactggggctctgtaatcacctagagggttgggaatgggcaaaagggaagagggagattcaagagaaggggggacatatgtatacctatggtcattcatgttgatgtatgacagaaatcaaaccaatattgtaaaccaatcatcaatcaaaaataaataattacttaaaaaaagaataagttataagacttccacaaatttcctaaataagaatacaacaaactgacatggaaccaatgcataataaccaataaaaatataatttacttgtcagcattactgtttaataaggcaggaaaatttacaagactcaaaatactcatcagtttatagtttctgatattttattaatgacaggttaccaaaacactttttcttaaacactatagcaaggttttccctcatcaatcaacaaaagaataatttatatacaaactaacttgacattaatagcttcatatgtttgctgctaagtcgcttcagtcgtgtctgactctgtgcgaccccacagacagcagcccaccaggctcccccatccctgggattctccaggcaacaacactggagtgggttgccacttccttctccaatggatgaaagtgaaaagtgaaagtgaagtcactcagttgtgttcgactcttagtgaccccatggactgaagcctaccaggctcctctgtccatgggattttccaggcaagagtactggagtggagtggcttctaaataaagatttccccaactatctggaaccattttaaatagtaataccttgttatcatgctgactttaatttctagaggtttacaataacacagagaacttgacaaaagaatgaccaaacaattttaagttctcaaatacaatctgtccacaatgttgtgggggaaaggtgcaatctccaatttctcacagtatcaagtgacttgtgaatatattcaagaaagcacaggtacgtatcagaggctaaagagaaaattttttccggtatccttactcgttaatttttttaaaaaaaagaaccaatagaatttagaagactgtaagtatctgctaagcgctgttatatgtataacactgtaatgatcatttttaatgtttaagaatatcatctcaaccttgaaataatttagaatattacaggcaatcccagaaaatatattaaaaatatagaaaaacaaaaacccagcatctactttaaattgaatataatcaaatccccacgataaattagtcaaacaaaaagttcctcaattacactgaccagaaaagaaccgaaattctattaaaaaaaaaaaacttagaaagaacctatattgtttcccaacctcctaagagatgagttgacagttcagcccaagaagtcaggaagcagtgattagattaaagcttatcactcccctaacaagaaagagtcctcccctcaacaaaaacatagccaaaagagttaaatggatatacatcagaaacaaagatgaaacattaaaggtattaaaaaaaaaaaccaaagacccatttcttaataatttaaattcacacttctcaggttgcatttattatataaaatgacctatgaataaaattattaaatattacctttatactccctataagaataagatcacactatttatagaaactatctcaaattttagttctttaaaaggaaaagtaaacactgctattttactcaacatgaacacaaaggaggaatacataagagcaatccagaaccacaactaccccactgaaaactacgtataaataattctatcaatacagatttggtatattaatgtaatagcagattctggtgccatactgcctgcgttgatgcactgcctggagcccttgacagctgtgtgtcctgaggcaaaatacttatcctctctgtgttctatttcatcatctgtaaaatacggataataattgtacctatcttatagagtggcaatgagtgaataagtgacaaagaaggtaaaacctggcaaaatgcaaatgtttaataaacactgattcatctttttaattaccattgctgttctcaatattttaaattaatctcaagacaagagcatgacacaattctctattacaggcatctgaaacataaaataaggattttaaaatacagtcctaccttactataccagttgagacagggttgtactacatcaggatcatcaatgccactaagttcaacataccagatgctaaagttaaagctgggtccccacgataagagtggaacttggagaagggaaaaaagaaagaaaaaaaattaacatagttcaaataaaactttagcaaagtaaaacaacaattcaaacttaatagcaaattttccgaatactttctacatgcccagcactgtactattggtgctagggccacagcagcaaaatgaaacatatgatctatgccattatgaggttgctttaattataaaaacacgaggatatattcaaagtgtcatgtatctatcccccaaaaacagggccagggctagatgatttattttagcaggttagtttttatcaatgccacaagaaacaaataattactataaaagttatttataatttaaactgtatcagagcacagaaagagacaaacttcaattgcttagcaaagtggcatatcccagaaaacaaaaccagaagagaaaagatttaaggataatatcagctctgagtatatattcaaaattttaaatactgatttttttaaaaaagcaaattaattctaccaggttttcactgcactaaatagaattagttcaaggaatggaaggttggttcaacaggagtgatattaatgtaattcatcatgttaagtaagtaaaagagaagcacatttgattacttcaacagatgctaagagcaaactaataaaatttacttaagaaacccaatactcttaaggaacagaggcagaagaaaactttgctaactagatttttttcttaagtatcaaaacctcaacccaccacccccctcaaacaaaccaaaacaaaaaaaaaactaacagagaaacattaagtattcccactcaaatcaggaacatgacaaagaggcctaatatctctactattcaacactatatgggagatcctagccagtgcaatcaggaaaaacccctgcaaattgagaaaaaaatatcacttgaagatgacttagtttatccacctaaaaaattcaagacatttaactgaaaaacttttatttaaagtttatatgcaatagcatattgaaaagcagagacattactttgccaataaaggtccgtttagtcaaggctatggtttttccagtggtcatgtatagatgtgagagtcggactgtgaagaaagctgagtgccgaagaattgatgcttttgaactgtggtgttggagaagactcttgagagtcccttggactgcaaggagatccaaccagtccattctaaaggagatcagccctgggtgttctttggaaggaatgatgctaaagctgaactccagaactttggccacctcatgggaagagttgactcattggaaaagactctgatgctgggagggattgggggcaagagaaggggacgacagaggatggatggcatcatggactcgatggacgtgagtctgagtgaactccgggagatggtgatggacagggaggcctggcgtgctgcaattcatggggtcgcaaagagtcggacacgactgagcgactgaactgaactgaactgatccaagaaaagaagataaagcttaaaatatctcagaataaactttaaaatatgcaaggtagtaaaattttaaaacataaatacttcatttaatatgtttctagatgggaaaactcaaaggttgtaaacatgttgattcccctcaaattaattataaatttaatgtaatctcataatccttatggtatagatcctatttttttgacatcagacaagctgatacgaaaaatatcaacaagacaaaatatctaaaataatagaaataataagaaaataaacatactaaaagataaaggaattttaagtttggtattagtgaaagaaaacaaagtaacattacaggagcacaagagtgtccaaaaatctctgaagaatccagaggaatttcatagaatcagataacatttcacatcagtaatgacaggacacagcagacagaagtttttatcttgtgactgacaggctcccacaaccctttcaggaggtcccatgtggtcaaaactacttttcgtaataacactaaggctttatagccttttctttttttcctaaactgtactgacatttgcactcatggtacaaaggcaatgctgaataaaactgttggcatcttggtaatgccataaaaagtagtagtatgagagtgttccagtgttcattccttaatacagtgtgaactgaactgtattcctcgccatcacacacctgcagttaaaatacaaaacgacaattcatttaagaatgtcttctgcaaatagacagccagtgggaatttgatgtatgatgcagagagcgcaaatccagtgttctctgacaacctagatggtgagatggggtggaggtgtgagggaagttcaagaggcaggggacatatgtatacccatggctgattcatgctgatgcatagcagaaatcagcataatactgtatggcagctatcctccaattaaaaataaatttattaaaaaataaaatgcttttccataaaaaagaaaataacataaataaagtaagctacaacaatatagtttactacacagctaatatagccaacattttataactttaaatggaccataagatatattatatcataacactgtacgcttgaaatccatataattttataaatcaagtatacttcaataaacagtataaaaagtaaatatatagataaacttatttcttggtttgtgaaaagttttctaaattttcttaaatgatgctcactttcatagctcctagaaacgcataaattttttaaaataaaatgtcgttttgcctgtaatatacacttaaaaacgcaacataaactcctaaaatcgtgactgcattatcaatttaatgttaattttcactgcaatgcttaattgcgcattcatccttctaattaaaataatatgattaaaacatgaaaaaatgtctctgatgatgtgtaaaaattaattttagtaaattcctatcattaagtacacatcattttaatattctgtgtggcacaatggaaagtacaaaaaaagtacttttggtgcacatgaaagtatggtggcattctcaaggaaaagaacctgtgtaagttgtgagctgaaacagccattgaaatagctctgtaggatacaatttttccttaaaagaaaagctgacatctagtatttagatttcagtatctgccagacatttacctgtcatttcaaagacaacaaataacagtatttgttgccatggacaaaattcaagcttttgaggaaaaattagaatttcggaaattcagtattcagcattgtgagcttagctactttccaatacttttctgataagattggtggtaataataacaagtgtgatttttaaaaaatattatataatgaaatgttccaacatttgaaagatttgcataactcagtgaatcacattttctaaattaccaataaatgattttacaaaaccatacatggatgaaagactggttcaaggtacaaaacagaacaatggattttagtatcacaccaacatggtactgaataatgtaactaagaaactaatacttgtcaatttttgattaagtatcaaaacaaaatgtctacaatatttactatcaggtctaccaatttccaagtccactgctctttcctagcatatgaggctcagtgcagagctaaagatgtactaggtcagatgctttcctacttttgccatctaaaggatgctgagtaaagacagagaaaagcaacaggatatacgcagggttcctggaacgtttaacgtgaccttcagcttatatgtgcaaataacacaaacttcaaaaagttttataccaacaaatactgaattatcatcactgttttggtgtgcatttcttcagaagtaacattttaaaagcgttatctactacatcacagcaataaccattaagcagtataaaatcagaataaaacaacattctaaacccaaaacaccaagaaaacagtctgtaagtgtaacttattagttagtgatctgaaatccattcttaagttccaagtccaatttcaataaaatcaggaggaaaaaaagcttcctattacatctattcaagtcagcaaagtgttcatttattaaatccttataagcaactgtgggagggaggttaattaggaaatcatctcacaagatcttatattagacgaataaagagtacagtgaatttttaacaaactgaaggcatatatacaggatgaggagaatgatatatacccatttcaaatatacacaaatgatttttggtggcattaacaacactactgaatatcagacccaatctgtgttgtatatcagaaatctaaatgtgaactggagcagcaagcacaccttcctcgctccctaataaaagatgcctttgctctcacctcaaataaaaaaaatttttttagaaactcctcacatcccaaggctaagagactgtatcctaagattcactatcagttcttccaatgggataatcagacaaagacaagatcaggatcaatgcctctcagacattttcataaaatggcatgcatagaaaatgacaagatacttagtacacaagcacactaggttttaggattcagtgattctaggattggcagggagtcaatgtacatatgtacatatacattcaatatgctttggcagtatcattgggaaagctctggtctagatgactaaacagctgttagaagatgctagtaattttaagctcaggttctggaagactataaaaattcaagattaacttcgctgaaagagtgcatctactcttactcagttcagttcagtttagttgctcagtcgacatcatgaactgcagcatgccaggcttccctgtccatcaccaactcctggagcttcctcaaactcatgtccattgagtcagtgatgccatccaaccatctcatcctctcgtccccttctcctcccaccttcaatctttcccagcatcagggtctttttaaatgagtcagctctttgcatcaggtggccaaagtattggagtttcagcttcagcatcattctttccaatgaatattcaggactgatttcctttaggatggactgtttggatctccctgctgttcaagggactctcaagagtcttctccaaaaccacagttcaaaagcatcaattcttcagtgctcagctttctttatagtccaactctcacatcatacatgactactggaaaaaccatagctttgactagacagacctttgttggcaaagtaatgtctctgcttttcaatatgctatctaggttggtcataactttccttccaaggagtaagcatcttttaatttcatggctgcaatcaccatctgcagtaattttggagcccccccaagataaagtcagccactgtttccactgtttccccatctatttgccatgaagaaatgggaccagatgccatgattttagttttctgaatgttgagctttaagccaactttttcactctccactttcactttcatcaaaaggctcttcagttcttcttcactttctgtcataagggcggtatcatctgcatatctgatgttattgatatttctcccggcaatgttgattccagtttgtgcttcatccagcccagcatttctcatgatgtactctgtatataagttaaataagcagggtgacaatacacagccttgacgtactcctttccctatgtggaatcagtctgttgttccacgtccagttctaactgttgcttcctgacctgcatacaggtttctcaagaggacaggtggtctggtgttcccatctcttgaagaatttttcacagtttgctgtgatccacacagtcaaaagctttggaagactgtaaaaatcaagattaaccttgctgaaagaatgcgtctactctacttacaaatgaatgaatgtagtaagtacacaaaacactcagcacagtaactggcatatggtaatgctcaataaatgctatatattagtattattaacttctattcctataataattttcttcttaatagtatacttttaaaatgttacctctctatatgctctcatgaaagccaccattggggtacgttcttcccccacctccccacctccctctgacaagacacagtactcatcctagacttccagactcctgaggatccagaatgcaggttgagtccggtcaaagctaaagcttctctctgaacctccgacacccactcaggctacaaaaatccaaaaaattcatagaaatctaagtcatctcatccaccaaaaacgagaactcctccagaatccttccaaaaaatcagtacttccttctgccttcacatcaccttatttcctaatacaaatctttctagtcaccatataagtaataaccttatcccattcaactttgttttcagccatctgatctaatcgcccactgaggttttcccgtccaaactttaaacttgctctcttgaatctaaccacccaaataactactctccttccttactaaactttttttttacttacaaagcttacctgaaactaagcttcttcctaaggccaactctcaactttcacactaagtcctactgaagacttcactccagtatgggctctttggttttttgtttggtgatttcccttggatattcaatgaatgctgtgatccaatccctctcagatttaaatgtaaaatgaaaagtacacaggattcagagtaagcaaactatattgaaatatagctataaaaataactaagatacaaaattatgatatagaaatatatatgcttttattagcacattagctaacaagattctagtggcaggtctaataattaccataatttcaaagatataatatttgccacagtgtaatgtgatgagaaatatttataacttctatccaaaacaagtcacaggtaatgccaatactataagctactgcctatattcataattgaagaaaatgctaagagtttagagaacacaaagatgtaacacacagccactgattaatccctataaatctctgtataataaactcaaaaagtataaataggatgtctctaatgaggcaagcagtatgcttgatgcttctgaaatatgagcaaacagaagacagttgctatcaccaaggatttaagaatctacttgaggaaacaaaactttcacccatcacagagtaaaagaattcaacattcataaaaagacagacttaggtttgtatcctatctctatgttctactgtacagtcttggtctaatcatttaatctacctctaaacttcagttttctcatctgaaaagtgagcataatatacctatttcacagagtattagatgtttcataaacaacgtctatttatcactttaaagtaatataagcacatatccaaaagcatataccaaatgttatgtctttgatccatcacttactagctatataccctgggacacatcatttgacttctagtctcattttccttaaccaaaaaaggcaagattttttatcttccagtgaaatgctcaaatgagattccacttgtgaaaacactcacaaatgcaaaagcagtaaaaataacacattcaactctttgcaaccccatgaactgtagcctgccaaggtcctctggttcatggaattttccaggcaagagtactggagtgggttgccacttccttctccagggaatcttcctgacccagggattaaacctgcaactccttttgctcctgtactggcaggaatattctttaccagagccacctgggaagcccattaaaagcatatgaagttctaagtaatgagtgctgaaatgacatgaacgctcaaatcatgtgcatatactttttctatgtctaactgatgcataagaggacctctgttctcttataaattttttaagggaacaaactattcaacaaccctgaacaggcttctattcatagttctaacgaataatattagaggattaagaattttagaggcagcagtagtagtttccttcaaagaaaactgatgggtatagaaaatgtactctgaaaattcaaataaaataactcaaaaaaagagaacatttcattttgcatgactaagcaatcagatgtagaataagtactttaaaatttttaaacctaaaattttaaaatctaaaatattttcactgctgctacatttggaatgttagaactgttcaagcattgttcaagaatgtaagaatctataagaaatggctggcatgcatactgaggaaagaattatttatcagcatgaaagaagaaacaactaaagaatttattttaaaaattagcttattcatcaattttcatagataaacaggatacaggtttttatttccaattacttattataacaaactatagcttctgctgcaagcactgttacaccaagctcaacctgggcagctacatggtgctgcaaagaggagttctactgcaaactccactatcagcagctgtttaagagcaaaggcaactacgactaaggctttggctagaagtagcacaaggagctctgggcccacacggaggcggacctcggcaccaagacagcctgaggcccctctaaccatccactctcccccaccctcgctcagatagataacctgcattaggcagcaggaagggtgggagactggacagccgtgcccgcagtgagggtgggggcagcgtccaaagagcaagaggccaccttactcaggcaggttacagaggcagggctctgctccagaattccttctctccctcagctggtaggggttcaagaaacaggactggggtttgctcatttccctgcttcctgtttctttcaggcttcccaggtggtgctaggggtaaagaacctgcctgctaatgcaggagacataagagacttgggttccatccctgggttgggaaggtcccctggaggagggcatggcacccaccccagtattcttgcctggagaatcccatggacagaggagcctggcaggctgcagtccacggggttgcacagtgttggacatgactaaagtgactagcacacacgcctgtttataaaaaaagtaaaaaactgaaaagtccaatgattctaaagatagttttccctctataaatagtcttttcagatattctttttgtctaattccatgtacagaggagcgtggtgtactatactccatggcattccagagtcagacacacacacaatgaaactatttgactcaatgaaatgaacaggccaacttgcaacagactggcaaataataatggagctgttcctttcaaaagaggatttttctcccaaatcaaaacacaggattctggcttttattactattctttaaggaatatgattcaccataactacaattttaacatactattttcaaaggtatgaaataaagatggaaattaacagtgaagtcctcaactttcataccctctaacacaacttataaacaaaataatcctaaaaacactagttttgaggaggtattacaaatacttttaaagttaaaacacttgctaaaaagataaatgccttagatagcatttttcaagaattactttgaaactaattagtgggttagaaattagttttatgtgtttgacaaatattactacacacacaaaaatgaaatacaaaagaaaaaattagaaaataaccacaatatactgccttaaggaatccatcagtatttggttttagaatgatgcaactttagaactgataaaccttccataaaacaatcaaggctctcaaatcactgtatctcattaaatgataaagtatttagaaaagattctattttaaataactgtcactcaggtacagatttataaaccggggccagccaaacagtaaacattttgggctttgtggtctatactgtcttttgcagctactcaactttgccattgtagtgcaaaaacagagagatactatgtgaaaactggcatggcggtgttgccataaattttattaaaaaaaaaaaaaattaaaaaaaaaataaaacagtgaacctacaggattgggcccacacaggctgtcgtttgctgattaatggaataaagaatttatttctattccagaatgctaaaagccttacctattttaatgaatcgacacggaaacatctgttcatcaattttatgctttaaggtaaatgtttctttgttataatcattctttaagccactgtggaaaaaaaaaataaggttattaaatctgatttcataaattagtaaatatactaaaacaaagattaataacatacccagattttaaggtttgacaaatacaaaagggataatataatgaagtagatgaacatgagaatatacgacaaagcttgtacattcacataaactgcactatatggtggtctcttaattaaatgagggataatgaaaatgttcagtgttaattaaagaatgtgactacagtgcatgaaaatgtgtgacaagatccagtgtcctttgtgtagaaagaaagaaagtgaagttgctcagtcgtgtccgactctttggaccccatggactctagcctaccaggctcctccgttgatgggattttccaggcaagaatactggagtgggttgcgatttccttctccagatcttcctgactcagggattgaacccaggtctcctgcattgtaggcagatgctttaccttctgagccatcagggaagtactgaatacaatataaaatattcaagcagtaagaaaattgaaaaacaattcatactcatatcttacaacctgaacagagccagatatttgaatttgccaaagaattaagtcattaaattctgactgagatgccaatgttcctttttatagctcaatacattttcaaagacaatcttactctgttggtttaatagcatccagtttaccctatataaaaagaaattaatataatttctgtacttaaacaacttaggactgattcaagtatttatggaaaagtcacttaccttcaggctgccttatattcaactgacatactttcatggcttaaatgaaatgcactctagatgtaataatacttatataaaatactgtgataatgggacacactatgtcacaaatatattctaaaactgcatgacttcatttgtccgctccattttataatccatttttcatcatctagagggcaaattaacattcattcctggtggtctatgctgtcaaaattaaaatttactgagttccttccaagaggtggggctttctggtggctcagctggtaaagcatatgcgggagacctgggttcaatccctgggtgggacagatcccctgagaaaggaagagctactcacttcaggtactcttgcctgaagagttccgtggacagagaggagcctggtgggctatagtccacggagttgcaaagagtcagacatgactgagtgactgacactttcattttttattttctttttcaagaggcatgctctgcacttggtgcagtcacataattttactctgtttagtctccaatttatactaaactctcagggcaaccaatcttaatgttttcaacagattatatatttttatagcaaggattacagcaaagatttcaattatagctcaaaagtatatctgaagtcattaacattttaaaaataagactgaagaataagaagtaaaaaaataaccccaattttattctttctgctttggtaacaatattaattagtatctcgatagaaaaaagttgactcaagccacaatattaaaataaagcactagaaataaaatagtagaagtattcttttctcccttgtaagaaatatcaagccatgaagatttagctacaaagagactaaactaagactacactaagacagctccttcctccccataatcataacccacctggacaacagctccgtcatgttttcttcattcatcccaccaaagactttaaatttcttcaaattgcagacatgagttttctcatattttccaaatgtgatattctggactatagcaggcctttcaagcttcagaatcaagtactacaaaaaggaacaaccaaattatatcctcctccacttaagacaaatggttagacaatctgaataattaaaatattggacaatggactgaataaggttcatcctgtccatcctacaccaacagattttttttttttttaatgttaaaggatagcatgcaacagccaggctaccataacatcaccactttcacccaggaaactacattattttgaacaatgtagatgaaagaggggaaaaatggactagtaacataactgctaatcaaggaatagcatttaataaaataggctatgaataatcaaataaattagaatacaaaattagaatacaaaagtgacaattacatagtctcaatgactacacttcactaataaattcaatattcaaaatcagtgataaaattttaacctagaaaaaagatttaccagtcacccctgacaattttataaattaaaaaactcagacctaccatacacatgtctaatgcagctcaagttttctaactatacacagaataaaatgggatcagttacttagggaatgtattttacattatgcagactgttttcaattataaaaattaaaaaggaaattacctatagtcaaatacatgggaggaaagctatttagacaacaactcagttgttatgctgcagtggcttcatgctttgtaataatcggtaatactcatgataaaggagaatagaatgaagtggatggtcttactttgtaccaaacacaaaaattaactcaaaatgtaaccaaaatgattcaaaatcaatcctttacaataaaatataaggcctaaaggtaagagataaaactataaaactcttaagacaaaaataggggtatatctttatgactctggtttggcaatggaattctgagatattactccaaaagtattagcaacagaatacaaaataaactggtctttatcaaaattagagttttgtgtgtcaaaaggcactatcaaaaaagaaaaaagacaatctacagaatgggagaaaatacttgcagatacttatctgatgagggcttagtatcgagaatatataaggaatttgtacaactcgacaaaaagaaagacaacctaattttaaaatgggcaaaggacctcaatagccctttgtccaaagaagagaaacaaatggccaacaggtacatgaaaagatgttcaacaccattagtcaccaggagctgggttatgggcaaaggagagaatacttaattggtaccaggttttttatagagtaatgaaaaaaactaagtagaaatgacagttgtataacactgtatatttgaacacttaaaaatggttaattttatgttatgtgaattttacctcagtaaaataaaagaatgaagttggtggtaacacgaaagatgatgatataatcagaaataatatctagtgagtattaattcccttgacttacagattactcaggtttttatgtattttatttcattttggtgagataagacagtaaagcttggtggctcagacataaagtatctgcctgcaattcagaagtgaaagtggaagttgctcagtcgagtctgcctctttgcgacctcatggactatatatatacaattcatggaattctccaggccagaatactggagtgggtagcctttcccttctccaggggatcttccccacccacggattgaacccagttctctcacactgtaggcgaattctttaccagctaagccacaagggaaccaacctggctgggtttgatccctgggtcagaaagatgccctggagaagggaatggttactcactctggtatcgttgcctggagaattttcatggacagaggagcctggcgggctacagtccatggggtcacaaacggctggaaatactgagcgactaacactttcacttatctcattttaataggagtaggaggaacaggagtagtattttaagaacaataatcatcctcttcatcctcattttatggataaaaaagtttggcttagaaaggctaagtaacttgccattgttacacagttaaaaaatagcagagtttaaaatcagtctatctgcaaaggaggcaagaatatacaatggaaaaaagacagcttttcagtaagtggtgctgggaaaacaggacagttagctacatgcaaaaggacaaaatcagaacattctctaacatcatattcaaaaataaactcaaaatggattaaagaccaaaatgttagtccagatactataaaagccctagaataaaacatagaatactctttgacataaatcacagcagtatctttttggatctgtctcctgaagtactgcaaataaaaacaaaaataaacaaatgtgacctaattaaacttaaaagctctgcacagcaaaggaaactaccaacaaaaacaaaaagacaacccacagaataggagaaaatatttacagcgatgcaaccaaaaagggattaactttcaaaatatataaacagttcacatagctcaatatcaaaaaaccaaacaacccaaacaaaaaatgggcagaagatttaaatagacatttgtccaaagaagacatatttggccaacaaacacatgaaaaaatcctcaacattgctaattattagagaaatgcacatcaaaactgtaatgaggtatcactcacactagtcagaatgataacatcaaaaagtctattgtctattggggagggtatggagaaaaaggaaccctcctataatgctggtgggaatgtaaactggtacaaccactatggagaacactatgaaggttccttacaaaaattaaaaatagaattaccatatgatttagaaatttctctcctgggcatacatctgtagaaaactataatttgaaaaaacacatgcacctcaatgttcacagcagcacagtttacaatagccaaaacatggaagcaacctaaatgtccactggcagttgaatggataaagaatggataatgaaatattatacatccataataaataatgaaataatgtcatttccatcaacatggaaattatcataataagtaagccagagaaagacaaatatcatatgatatcccttacatgtggaatctttaaacaatgattcaaatgaactatttacaaaacagaaatagatccacatacacagaaaacaaacttatggttaccaaagaagaaataatggggagagataaattagaagtttgggatatgcagacacacatgactatatacaaaatatacaaacaaggatctactgcataacacagggaactaaattctacactttataataacctataagggaaaagaacctgaaaaagaattatatataaatatgtaaaccaaatcactgtgctatacacaggaaactaacacaacaccgtaaatcaactgtagtgaaaaaaagtgaagtcgcttagtcgtgtctgactctttgtgaccccatggactgtagcctaccagctcctccgtccatggaattttccaggcaagagtactggagttggttgctatttccttctccaggagatcttcccaaccctgggatcgaacctaggtctcctgcattgcaggcagatgctttaccatctgagccaccagggatgccattaaaaaaaaatttttttaatcaatctgactgtctgatactgctggttgactgacccaatttccattctcaatccaattcttcctagccacgttccaggcaaaaatagatacatggcaaaattctggtcaatgagatataagtagaagtcgtgggataaattttgcttttcaaaacaaatgttacttctttaccatctgaactgagcctcccacccccctgcaacaagtaagaaaagatctactaacagtcatctgtgagacactcaactttcaccagcagctgcctaactctagttttcttgtgctggcagggacagagatagggacggtgatagggaaaaaactcgtttgtttattaacccactgttataggaccttctgttatttgatgctaaaagcattcctactgattgactaaccccacagtcgaacctttatttaaccactatacaatcacaactgtttaggtttataaaatgtttatattctaaggagctattaagatttctttattatagaaattgccataggaaaattgagtcttaaatcattatccttctcatccatatcaaattaataggtgtggtaacatgatttttggttcactgagtttcgtaagaatacagctgtatattggagaaaagactacacagccaggtaggaaagtattcatatctctagctttctcatgaaattccacttcctcccatctctttccccttctttctctctttggtcattctttaaattctcaagtttaaaagtcagttttccctgacaattggttagtcaggtagtaaaaacagatctttacattaatacaacctgttgtatactatccatcaccccatatacaacagctccaaatacaataggaagcatttgtctacatataattttatttatgccaaataggactttgttattaaaaattatgtaagtaaaatgcaaattctctaactgaagtaaagcacaatgatctgacatacattacaggtaaaaattttagtgtttaaccacattatttataaattttgtaacttcatttttcaaactctttggcctcaataatgaatatgttactattaaacagtgttatcccatagttaaatagatttctgttacttttaatttaaagaaataactgctgtagattcagtaacagaaactgtaaaaataaattgagaatgaacatttgaaaaaaactattttacaatctctattaccgacctttaaattaagtattaataaattaattttaaaacaaaacataatgacccacaatctctttatcaaagcaacttaggttcataaaggatcaaagaactatctattacatgattcttaaattaggcatagaattaagcaaacaataaaaaaaaaaactgctcacaaattcagtccatagtgatttttcaatattaaaaataaaatatatataaaaaatcattttaaatcatatgaatattaacaatttataagaaataagatgatataaaaggagaatactttcgctttagataggtctatcatcaaaagtatctcccaggagctgagccttaaaggatgaggcagcatagtgtcctcaggctgccataacatattaccacaaacctggtggtttaaaacaacagaaatgtcttctctcacagttctgaaggccagcagtctgaactctagatgttagcaggacaatgttccctccgaaggctctaagagcaggtcctcctttgcctctaccaggatctagtggctcctggtgctctttgcttgtggcagcgtaattccaacctctgtctccatccgtcacatgaccttcttccttgtgtccctctgtgttttctccttttctgtgtctaataaaaacacttgtcatttgatttagggctcaatctaatccaggatgatctcactttgagacccttatcttaattacatctgttaaaacctttatttgaaataaggttacattctgaggttgcacatatcttttttttttttcccccagagggtagtggggagcactaatcacctactacacagagccagtcaggcaaaaaggcttatgaaaaatgagttctggaaactgttaaaaggccagcatgattggagcctagtaagcaaggtcgagaatgatatatgttgagattgaagagaagttactatatcatacatcataaatgccatagaatctgttaagcacaatggaaagccaagatatgattaacatcacacacagtctatctggtagaaaatggatcagaggaaatggccaatgaattggatacagttataataattccaacaaaaggagagatgaaggagatttaaactcaggcagtgtgaagacagagaggattagacagttttgacatatattttggagcaagaatgaaagggattaagtaatagctggatatagggatggcttgctcagttgctcagtcctgtcctactctacaccaccatatggactgctgtatgccaggcttccctgtccttcaccatctcccggagtttgctcaaattcatgtccattgagtcggtgatgccagccaaccatctcattctctgacacccccttctcctcctgccctcaatctttcccagcaccagggtcttttaaaatgagttagttcttcgaatcaggtggccaaagtatagggaggggagaaagtagcaatagtggtgatttagtttttgacctgaataacagggtaattgaaatatcatttactctgatgggaaggattgacaaagaaattggcagcatggaaatgaaactagaaaagtccaagattatatatctgtgtaaatctcagtgtaataaatcagtgtctaaaacaacagtcacttcatgaagtcccatcacttcatggcaaacggagaaacagtggaaaaaatgagactttatttctttgggggctcaaaaaatcactgcagatggtgactgcagccatgaaattaaaaaacacttactccttgggagaaaagttatgaccaacatagacaacgtattaaaaagcaaagacattactttgccaacaaaggtccatctagacaaagctatggtttttccagtagacatgtatagatgtaagagttggaccataaagaaagctgagcaccgaaaaattgtggtgttggagaagactcttgagaatcccttggacagcacggagatccaaccagttaatcctaaaggaaatcaaccctgaatattcattggaaggactgatgataaagctgaaactccaatactttggccacctaatgcaaagaactgactcactggaaaagaccctgatgctgggaaagattgaaagcgggaaaagaggacgacggaggatgagatggttggatggcatcatcgactcaatggacgtgagtaagagcaagctccaggagttggtgatggacagggaggcctggagtgctgcagtccgtggggttgcaaagagttggacatgacctagtgattgaattgaactgaactgaaaacaacagtccccttctgtcatcccctctcatcctctgtcgactagaaggggactgttgtttcagacacttctttccttagttacttgtaaagtctcgtcacacaaccacttctttttctttgggatagttttggtcactgcttcttgtacaatattatgaaccttcatccatagttcttcaggcactctgtctaccagacctaatccctgtcacctctaccgtatagtcataaggaatttgctttaggttgtaactgaacggtctagtggttgtccctattttcttgaatttaaagcctgaattttgcaataaggagctcacgatctgagccacagtcagatcatgttgtttttatggactatatagagcttctccacctgtggctggaaaaaaaataatcaatctaacttcggtattgaccatctggtgatgtccacatgtagaaaggtttctagggttgttggaaaagcatgtttactatgatcagaatgttctcttgataaaagttggttagcctttgccctgcttcactttgtactctaagatcaaacttccctgttattctgggtatctcctgacttcctacttttgcattccaatcctctatgatgaaaaggacatcttttcatgtgtgtgttctagaaggtcttataggtcttcaaagatccagtcaacttcagcttctttggcattagtggctggggcacagacttggattactgtgatgctgaatgatttgtcttggaaacaaaccattctgtcgtttttgagattgcacccaggtacagcatttcggactcttttgttgactatgagggctaatccacaactgagcgtcatttctgctttggtccagccccttcattctttctggagctattagtaattgccatctactcttccccagtagcatatggaacacctccaacctgcagggcttatcttctagtgtcatattttttgcctttgcatattgttcatggggttctcacagtagaatactggagtgggttgtgatttcctcctccagtggaccgcattttgtcacaactcttcactatgacctgtccgcctttggtggccctgcaagcaggaagggtaggctaactctactgttttgcgtaaatgcagttgggattatgatcaggactgcctttatctataatgctgctaaccccaagtcttgaagggaaaagataaacactagctgccagtcttttggttgtacaataaaaaggcttgggtgaaaaccctttttctggattggctccactgatgctttgtccttgatacaggaattgttctgccagtaagaaactgccttttaaagctcctttcatactggacaatacccctggctacctagaactctgtgagtgcaacatcaaaggtgtcaaagtggtctgctgctgctgctactaagtcgcttcagtcgtgtccaactctgtgcaaccccatggactgcagcctaccaggctcctccctctgcccatgggattttccaggcaagagtactggagtgggttgccattgccttctccgtcaaagtggtctacttgcccccaaatacagtgtctctaattcagcctctagatcaggagtcataaagatctttaaggctcatactctatgggaaagattgtcaatgctatggaagaaaactctgatagaacaccatgaacatctggaagaatttcaccactgaagatgccatggttattgtagaaaaagctgtgaaagcctttaagcccaaaacaataaattcctgctggtgaaaactgtgtcccgatttcacatatgacgtcacaggatttataacagagccaatcaaggagatcttgaaagagagagttgatatcaaaagaaaggtgagggatgaaggattccaaaatacagaccttagcagaattcaagagctaacagacatcaaaccagaggacttaaaagtagataacttgatggagataagtgcttccgaactagtgccagacgacgagaaggaacaccagaagatgctatgccagaaaacaaactgacaacagacgacctgacagaaagaagggttccaattattcaagactgcttttgacttcttttacagcatggactctttcatgacagacgcgctgaaactaaaacagagtggaagaaggattgctactgtataaaaacatgtctacagtaatgaaaaagcaaaagagtcagaagttaccaggtattcatgcacagttacaccaagtgtgcctgcctctcccggcaactcctctccatctcccattgaggccactcctgagacagttacaccaacccctcatcttcctcctcctccgcagcctactcaacatgaacatgacgagaaccaagaactttatgatgacccatgtccacttaatgagcagtaagtaatcatcatgccatacaactgataaacctctctgctgtgtatgtgtgtatcattgtgtgaacatttagtaactgtccagcaagaactatatgaaactatttttgtgcgatcatcattgcctaagtattcattgtatagaacacttctgacttctgtacaagactttactgacatagatagccaatccttacataggcatgaggtgactaacattttatataaaattaatagttttactgttttgcaactttattttcaaataattatcattatttgataatttcatatcaatagtatcatacagtatgccccctctctctttagtaattggaaaaattacatatcaacctatcaacacagttaagaggctgccaggaggcagcgtgaggaactccgcccgtagcaaaggtcatgaggaaggaggcttcggcatacgcaaaggcgggatcgagcctcaggaaaccccctgttcccgagcatctacccccaaaaccagagtctgatttatgctctcacctacacctctgactttacggggggctctcccccatcaccatttctctcggagaaggagttaacttgcagctccagttaataaaaattcctgggcgtgacaagagtgtttcaacttaaaaactcctctgaaggttctctagcctgcctgagcaggttcgtccagccacatgtgattgtttacagcctcccaaccgtgagaggcacgagatgctttaaactttttatatacacactcttttgagaagattatacacactcttttagaaaattattagtatagtatagtagattgattagaacttatatttgtgaagggttttcatttgttgagccaatatttgctgctaaatctccatattccctgcccttataatgaatataactaacatataggagaaataagtattaacctttaagattaatcatgttaaaccttaggctaagtaaattccttttcttgattgtaacccactacaccctcaccctataggaatgtaactttatttggagggtggcgcttggtttaagaaaaaatcacccctggagaaaataagttttctggttaactgaccgttatcagaaaggaccataacatgtcagcagacctcatggccagaagatgatgtaaaacccctaagacctttgtataattttatatgaagcacctgattgtgacaagggtcaggtctgctgacccccacatgactctgtattcatccctacatataacaaaaagtatacaagcaaacctgaaaaataaagaaatcggatcagtttctggaaagactgattcccccgtgtcgttctttctttccccttctggctgaattcccatctggaacgtgggtactcaccaagcctgctaattttgcctaggcttctaagatcggaccggggaggcctcagtgcctcctctcctttgggagaatggaaagacgcctgtggtctacataggtggtgcaaattccttgtcttggagttttattggtattccacataaaccaagttattcagcctctctttctccactaattttcctactacactattctaatctctctttatatctgtaattaaataagttttttcctaggatgccaattctgtctccccttcaaattaccctagatccaccggggctggaccccggcaagaggcttttgagacaatgtcaataatgttttaagtactgtattatgaatacaactgcaataaaatataccataaatattttatggtatactcattcattagtatatagggtaagatactgtgaagcaactgtatcaattacaatactactgaagaattgatgcttttgaactgtggtgttggagaagactcttgagagtcccttggactgcaaggagatccaaccagtccattctgaaggagatcagtcctgggtgttcattggaaggagtgatgttgaagctgaaactccaatactttggccacctcatgcaaagagttgactcattggaaaagaccctgattgggggcaggaggagaaggggatgatagaggatgagatggctggatggcatcactgactcgatgcacatgagtttgggtgcacaccatcggtgtcccgatggacagggaggcctggcatgctgtgattcatggggtcacaaacagtcggacacaatgagcgactgaactgaaccaaaccataaagcaattacattcctgcttcttcatttatcaatgaatggttatacctgtaaatatatacaaatttcttttccacattttaccttttcatttttggtctctagtgttggtaatacatctacagagttttgtatcatgtaataaaatgctgatgtagatatggacagaccactcatcttgtacacagcaaaaacttatgatatcaataaacacagtagagtaaaagtactttctattccttatgattttcttttctctagcttactttattataagatacagtattaataaataatacatataacacacaaaatacctgttaattgactatgttatcaataaggttttggaacaacagtaggctatgagtaatgttttgggggagtcagaagttaccatgcaaattttcaactgaagaagagttgccacctccttgcattgttcaaggatcaactgtatctctaccttatgatgtagcaactttacctccaaacatttatctcaaataattgaaaatatgtatcatttaaaaaatcttataaaagaatatttgtataagctttcttcacaatcaccaaaaacttaaatgtaacaaatatccataaacaggaaaacagatgaacaaattgtggtatatccataggaaaaaatggtattctgttaatgaaaagaaatgaaatacgatgcatgtaagaagtggatagcaaccccccacctaaaaattcgaagtatgaaaagtcatatacaaaagagtgtgtatatgctctgactccatttctattaaattttagtacaagcaaaactaatctgtggcaaaagaaatcctcttgcctccgggtaaagtgtgggagactgaaggattcactggtaagggacagaaagaatctttctgacgtaatgaaaatgcttgacatcttgataagcatataaattaatgtgtgcatttttcaaaatgaataccatgcactttaggttcatgcatttcactatatgtaaattatattaaacaaaactgtattattgaacacatacaatgttcttttcacaaactagggcaaaataccataaagaaacttcataaatttgctggcaccctggttccacagatagaaattacatcaaaatacatatattttctgtttattcctcactttaaaaaatcttattcccataatattgttatggttcacctaacagaaagaataacaggagtgtattgcaaaagctataatatacacataccccaagtgtattaaataatcactgaagtttcttgaccttcaatagcagaatgcccacaatttgttaaactttcaactcttctctctccaggcccagaaagcaaagaatattacctaatatagtacttttatttaaactacctcataaagaacttatagttgtagcagaaaaattatgatttaatctttcttaaaacaattatcaagacatatataaccacctgtacattttaatcaaccctagggcactccccagtcaccctgaaagacgtgttttccatggcagtattagtaacttctataaaacatatctgatgtgggagaaggaggaaattactatcttaaagtatgtatggggttttcgttcatgctacatttactctctaccagtacggacagataatccaaaattgacagcaatgctttcctcactaggtcgccaagtatttgctcccttccacaatggaaatggctttcactcttttttctaattacataaattataagttgaaaatgagaatcagaacaaaagcgtaagaacaaaatttaaaagaaattaaaattcctaaattccattattctgatacaaccaccaccattttgatgattcagttgaaccctgttttacacacttacacagacacacactttacgtaatttgaatatcatatatgttgtttttcatgggaataactctttcaaatggttcttttatctccctttcctctttcatctcctcctctcttaaataaccaatgtcaacaaccagatatatatcctttcatatctttacctggtctcactgtatcaaataaaaatatacacatatacatacagacacactgttgaaggacagagagttgttactcaggtaacaatagcaggatcctattacagatgtttctctgcatcatgtttttctcattttatggaggaaattcctccaagtcaactggtatgaagccagttcactgtatttaaatgactgacaatactccatgaaaaatgtattcaaccattaccttgtagataagtactctttttttctcctgagccaaaatctgaccctcagtaacagggtgaaataatgtttgtttttaactgctaacttctgtggtaatttgttacacagcaattgaatgactaatatagactccaaggtcaaaagaaatatcaacagttctacttactaagtagttatatccaaacaataagtattcatgtcctgacaactgagtagccacctgaaaaaaattcttaacatacattacaagaaaaatatttctatttttatctaccccattcttagtccaacacaagctttagaaaattgtttaagagttcattcactctgggatgccattctcaaaacatgccatacgtcctagcatccatgtatacacatagtccttcctctttatggttaaaaaaggagtagaagagaggctttgagtttgtttcccatccttttctaaataactacacattaacttccatatccacttaagctgcacatactgaacataattacaatatcttactgacaaagtcaagcactatctatcaaactgtatattctaataacagcaatgccttagatctatgcagtctaatacatagccactagccacctggggctaagtattctaaactaactaaaattaagtaaaatttaaaactgcattccttagtggtactagactcatttcaaatactcaacagctatctgctgttagcaactgccatacaatacagtgcagattataagaatatatttatcactgtagaaagtttactgcaaacaatatcctagaggttaatgaaaaacagagtattcttgcactaaagacccactaaatgtcatactgttggttttctacttgttacttattctatcttcccttttatgacactttgccagttatcaacttgctgttgatgtgcctatctttcatagctatggtccccatgcacaaagctgcttccagctgctgaaacctgaagaaacaatgaaccaaacagaataacattaaatgcaaagtggattcttaagaaaaggctattagaacctaaaaatctcatcacattgtttttgatttttcagagtcctcttttcctttctttctaatctcagacctgtttaaaatatgataaatgaattgttggttacagtacaactgctcctatcttttcacggatctggtacttgcaaattcatctactcattaaaatttatttgtaacatcaaatcaatattctcagtcattcctggacatgcacagagcagcaaaaaatttaagtggccatatgcaatcccatggacagacgagccgggtgggctggtccatggggttgcaaagagctggctacaacttactgactgacctggcatgcacggatactctctgagcttaaggtcaaacaagggaccctacatacttgctctcatacaagtgtctttctcatggtctatttagtgccacattttaaaatatttttgtgtttgctgttggtgtttcactactaaaagggtccccaaagtgtagtgctgaagtgctgcctggtttttaaatacaagaaggcagcaatgtgccttacagagaaaatatctttgtcagataagctttattcgggcaagagttacagtgctattggctgtgagttcaatgaaatgaataaaccatatacacaaagtaagatgactttaaacagaaatgcatataaagcaacattatgtatggactggttgataaaaatccagtaaccaagagtaacaagaggctcacagaaacctaactctgagttacaatgaacaatccaccagtctggcaaaatctaaaaatcagtcatagaagtgatggggagagtacaagacacagcaactttcatacactgccaatcagagtacaaaccatagagacattttctaaaaacttttgcattaccagatagaactcaaatacacatatcctctatgatccagcaactgtatgccaaggtatataccctaaagaaactcttgtatgtatgtaccaggaaaaaacatacaagaatgttcatagtactctgttcctaagaccaaaaactataaaaactcaaaagcctatcaaattgaaaaatagataaatatatttttgcatactgatatactagaataccaaacagttaaaactgtatgtgttaagtcacttcaattgtgtctgactccttgcaacctatggactatatagcccaccaggtccaggcaagaatactggagtgggttgccatgccctcctccagaggatcttcccaacccagagatcaaacccacatctcttatgtctcctgcatcggcaggctggtgctttacaagttagcaccactggggaaggtcagtcaaaactaacaaactacaattatactcggcaacattaatatcataatgtttaacaaacaaacaaaaagccacagaaaatgtataaatggattcaatttctattatatttacataaagtcaaaaccagaccacctgacctgcctcttgagaaacctgtatgcaggtcaggaagcaacagttagaactggacatggaacaacagactggttccaaataggaaaaggagtacgtcaaggctgtatattgtcaccctgcttatatgcagagtacatcatgagaaacgctgggctggaagaagcacaagctggaatcaagattgccgggagaaatatcaataacctcagatatgcagataacaccacccttatggcagaaagtgaagaagaactaaagaacctcttgatgaaagtgaaagaggagagtgaaaaagttggcttcaaactcaacattcagaaaacgaagatcatggcatctggtcccatcacttcatgggaaatagatggggaaacagtggaaacagtggctgactttatttttggggtctccaaaatcactgcagatggtgactgcagccatgaaattaaaagacactccttggaaggaaagttatgaccagcctagacagcatattgaaaaacagagacattactttgccaacaaaggtccatctagtcaaggctataatttttccagtggtcatgtatggatatgagagttggactataaagaaagctgagtgccgaagaattgatgcttttgaactgtggtgttggagaagactcttgagagtcctttggactgcaaggagatccaaccagtccattctaaaggagatcagtcctgaatgttcattggaaggactgatgttgaagctgaaactctaacactatggccacctgatgcgaagagctgactcatttgaaaagaccctgatgctaggaaagattgagggcaggaggagaaggagacaacagaggatgagatggttggatggtatcaccgactcgatggacatgggtttgggtggactccgggagttggtgatagatagagaggcctggcatgctgcggttcaaggggtcgcaaagagtcggacacaactgagcggctgaactgaactgaaagtcagacgaaacttaaatcacaggaatttataaacatatacatatataatactgtgagaatatggttaacaaatagtgaagtcactcaattgtgtccgactctttgcgaccccatggactgtagcccaccagactcctcagtccgtggaaattttccaggcaaaagtgctggagtgggttgccatttccttctccaggggatcttcctgacccagggatcaaacccaggtctcccgcattgcaggcagacgctttactgtctgagccaccaaggaaggccatggttaacaaatatgaaataataattatggaagtgggattagaggacagatacaagatggggctcacaggaagcttcaaaggttgcagtggttttccatttctaaagatggctaaagagtaaataagtatttgttttattattctttaaattttatatataagtatgtatattttttccctttgaatatagcatattttgtaatcaaacacttaaaacatgaggtgattcaaaaaggtttgtacacagtaaaaaaacaattaaaaggaaaaataagtacagagactaggtttccaagaattacggtaaaattaagttttatttatccaacttctttacctatcagagcattaatttcctccaggatatggacataataagtgtaaatgctgaaagtgtataaatgaaaaatgattattttttacttcagatgacttcagacactatttgtcaaggaaacaatttagctcacggtcctaataccatctaagtacacttctttagtaaaataacaaactaggttaagtttattttttctaacaggcagttactgaatcactgagtagaagtccaatttactaacatcacattaaatatttacagaatgccttgagtttaagtgcagtagaagccacaaactcttcaggtctgtactctgatcagttactgctcagaacagtaaccagcaccacaacctgttcttttagttaacattttcctcaaaatataacaagagacttagttttgtatcattagtaagcccccccaaattagattttaaatgttccagtagagagaaataaaaagtctatgcttcatcaaaccccacactacatttgcctatgaagtaaaaattcttccaaaatataaacaaacaaaaaaaggggaaataaaaatttacctaacagtttcaaagactgaataaactactgatgtaatccagataactgttaaccattcagtacttgcctatttaaaatatgagttctaaatggaatcaggtattaaacataatcttacctgtggagggtagttgctctctgaagaccaccttgaagactggtcatttggtttatcaactaaaatgttcctgaaattaaaaaaaaggaaattatacacttaattaaaagaataagtgaacaaaaatatgtaaaaagaggaataatctaccagatgctaaaattatcactaagttacataatactgggaacttgaataagaaaaaaaaggaaacagaacaagaaacacagaaaatgtctagcagttttaaggtttttaaatatgataaaggtagtattttaaacaattgaaaaaaagcattttatttatacatatgtgcacacagagagagagctctacttcatatcaagtgacaaaatgaactgcaggtgtacttaggaatttaaggtaaacaaagtaataaaatactaataattaatactataaatttatgcacacacatatatgtgtgtatatatatttaggaatttaaggtaaataaataaaagacctaataattaatataatatgatatcatatatatacacacatatatgtatatgtttatataaatatatacatcttttttttttcaatctttgaatcaagaaggtcttttaagcccagcacctaaaacagacctatggaaaaaggaattgatatatgtaactttggaaggtagtgttttcactggaaattgtaaggctaaagacaaacagaatcacacataaaaaactactttatttgatacatttatttctcagagggatatgggttaatcctgaaacactttatactggtgtcaaacaaacagtaaatggacagtagatgatgggagtcaagcttctcactttggagtggaaagtaacagaaaagcaaggggatgaaggttggaatgaacccaagggtactgaaatagagtcacagacatcagtgtgaactcatattaatattcagctttatatagatacagataaagagattcaataattatatgtgagtgtgcacacacacactggcacaaacagtactcccagctctgttcactaatagggactacaatcagtgacactccagtagcagtgagtacactcaataccaattcttggtttctatataccacagtccaataaaaagaaacagggattcttgggaaaggagctgattctaggcatagagcagggaattcagaacattagtctggaacatcttgtagtgctcaaaacaaccacaaaggtcggggcatgggggggcatgtcaaagggacacagaggagccaacctgagagaatgaatggccaaagctaaaataactaaacagcaaaataaataatgaggtactggactacaacccaaatatccctgagtctctagtgatataaataactctagtctaacaatcaggaaaacatcaaacagattcagacttaagaatactcaacaaaatacatgaccagtactcctcaaactatcaatacaatgaaaaataaggaaagatcaaaaaaccaccacagaccagaagagagtaaaggaacaaaataagtaaaagtaatggtatcttgaatgggatccggatcagaagacactaataggaaatctaacaaaattcaaataaaatgtgaaatttagctaacagtaatgtatcagtgttggtatcttcgtcatgacaaaggtaccatggaaatataagatgtcatcaacaggagaaactagatgacgggcaaaactatcacagaaaaggtacttaataaatgtcaaaacgatgaatgaatttttttaaagacagaactataagaaaaagaattttattacatacacattttacaaagataaaacatgaatacatgaaatgacctcaagcattctaaaaggtaaaaaccagctagaaaaatataggcaatgtaaaacacaaaaggctaattaaaatttgaatatttaaacagcacttaattataaatacagccttcccacgtggcccagatggtaaagactctgcctgcaatgtgggagacccaagtttgatccctgggttgggaagattccctgaaggagggcatggcaacccactccagtattcttgcctggagaattccatggacagaggagcctggtgggctacagtccatggggtcacaaagagttggacacgactgagtgactaagtataaatagcccatacaaaaactggcaaacccaaccattcaaaatcaataataaccaaaaattagagattaaaacaaagatacacattatccctataaaattgagcctatactcaaaacaacatatttgaatcataactgcagttgttggccagagctggtaaaatggtactctcatattttgctggcagaaatgtaaactgatacaacttttcaagagagaattttaatatactatatatcaaaaacatttcaaatatgtatatacttttaaataaaaatgataacagccgtgatgacaacgatgatgtttgtatctaacatttctgagcttttacgacatcctggtctaagtgctttccatatataaactattacctttaacgtacagattaagaaactgagagagataaattaatatacctaagtggtggtggcggtttagtcgcatccgactctttgcaacgccatggactgtaccccatcaggctcctctgtccatgggatttcccaggcaagaatactagagtgggttgccatttcctcctccaggggatcttcccaacccaggaatcgaacccaggtctcctgcaatgcagccagattctttaccaaccgagctacaagggaaggccccctacacaccaaaaaaagaatctcaacccaaggcgatctgactccaaagccaatgcttttaatcaccatagtacacagatttagcatatttcacttcctggaacttaacctaaacaataatccaggggatttaaaacatccacgtttatcacaattcaatttataacaggaaattgtaaacaaattgtctaacaatagaggatgtgttaaaaaaaacttatgaaatgtctatgttacagaataacatgtaaccataatgtatattatggcctcactttaatgctgttggcaaatgtttactacacagtgagtgaagggaaaaggcagtttacagagtatgtacactgaatcaagtattgtaagtaataataatgttcgtgcatgaaaagaaaagaccaagaagatatgctaaattgctaatgtagctatcagtggtgagattacaatgactttcttcctcctttgcacttttttgtacttttcaaatattctaaaactaacacatcaacatataatcagaaaaaaaagatgtgttttattaagcattacaaaacaaagataagaactctatgaaaagactgcagtactgttaaaaactaaagctataaaactagggggaaaaaaatcactctgacatgaaagtatgaaagaaaatctaatataactatgataaaattgggaccacaaaaatcacaaagtataatacattgggggaggggagatcaaatgacatgtgaattaacttcattattttcatagctcttaagaataatgtttccaaaactgataaaaagaaagagactcaagaatactgaaatttagaataaaaacatactacctatcttataagttatttgagacagaataccaacaacaacaaaatagcaaaaaggagctaacagaagattaaatgaaagcaggacacactgaaaacagaaaatttaaaatacaatattaatacaaagaatctaaaacagtcagacatataaatggcctaaaataacacagtaagatatcctttgaactgggtgttatagtagtaacattactattacatgaaggcacacacacattaatagagtgactaataatggcagatacaatctttgcaaaactaggaggaatttaaagaaaaagtattaactgggattaaagggctcaacgagagagataaaaaaataaaatttaaaaaaagtttggactggaggaaaacaataagataataagagttcaagctaagattgtgagtcaatgaattgaatgaaaataaaaataaagtaaaaaacacagaagaaactaataaaacaatagcaggagattaaagtctctcagcatctagaaaattaataaacaaacatctatacaatgttgaagtggcagtaagtattaatagtactatgaagaaaaacaaaacaaagtagaagagaaacagacctggataatgtgagggagttagccatgtcacaatctgaaaaatgagcagacagatcactaaatgcaaagctgaaggggcaaatagttacagaatgttatggtcttgtgaattttgaaatgcctattaaacaacccattggagattcagcagctggattaactgaggctgaaattcaaggaaaatgccagagctgaaaaaatagagccatcagtatatcaaatgttaaagcatataaagctatgacactgaatgcaataactcaggggataaaaaggaggtagaagttgcaccccttccacccccaacatggcgctaatggtaaagaagctgcttccaatgcaggagacataagagacacgggttcgatccctgggtctggaaaatcctttggaggaggaaatggcaacccactccagtatctttgcctggagaatcccacagacagaggagcctagcaggctacagtctatggggtcacaaagagttggatacaattgaagcaacttggcatgcaaagagaagctgaaggactgattaagctctggagggtccattatttgtggggccagagagaaagatcaagcaaaagagactgagatggaccaaagatgaagaaactgaaaacttagaaaccatgatgtcaaatgaagaaagtattttgagaacaaagaagtgaaaaactatgttcagtgctgctgacaagacaggatttgggtggtattcacttcatttgcctaactccaaagttaaaagttgccacacagagagtgcttaataaatatttgatagatatgaacaaataacaaatacataaacagcactaaaaggaaaaaaattcaagtgattctattaaagcatagaatatattaattatattaaacatatattaatatatttgttatctgtaatttaaagcttatactaagataaaagagaaacatgtacacttgaaactaatacaatattgtaaatcaattgtattaatttaaaaaatggataaaagagaaatatgatgcagatcagaaatgaggtcaggtctaaggtgccttgtaaagatggaagcttgaaaatattcctgatgatttctctctagttccaacactaagtcaactacgaagtacctctcttaagcccagaaggtaacagagaccagaaccagaacttttaagaattatcacaaaatcttattagtactaggaggaccacgagatccatggatgcacctttccccaagagaaatgcagtaactaaacaagcactcctgggacaacaggctagtctccctggcccacaaagagcttcaggagaactttactgctgaatataagaatgtacttctcttagaggtggctcccagtgacccatggcaaaccacagagagctaacaatatacaaaatgttacacaaaaagccacaagacaaagactgccaggctgcccataatctgaggtatcacaagctctacccagagagtacacaatacaaaaaagttcgtatagaaaaatgtacaaaaagagccaagaaaatttatttaaaaagtgagaagagatcattttatcagcttttaaaacacttcaaattctttataattaaaacagtagggataggaacaaaccaagaactaagaaacaaaaatccagaaattgagcccagtgtagatgagaacttaatattttatgaagatgatattttacttcaatgggaaatgatacttcatatttaaatgatgcttatacaactgtatatccacaagaagaaaataagttaacccctatctaatatcatacacaaaattaattccaattaaagatataaccatacaaacatacataaatatcacagaaaaaaactgagggccaatatatacaaccaaaaaagtgttagagatctttctgtcaagaaacagaagctttaaaagaagaattttatttaaaaaactttaaaattttgtattgtaaaaaacactccataaaaacggatagcaatcacatgggtcagaatggccatcatcaaaaagtctactaagaataaatgctggagagggtgtggagaaaagggaacccttttacattgttggtgggaatgcaaactgatacaagcaccatggagaacagtatggagattccttaaaaaaacaggaataaaattgccatatgacctagcaatcccactactggggatatatactggacatatatcctaaggaaaccataactgaaaaagacacatgtaccccaatgttcactgaagcactatttacaaaagctaggacatggaagcaacccagatgtccatcggcagatgaatggataaggaagttgtggtacatataacacaatggagtaatacttagcttaaaaaagaatgtatttgagtcagttctaatgaggtagatcaacctagaacctaatatacagagtgaagttagtcagaaagagaaagacagatatcatatattaacaaacaaatatgaaatctagaaagatggaacgaatgatcctatgtgcaggacagcaaaggagacaaaaacacaaagaacagacttttggtcttagtgagagaaggagaaggtgagatgatttgaaagaatagcattggaacatatacataactgtacgtaaaacatataaccagtgtgaatctgatgtatgacatagagcacccaaagctgttgctctgtgacaacctagagggatggggtggggagggaggtggaagcagggctcaggagagaggagacacatgtatgcctatggctgattcatattgctatatggcaaaaaccattacaatgttataaagtaattatcctccaactaaaataaataaaacttttttaaaaagacaggaaacaagcaatagttcaggaaaaagtacttgcaactcatatgactaacaagctagtaatcgtacctaaaataagtaaaacagggtttcacttgagaataaaatgaaaaatgagtggaatgcgtgtcactgaagagtcattaaaatttaatgactagtaaataacaacaaaaattttttttctaaatccctgtgtcagggaaaacaaattaacacattaagatatcttttttcacccctcaaattgattaagttaaatctttacttaacaggaaatctcagggagaaactgtggacatgtccattattccaaccttgatgaaaagtcaatttgcaatatctatcaaaattctaagtgtacatattctttcacctagcactctcagaatctatcctataaaaataaaatcatcagtatataaagatctatgtatagagactcacttatgagtctagctgcaatagcagggaaataaatcataaaacactatactgccagatctatgccagctaacttgtagggatttctgcaatataaaaaacaaagaaggaagtatgattttattgttaaaaaattattatttatatatatttgtatccaactgtggcttccctgatagctcagctggtaaagaatgcaccaggagaccaggagaccagggtttgattcctgggtcgggaagatctgttgcagaagagagaggctgcccactccagtactctagggcttccctggtggctcagacggtaaagaatctgcctgcagtgcgggagacctgggtttgatcccctggagaaggaaacggccactccggtattcttgcccagagaattacatggacagaggagcctggcaggctacagtccatggggtcacaaagagtccaacacaacagagattttcacttgtatccagttgaattaataagcatgggtggtattacctgctgggcttccctggtggctcagacggtaaagcgtctgcctgcaatgcgggagacatgtgttcgattcctgggtcgggaagttcccctggagaaggaaatggcaatccactccagcactcttgcctggaaaatcccatggacagaggagcctggcaggctacggtccatggggtcacaaagagtccaacacgacagaaatttttcacttgtatccagttgaattaataagcatgggtagtattacctaatttatatcaaatatacaaagcacagatacaagccaataatgaagcatgaaagtcaaagtgaaagtcgctcagtcatgtccaactctttgggattccatggaattctccaggccagaatactggagtgggtagcctttcccttctccaggggatcctcccaacccagggattgaacccaggtctcccacattgcaggcagattctttaccagctgagccacaagggaagcccaagaatactggagtgggtagcttatcccttctccaggggatcttcccaacccagaaattcaactagggtctcctgcattacaggcgggttctttaccaactgagctatcagggaatcctcaaaatgaagcataagtaccattaatgagttttatttatcttcttctacttatcatattcagatttttaaaataaacattatttatataagcattaaagtactgtaaaaatattatgacaaacttttcatatttatggaaaactgactacatcatcatcagatggtcaaatcgggctcaacttttctttctttttgaagacacaggtgataaagaagcaattaataaagatataactgtttcttaaaatttttaagtgacagattatccctcaaagcttaaagtcaactacagattcgttttagttcttcctcccagatgctccttcctaaaatccatttgcactctcctggaaagcaagtgagaaaccagttgtggcagtgactattattaacattactcttcatcaacagggacacagccactatgatagcattctataaaacatgtgcttaagtatccttactcataactcccaaagatctataaaacctaccatcattactggtatagtttttccttcttctaacactcaagacagacattaacctctttcactacaaactgtcaatcatgatactagctcactagccctaatctctgaaaggggaaacatcccatccacagcctctgctgaagaagcaatcacagacagacagtgatgttttcacttgtgattcaactacgtcagtgacagccaatctagcctagctaagagatagaatgggtcatatgaaaataatgtataaaaaatagaaccaatgaaacagagggaaaagtatacagaataagagataaaagagagagaataagacagtcagtagtaaggtaagactgtagcagacataaaatagaagagactccaaggaataacagagaatagaaatggctttctggttctagcttacaggaggctgtttctggccaccaaaatacgtgatcaaaacatacttctaggtactccatgactgatgtttaacattttaactattgtctaagaaaacaagaaaatgatcagcaaaaaaaaaaaaaaaaattacagaagacacaattcagtatagaaactatatgatccaaataatgaaaagtaatctactaagattaagctcaatatatgccattctaaaatatattttaaaaagcaaaatacaaataacaactatcagagaacttgttaagaagaaccgataaaacagatgggctaaagactaaaatggtttccttttttcatcagggttaattttaaaaggtacatttttattcctaccaatgcaagatgaaaattgaaggaaataaaaatgaaccatattaagtctcttagatataggctaaaaaaggcaaggctgtgaataattaatttttctattaagactataaaaatctatagtgaaacacacacacaactgaaatacaggatgcaacattaattttttcccaagttttatgtctctattttgcaaatgttttaaggtggtatatttaattatactaccaactacatgtcaggaacaaactattgaaatgcattataagaatataatttactggacattttgagttcaagtcagcaaattaaaaatcttcttttgattcaacatgttcaaatcttaaccctgcctggcaacatcttttaagttgctgctcttaagaatacttaaacgcaaaaaaagcagcacttgggcaaaaaaatggagcacttaacatttttttctgctaatggatgctcaggatacttaacagtaaatccagtcgattttaaactgagagttttggatactcaaaagctacctgtaatttcaatgtgaagaagtcagtcaagccaagtctgagaatatttttcttctggtagttttaaaataccctactaaaacctgtgcccgttggttgaataatgtgacaaaacgcatctagaagaaatcacctctgactaggaatgataagatcctagagcttggccacgaatttgttgggtaaggttaagcacatcacataatctctcaggactttaatttctttaactgtagtgcaaagggaagggttgaattccttgatctcaagtttcttccagctctaataggagcagtgcattgcacaactctagaaaataccattcatgaggccatgttaatattccacaagtctatgaaaagatttcacatatttcattcaagttaccatgtataattctcctcttacacagtagtcaataacaacacacaatctactgactgtaaaacagcttctattatgtgtaaacactaaatagggtaacaccacaaaagtatagaaggggtacctgtggccaaggatattatgatttaataaataataactgtatatagcataaaatgtttgagacacaaaaaccatatataataaaaagccaattcaaaatgcaaaacagaaatcaactcaaacaattttgaatatccacagttgtacagtgttaaagagtatactataaaaattacagcttttccaaaaaaatcgcttgtacactcactttcaaatacttcctaattttcacacaggagcatggtgaagaggccttaccataagctgaagttattcaacaaattttactcatctctaaatgctagacattgtgctaggctctaggaatacactgataaataagacagaaagaatccccacttgtgatgctaaggttcaaacgagaactagcagaaagtaaacaggaacagctgtaaacaaggtaatgacagatcataataaatgatataagagaaataaacagggagatgcaccagggcaggggagttctcttatttgaggtggtccccaaaatgctaactaaaaggatccactcatggaaaaacaaaagaaaagtcaactcttcacaaagaaatcaacaagctcaaaatcagaacaacaggaaataatctatggaaaccatggaaatctgagaactagactaagtcaaataatggcctcacaggctccaagataagataaatgcaaagaaggtaaatctccaaggggtcctgagaacattcataaaatgttgaatctagaccataagaggatttcacaactatcctgcaaatatttccttatttttaggaagacagaaacccattctgaagagaaattactgggaacagaaaataaattaagcaaagcgtaaagaatgacaactcctaggaaaggtaagattcatatgctaagttggcaaaggtccaagcgatacagaactcaagacatatcacagagcaaaatacattcaacgatgcctctccaaaaagcaaaatatttgcaaagcacagatatagatataaaagcaaatagctttattatatctcaaaagtccaaattttacaaatatttcccaaaggagagcggtcttgagccacaaagctcaaaaactatacttgtccattccttcagcctacagaagttcttccatctaaaactattagaagtgaattctttggtggtccaatagtaaggactccatgctttccctgttgagtgtgctggttcaatcctcagccagggaactaaatatcacaagcgacatgggatggccaaaaaaataaataaataaaaccactggaaaaccgaacttgtttaaacattagaaagttaaaatgaaagtccacaccaagcaattgtaggaaaaataatacatgtaaaataaattacattctaacagataataaaaacacatgagaaaaatgtggccacgaaaaatgatgaacattattatttagtgtttcaacatgagctaaaagaaatgaagaaaatagctgaagctttattaagcagtaatcaaaattacgacatttcagaaatattagacaacaggaagagctattaagactcacaaatgggacaccggcagtgaagaagcaggcaacccgtgggtgggtggtggctaccctagcgcagcagctggaagacataatgaaaaagtcgcccactgctggagtcctgtgcacagattcacaagggctcagtatgggctgccacagaacccaatcggatgagcatgattgggtgctatcagctctagcccagcaagcagctcaggtaagcccagaccccactgacactcctttggtgtatctagaatcaggtaatgggaacattatgatccagaaacacgatggtatcacggtaacagtgcacaaattggcctcttgacatcctgtgtcagttctccagcagcctgtcacagaaatgcagtcctacctgatgctgattatcttatagaactattagaattccagtaattagcccattcatgtaatatgcattgggcacttttctattaattttagagtgagctgctttttgacactctggactgacttatcaagatactgattaaaaagcatcatgttttgaagcagcaggtttaggtcaccttgtatacataatcatgttatgtttaataaacctggttggaggggaaaaaagactcacaaatgaggggaaatagatttctttcagaaaacaaactaaattagaaataggtatatcaaacattacgttgcacacctgaaactaatataatgtatgccaactgtacctcaactaaaccacacacacacaaccctgcccaaaaacacccgataaagaaaaaacagattacaaacctagattaaagatttactgagcacagccccacccattaaaacaagacccagtttccctctcagtcaatctctcccatcaggaagcttccataagcctcttgtccttgtccgtcagaggggagacagactggaaaccacaggcacagtaaccagtctgctcacagggaccatagccgtgtctaactcaatgggactaccgactcacaacatgtagggccacccaagacagacgggtcacggtggagaggcctgaccaaacgcggtccactggagaagggagcagcaaaccacttcagtattcatgcctggagaaccccatgaacagtatgaaaaggcaaaaagataggccactgaaagatggactccccaggtcagtaggtgcccaatatgctacaggagatcagtggagaaataactccagaaagaatgaagagagggagtcaaagcaaaaacaacacccagttatgactgtgactggtgatgaaagtaaagtccgatgccgtaaagagcaatactgcataggaacctggaatttaggtccatgaatcaagacaaattgaaagtggtcaaacaggagaaagcaagagtgaatgtcaacattctaggaatcagcgaactaaaatggactagaatgggttaatttaactcagatgaccattatatccactactgtgggcaggaatcccttagaggaaatggtgtacccatcatagtcaacaagagtctgaaacgcagtccgaagcaatctcaaaaatgacagactgatctctgttcgtttccaaggcaaaccattcaatatcacagtaatccaagtctatgcctcaaccagtaatgctgaagaacctgaagttgaatggttctatgcagacctacaagatcttctagaactaacaaccaaaaaatatgtcctttgcattacaggggactggaatgcaaaagtgggaagtcaaaaaacacctgcaataacaggcaaatttggccttggagtacagaatgaagcagggcaaaagctaatagttttgccaagagaatgcactggtcatagcaaacaccctcttccaacaacacaggagaagactctacacaagatggtcaataataaaattagattgattatattctttgcaactaaagatagagaagctctatacagtcagcaaaaacaagaccaggatctgactgtggctcagatcatgaactccttcttgccaaattcagccttaaattgaagaaagtagggaaaaccactagacaattcaggtacgacctaaatcaaatcccttacaattatacggtggaagtgacaaataagattcaaggcattagatctgaaagacagagtgcctgaagaactatgggcataggtccgtgacactgacaggaggcaggaatcaagaccatctccaagaataagaaatgcaaaaaagcaaaatggctgtctgaggaggccttacaaatagctgagaaaagaagagaagcaaaaggcaaagagaaaaggaaagatacatccatctgaatgcagaattccaaggaacagcaaggagagagaagaaagccttcctcagtgatcaatgcaaagaaatagaggaaaacaacagaatgggaaagactagagatctcttcaagaaaattagagataccaagtgaacatttcatgcaaagatgggcacaataaaggacagaaatggtatggacctaacagaagcagaagatattaagaagagatggcaagaatacacagaactatacaaaaaagatcatcatgatccagataatcacgatggtgtgatcactcacctagagccagacatcctggagttcgaactcaagtgggctgtcggagacatcactatgaacaaagctagtagagatcatggaattccagttgagctatttcaaatcctaaaagatgatgttgtgaaagtgctgtactcaatatgacagcaaagttggaaaactcagcagtggccacaggactggaaaagatcagttttcattccaatcccaaagaaaggccacgccaaagaatgttcacactaccacacaatggcactcaattcacatgctagcaaagtaaagctcaaacttcttcaagccaggcttcaacagtatgtgaaccgtgaacgtctaaatgttcaagctggatttagaaaaggcagaggaaccagatatcaaattgccaatgtccgttggatcactgaaaaagcaagagaattccagaaaaacttctacttctgttttattgactgcgccaaagcctttgactatgtggatcacaacaaattgtggaaaattctgaaagagatgggaataccagaccatctgacctgcctcctgggaaatctatatgcaggtcaggaagcaacagttagaactggacgtgaaacaacagactggttccaagttgggaaaggagtacgttagggctgtatattgtcaccttgcttatttaacttatatgcagtgtacatcataagaaatgctggactagagatggaatcaagattgctgggagacgtatcagtaacttcagatatgcagatgacaccacctttatggcagaaatcaaagaggaactaaagagcctcttgatgaaagtgaaagaggagagtgaaaaagttggcttaaaactcaacatacagaaaactaagatcatggcatctggtcccatcatttcatggcaaacagatggggaaacaatggaaacagtgagagactttatttggccgggggggggggggcctccaaaaatcactgcagatggtgactgcagccataaaattaaaagacacttgctccttggaagaaaagctatgaccaacatagacagcatattaaaaagcagagacattactttgccaacaaaggtccatctagtcaaagctatcatttttccagtagttatgtatggaatgtgagagctggactataaagaaagctgagcgccaaagaattgatgcttttgaactgtggtgttggagtagactcttgagaggcccttggactgcaaggagatccaaccagtccatcctaaaggaaatcagtcctgaatattcattggaaggactgatgctgaagctgaaacttcaattctttggccacctgatgcgaagagctgactcactgtaaaagaccctgaagctgggaaagactgaaggcgggaggagaaggggatctccatcttaaatgccaaaaaaaacttgttttaataagagaaagatcaaagaaaaaagacaacatagtgaaagattctaaaagtttatataaaatatcccacaaaatagtagagcagaattgacatcaaacatatcagtaaacgtaaatggccttaacacattttttcttaatttttaagatgaggtaacaaggcaaaaatccaatcctatcacatatacaaaagacataaataaaacattacattttaaaggaatagcaaagacagaccaagcaaatgaaataataataaagcaaggttcaaatttaatttcagacaagaagaaatactaagccttaagcaaaaataagagtactttataataaaatactatagtttataataccaagtaatgctaaacattactgacaaattttttcaaaaaacaccaaaatctaaaacatctctccaagtgaataaaaaaatctcttaaaaattattacatcaaaggagaaatacaaagcaaactgcaaaatttctacaaaataatgctaatagtaatgtgacgaataatacagcagtagcatccaagagagctttctgtgaggataaaaatattctgtatctgcactgaccaatacaatcgctgttagacacacgtggctactgaacacttacaatatgcctaatgtgagactaaggaactgaactttaaaattcaatttgtactgctacacatggagtcattaacctcagatatgccgatgataccaccctaatggcagaaagtgaagaggaacttaagagtctcttgataaaagtgaaagaggagccatatggggttgcgaagagttggacgtgacttagcagctgaacagcaacaaaatctggtggctcagtgatacgacaatttccctgctaatgccggacacacgagttccatccctgggtggggaagatcccctggagaaggaaatggtaacccacgccagtattactgcctgggaaatccatggacagaggagcctggtgggctacagtccatgaggaaacaaaaggtcagacatgactacgcaactaaacgacaacaaaacaatctagtaattgtcacactgaatagtgcagctctctacagtacaccagaaactcaaattttaataactgtgtcaatataaactaaaaatttaatatctggaaaaattaaagagagaaaaacagccagcaaaattaaaaaaaaaaaaaaaaaacctgctaggcagagactattttaagaatcacacagctattttgcaagtctacaaagataaatttgaaaacttggatgaaatgtacaactctctgtgggaaaaaatgtaccaattggccctagcagatacagaaagttgaaacagagaaatttccctagaagaaaaaaaaaagttatcagaacccaactatcaaaaaacactaggtaggtacaactgtttccagaaagaaaatctttcgaaacatttactaatgaagggattagctaatatgattttaaaaaggaaagcaaaaggacttccagatccagcttcaaaatgttaagagcttagctgctttctctcagtcttattgagagaagataaaagcagaacaaggtgaaaatcaacatctttctttagattcctcaaagagctgaggtcactggggaagaaataccctgtaatctggagagaagaacaaaagacagataatcacagctgagatcaccttatctgaagcagaagccactggagccaataattgataggaaaaattacaaggtcattttgataaatttctggagactgaaagtgggcagtttgacagaaactctgggggcacagttttagggatcgcgcatacttttgtgggttttacttccagtaaaagaagttgagaggaaaaaaaccctgcctgaaacagagcagaggaaaagcgaccatttaaaaatatcgaccgagtgttcctcatcacaaaaggcaactagccaagtccagcccccactagctttcctttctcacattaggggagaaaaacaaaggctaaaaacactctgcaaagtaagagtacagggattcagacccagtaaaaactgggatttaatcataagataaaagaatgcttcccttccttcacatctagccaccacaacaggggtaatgtataattacaggagactacaactgagagcttcaagacacaaactacttaagaacttagggaacaactccgccacctacccacttcccccaaaagaaaaaagagagagagaaaatatgaacactagaggaaaatgaagcctctggcacctagggctacatctaacagtccaacttctaacatgatgaacataaaactttaaacaaaatcctaattacttcagttcctactatccaatacatcctgctgctgctgctgctaagttgcttcagtcatgtccgactctgtgcaaccccacagacggcagcccaccaggctccccgtccctgggattctccaggcaagaacactggaggggttgccatttccttctccaatgcattaaagtgaaaagtgaaagtaaagtcgctcagtcgtgcccgactcttagtgaccctgtggactgcagcctaccaggctccttcgtccatgggattttccaggcaagagtactggagtgggttgccactgccttctccgaatacatcctagatccttccaacaaaaaacttcagcaagctaagagacaagaaaaagcacagtctgaagaggcaaagcaagcgtcaaaaccagactcaaatatgatgtggattttgaaattattagacagggaatttgaaataattacgtaagagcactaatgcaagatagatgggtaatgtatcaaggaaagaatcaggaagcttgaagttaagtcagcaaacagttcccacactgaaagagaaaaaaaaaattaaggaaaagaatttcaaggaactgtgagaaaactacaaaagctataatatatgcataattgcaataagagaaggagaaaaaagagagtaagaagcggaagaaatatatgaagtgataataactggaaaatttccaaaattaatgacaacaacaaactacagatccagaaggttcagacacaagcaggatatatgcaaaaaaatctacacagaggtgttatcatattcaaactgtagaaaatcaaatacaaagaaaatctgagcgtaatcaatgggaaaactcctcaactacataagaacaagcataagaatggtgtcaggtttcttaccagaaaccatacaatccagaaagtgtagaatcaaatacttagaagcgttgaaagaagaaaaaaaccaccaacctaaaattctgtatgcagtgaaacagaaacaaatgaaatctcttaaatgtgacggaaaaataaatagcgtgctaaaactttccagatggcgctagtggtaaagaacctgcctgccaatgaaggagacataaacaatgtgagctggattcccaggtggggaagatcccctggaggaaggatggcaactcaccccaggatctcctggagaagcccacggacagaggagcctggcgggcaacggtccacaggatagcgtcagactgactgaagtgacttagcacatatgcacacaaaacaaacactgagaaaacctaccgccactaggatctgccttgcattaatgttaagtaatttctctgaaggaaaataatataggtcagatacctggatcaacacaaagaaggagagaaaaggactataaaacgctaacataaaaaacctgtattttcttattcctaactgagtaatagatacctggttcaaagaaataaaagcagtaatgtatggggtgattagagcatacagaaaagcaaaatgaatgagagcaatgttacaagggagggaggaattagaaatattttggtattaatattaggtacttgaactacccatgaagcatcattattgttgttcagtaactcagtcgcgtctgactctgcacaggcttctctgccaggggttttccaggcaagatcttcccagactagagaccaaacccacatcttctgcactagcaggcactttacttaccactgagcagccaggaaagcccatgtcatttaaagctggattaagttagttgtaaatatagcaatgcaaactctgggacaaccactaaaaacatatttaaaagaagtataattgacatgctaagtggagagaaaataaaagcatattcaatgatcatttcaaaccagagaaggcagagaacaaagaaaaagtaagaagactaaagaacaagtgcaaagaatagaaaataataatcaatttaataatcaatttaaatgtgaatgatcttaatcaaacaattagaagatagagactgtcagagtggactaaagaacaagatctgaatatactgcctgtaagaaaccctatgggcttacctggtggcatgacggtaaagaatctgcctaccaatgcaggagatgcaagagatgcaggtttgatccctgggtcaggaagattccctgcagtaggaaatggcaacccactccagcattcttgcctggaaaattccatggacaaaggagcctggcagactacagtccatggggtcagaaagagtcgaacacacacgcacaagaaacacaccataaagacacaggtagatgaaaagtaaagaaatagagaaacataaaccatgctttcaaaaggaagctgacgctatatttctatcaggcaaaaagatttaagaacaatgaaaagcatcagggatagataaagaagggcattacataatgaaaagtgtcaaattctccaaaaagatgtagcaatctttaagatatctgtacccccttccccccaaaaaaatgtcaaaatacttgagggaaaaactgacagaattgcagggggaaaaaagacaaatccagtattataattgaagacatcaacatctctctatcagtaactgacagatccaggaggcagaaactcagcaagaatacagttgaatggaacagcaccatcaatcaactggatctaattaacatttatagagtattttatccaacacagcagaatacacattctcctcaagctcacattgggatattgaccaagatacaccataaaatacatattaacaagtgcagaagaacagaaaattattcaaagtatgctctcaggccacaatggaattaaaacttaattacacttaatcagtagaattaatttaatcagtaacagaaagagaggtggacaatcccaaaatatttagggtaaacaatactcttctaaacataaaggtcaagtcacaatataaatttaaaattgtattgaattaaatgaaaacaaaacatcaaaatctgggcgacagccaaagtgaaacactgaatatagtactgaatgcacacatcagaagatggatctaaaatcaatggccaaagcttccacttccggaaactagagaaagaagaacaatttaagtataaagcagacagagaagataaacaataaaaagcaaaaattcatgaaactgaaaataggaaatgaaaaagaaaaaaatcaataaaactaaaagctggctatttgaaaaaactgtaatcaagaaaaaaaaaacagagaaatacaaatttctaatatcagatatgaaagaaaggtcatcattactgatcacttagatactaaaaggttaataaaataaatattatacactgttctatttctataacattgtaagagatgagttccttaaaaggcacaaactaccaatattcaaggagaactgtgttagtcgctcagtcctatctgactctttgtgaccagagactgtagcctgccaggctcctctgtccatggaattctccaggcaagaatactgatgtgcgtagccatttccttctccagtggattttcatgacccagggatcaaactcaggtctcctgtattgcaggcagattctttaccgtccgagcaaccagagaagctccccaaggagaaacatcttctgaataagctgatggctattaatgaaattaaatcaataacaaataatcctccaaaaatgaaagcaacaggcccagatggtttcactggtgaattctaacagatatttaaagaaagtaatgatatcacttctctgaaatttcttccagaaacaaagtgaaaacttcgtaactctttgtatgaggccagcattattcaaataccaaaaccagataatgacattacaagaaagaaaaattccagcccatcttatgaatacagatacaaaaattctcaacaaaatatcagcaaatcaaatctaacaatgtgtaaaactaattacatactacaatcaaatggcatttattccacatatgcaagagtagttcaacattcaaaaatcaattaatgaaattcatcataccaacaagcaaaagaagagtcatctatcaatagctgcagcagaaagcacttcacgaaatccaacatgcattcacaatgaaaaatctcagcaaacaagtagaaaggaccttcatcaaattgataaagaacacctcaaaacacctatagctattaaaaaaaaaaacaaaaacaaccacctgtagctaacataaaggtaagaagttgtatgtttctccttaacatcaggaacaaaacattcctaatcaacatcatactggctcctccatccatgggattctccaggcaagagtactggagtgggttgccatttcctccttctccaagggatcttcctgacccagggatcgaacccgggtctcccgcattgtaggcagacgctttaacctctgagccaccaaggaagtcctactggaagttctagctaacgcaataaaactaaagaaggaaatacaaggtacacagactgacaaaaaagaaaatccgaaagaatcagcaacaattaaaaaaaaaacaaaaaaacctcctagaactaacacacaattacagcaaggttgcaggacagaaagttaatacacaaaagtcaactgctttcctacatcctagcaataaactggaatttaacagtgaaaacacacctgcaagccacagctgctgagcctgcgcgctgcactcctgaagcctgtgcacctggagcctgcgctctgcagcaggagaagcctccacagtgaggaggctgcgcactgcgacagaggggcccctgctgccacactaaagaaagcctgcagagagcaatgaagacccagcacagccagaaataaacaaacaaacttttaaatgaaataaaagtaaaagtaaaaccacaataccatttatatcagcgcttaaaaaacaaaataattaaagactcagtcatatatgtataagatttatataaggaaaactataacctctaatgaaagaattcaaagaaaacctaaataattaatagagatattctatgttcatggatataggcctcaatattgttaagatactagtttttcccaacttgatctgtacactgaacccaatttcaaacaaatcccagcaaactattttgtggatattaacaaactgattctaaaattcatatggaaagacaaaagacccagggtagccaacacaacactaaagaaatacaaagttgaggaataacattacctgccttcaagactcactcacttataagaaagacagtatggtaatggtgaaagaagagacacaggtcagtggaaaagaatagagttcagaaataaaaccaatcaaataatcaattttgacaaaagtgcaaagacaattcaatagagaaaagataatcctttcaacaaaaggtgctgtaacaactgggcattcacatagtaaaaaaaaaaaaaaaaaagaagaagaagaaaaagaagaccacacacttttcacaaaacttaactcaaaattaatctcagacctaaatgtgaaacacaaaactataaaacccctatgagatattataggcgaaaaacatgtggcctgggtttgacaatgactttaaacaccaaaagcagatccattaaagaaaaaaactgattaagttggactttattaaaattaaaaacttttgctctgcaagacactgttaagagaaatatacaggccactgatgggaagaaaatatttgcaaaacacttatatgataaaggtctgtatccaaaatctagaactcttaaaattcaaaaataagaaaacaacccacccaatttaaaaacagacaaaagatgtgaatacacatctgtataaggatgaaaactaaacaaatgaaaagatgtcaacatcacatatcattcagtttagctcagccatgtccaactcttcatgaccccatggactgcagcacaccaggcttccctgtccttcaccaacacccgaagagcgctcaaactcatgtccattgagttggtgatgccatctaaccatctcatcctctgtcgtccccttctcctcctgccttcagtctttcccagcatcaggctcttttccagtgagtcagctcttcacatcaggtggccaaagtattggagatttagcatcagtaccttccaatgaatgttcagggttgacttcttttaggattgactggtttgatctccctgctgtccaagggactctcaagaatcttttctggcaccacaattcgaaagcatcaattttttgtcactcagtcttctttatggtccaactctcacattcatacatgactactaaaaaaaccatagctttgactagacggaccgttgtcagcaaagtaatgtctctgctgtttaatatgctgtctaagttggtcatagtttttcttccaaggagcaagcatcttttaatttcatggctgcagtcaccatctgcagtgattttggagcccaagaaaataaagtccctcactgtttccattgttggcccatctatttgctatgaagtgatgggaccagatgtcatgatactagttttctgaatgttgagttttaagccagctttttcactctcctctttcacttgcatcaagaggctctttagttcttcgctttctgccaaagggtggtgtcatttgcgtatctgaggttatttatatttcacatattcagttcagttcagttcagtcactcagtcatgtccaactctttgtgacctcatgaatcgcagcacaccaggcctccctgtccatcaccaactcccggagttcacccaaacccatgtccatcgagtcggtgatgccatccagccatctcatcctcttgtcgtctccttctcctcctacccccaatccctcccagcatcagagtcttttccaatgagtcaactcttcgcatgaggtggccaaactactggagtttcagctttagcatcattccttccaaagaacacccaggactgatctcctttagaatggactggttgggtctccttgcagtccatgggactctcaagagaattacaaattaaaacagtaatgagttatcattacacacgtattaggatggctcaaatgaaaaaaagctgatagtgccaaagagaactaaggattgatttcccacagctggtggaaataccattggcagcgtgatcatattttcccatacgatccagcaatcacactgctaggtatttacccaaataagtttaaaaactaagggaaagggaaacggaagtcgctcagtcatgtccgactcttcgcgaccccatggactgcagcctaccagcctcctctgtccatgggattttccaggcaagagtacgggagtggggtgccatcaccttctgtctaagccaaatcttcacatgaatgattatagcagcttttgctagtaactgccaaaacttgaaagcaatcaatatatgtccttcaatagttgaaaggataaacaacccacggtatatccatacaatggagtatattattcataagtaaaaagaaatgagctatcaagccaggaagagaaatgaaggagtcttaaatgaatgctgctaaactttaaaaattatatgaaaacttggaaaagacaaaaaactttatacagtaataagatcagtttgccataggtttggtgggagaagggaagggatgaacaggtgaagcacaaaggctcactctataacatcaagagtaaaccttaactcatgcatgcacactcagtcacttcagtcatgtccgactctgcgaccctatgggcagtagcccgccaagatcctctgtccatgggattttcccagcaagagaactgggagtcagttgccatttcgtcctccaaaggatcttcccaacccagggatggaaccaacatctcttatgtctcctgcattggcaggcgggttctttaccactatcaccacctgggaagtccctaacacatgcaagtttaaaaaattaggaagttagaggctttcacaaaaaaatgcaaactgtgacaagagaatctaactgtatcacaaatgtatgaaacaacccaactgaaggtaacggggaaaaggcactgacttaagtaactatgtaaataaatgaaagaactatataagactaaaggcagaagggactgtacttgagtactgtactctagttaataaagttgatttctgcaaggtatggataaacaattctgatactgctatacatgtatgctgggactgaacaattaagatgcttggcaaatggttagagccaggtttctaactactgaagtggaatgtacagatcagcaaggggaggaatctggaattatccatgtggtaatggactagagtagacaatatgggtaggaaccaatgtttaatataattactaatggttacatttagaaatatttacaggtatgtgcctatacacaggttcagttcagttcagtcgctcagtcgtgtccgactctttgcaaccccatgaatcgcagtacgccaggcctccctgttcatcaccatctcccggagttcactcagactcatgtccatcgagtcagtgatgccatccagccatctcatcctctctcgtccccttctcctcctgcccccaatccctcccagcatcagaatcttttccaatgagtcaactcttcacatgaggtggccaaagtactggagtttcagctttagcatcattcctttccaaagaaattccaggactgatctccttcagaatggactggttggatctccttgcagtccaagggactctcaagagtcttctccaacaccacagttcaaaagcatcaattcttcggcgctcagccttcttcacagtccaactcttacatccatacatgaccacaggaaaaaccatagccttgactagacggaccttagttggcaaagtaatgtctctgcttttgaatatacacaggctactatacatcaatttatttctttactttgtcagctgagagttactaaaataaacaacaccccagaagcaaggagcatacctaacacccaaatcttagtttctgataccattttccaataaaaggaactagggctccatgaagaaatgggtcaggaaatgcatgagtctggagcatcttatggtgccagaaagtaaagcagtgtttaaaaaaaaaatctgttgatgagggttatgtccaaagggcacaggagccaaataaaaaagcttcaaatagccaaatctggaacaatttgagcaacaaactaatattagattataacccaaagaataaagtaagtacacattaagtacaaagtgatataaattattgaataaattaataaatggccagagggtaatctcccatgcagaattctgaataaattatgtagaaaagctaccctaaaggaggaaagcataattccccactgtatgtgtgggcggtacagtggggtgcatgtagtaatttcctcccaaagactattgtgtggaaaaaagaaaaagaaataactttacagtagagaaacctgacaaacactatctcaaccaggttattcaaagtcaaaatcaacagtgaaaaatcatgataatagtatgtgcataaagtgatgaaaatggaactttacctctttgctttttcttccaaaacaccataactcatctgaatcatgacaaggaaaaaaaaaaaatcacacaaactccaagagaggggccctgcaatatacctgaccagtcctcctcaaactataaaagtcatcaaaaacaaagaaagtctgagaaattgtccagtcaagcttaggagacatgacaattaaatacaatcctgtatgagatcttggaatagaaaaagaatgttaggtaaaaactaaggaaatttgaagattacagtaatgattatgtatcaatgctggatgattaactgtaataaatcaatataatatgtaatttgggcttccctggtggctcagacagtaaagaatccgcctataatgtggcagacccaggttcaatccctgggttgggaagatccactggaggagggtatggcaacccactccagtattcttgcctggagaattctatggagagagaagcctggcgtgcttgcagtccactgggtcacaaagagttggacacgactgagtgactaagtacaatatgtaatttaatgttagttatatgattaataacggtaaaaaatgctagggagtatatttgtaccctgtactatctatctgcttcatattcctgtaaatctaaaactgctccaaaaaataaagtctataatttacttaaaaaaaaaaaggcaaagcaatgacaacatacatattagaaagaaaaataaagcactacttgtttgcagacaagattacatactagaaaacaccaaagactcaatggaaaaaaacactattaatttagtttttaaatatatatatcaaattaaaatacaaaaagtttcagaagccttgaaacttaaaagtaaaaagcagctagaacatataatgggaaaaaatccacttacaacagcaataaaataaaatactaggcataaacttaaaaatgtatgaaaattttttaaaatcctcaaaggcacatatgggtgcttcatggtaaaaaatccacctgccaatgcaagggctcaatccctggctccagatgatcccttggaggaggaaatggcaacccacttcagtattcttgcctggaaaatcacatggacagaggagcctggtgagctacagtccatagggttgcaaagagtcggattcaaccaagcaactgaacatgcaaaaggcatataaagtgagcctaaaataaacttaaaggcgtactgtgtcctcatggagaaggactcatcatcataaagatgtcaattctctctacattaatttatagtttaattacactcaaaaataagaacaagttttttcctgaaactagataataaataaaggtgatacatacagttcaatattaaaaaaaatttttttaatgggcagaagatctaaacagacatttctccaaagacaacatacaggtggccaaaaagcacatgaagatgctcaacatcactaattattagagaaatgcaaaccaaaactataaggaggtgggtcctcacacagatcagaatagccaccatcataaagtctacaaacaataaatgctggagatggtgtggagaaaagggaaccctccaacactgatggtgggaatgtaaactggtacaaccattagagaaaaaagtgcggaggtgccttaaaaaactgaaaacagagaactaccatatgatccagaaatcccactcctgggcatatacccagagaaaaccataatttgaaaagatacatgcaccccgatgttcactgcagcacaatttacaacagccaagacgtgtttgtgcacacggactcagtagtgtcaactctgagaccccatggactgcagctgccaggctctttcatccatgggatttccaggcaagaatactgaagtgggttgccatttcctcctccaggggatcttcccaatgcagggatggaacctgaggtctcgaacacaagacatcttgtgtctcctgtgttgacaggcatgttctttaccagctgagccaccagagacgccaagacatgaaagcaacctaaacaaagtcacaaagtattaaaaaacaaagccataaccttgatgacaaaggactgtataatcaaagcaatggtacttccagtagtcatgtacagacttaagagttggaccataaagaaggctgagtatggaagaattgatgcttttgaactgtagtgctgaagaagactcttaagagttccttggactgcaaagagattaaaccagtcaatcctaaaagaaatcaactctgaaatttactggaaggactgatgctgaagctccaatactttggccacctgatgctaagagccgactcactggaagagaccctgatgctggaaaagactgaaggcaaaaggagaagggggcagcagaggatgaaatggttagatagcgaaccaattcaacaccaattcactaatttgaacaaaccccaggagataatgaaggatagggaagcctggcgtgcttggggtcgcaaagagtctgacatgacttagtgattgaataataacaaatatataagatagataactaataagaagctgctatagcacaggcaacttagtactctgtagtggcctataatgggaaaagaatctaaaaaacaaaaaagagtggatatacgtatatgtatgactgattcactttgctgtacacctgaaatgaacacaacattgtaaatacactccaataaaatttttttaatataagtcaggtgatataattcatagttaataaagtttatataaaaattaagccagtctcaaaaccctgaagaaaaaagaccaacaagggaagaccttattgatgttaaagcagatatgacagggtcaggggtgaagagtgggggtgaggcaggtcatgaagtctctgtgattaaaacagtggaggattttatacacaaatagacattttggaacaaaagagaaattatcaaaataaaaattcagaaaagtcaataaatgatcaaggtagcaccacaagtcagtagggaaaatacgaaattcgtaagtgacaaataactggacagtcatttagaaacaatatgattagatttgcatctcatctgcatacaggttaaatttcaaatggataagaaaacaaaatacaaaaacatgtaagtactagaaaaaaaacacatgcaaatccattacaacctgacactgagaacatccctatatataattcaaaagccagaagaaataaaataaaacctgacaattcaactaagaagaaacacaactttcagaaaggaaaaaatgaaactttccttatttgtagatggcatgatctgtcacatggaaaatcccaaggaatttaccgaaaacaaacgaccaacaaaaaaaacttcccagaacttaagtgagttcagcaatgtcacaggatacaagataaacacacagcagtcaactgcatttctacagtctaacaataaacaagtggaacccaaaattaaaagcacaaaactatttacaatggtttcaaaggaaataaatataacaaaacatgtaaggaacctctctgccctaaaaattataaaatgctaatgaaagaattaaaagcaacctaaataagtggaaagatatatggtatttatggattgaaagactcaacatagtaaagataacataagaaaaaaacaacagaattgtaaaattatataaattacaatcccataaatccaatctacattggaaacagcagtatgaactcaagacacttttttttccttaaaaaaaaaaattcctagctatgtcccctaaaacagtctaaaagaaatgacaatccagtaacaaatgtttctagtttccaactgtgaactctaagcaccattccctcatcagggtatgataaacaaaggacactttgccatactgaaaagcaagaaaataaagattaatgagactgtgtcacaggaacacaggagtggccaggctgaaggggctcccatttgccaaggatggaccaatgtggcaccaaaaagaataactacagaaatttttaaaaacacaatgaatacataaaaatctaaggttcataaatgctttaaaaaaaatcagacacctggaggtattatatcaactcattactctgaaaactggtcattaaaaggaattaagcatttatcttgcttttccaataaaactatttcagagcattagggagaactgtatgcaaaaattcaggtagtaaatgtgaaaggaatgtaagaatcagaaaaattcgatatggataaccattgttagaataagctacttcactaaagttatcactggagattaaaaccattaatgaaaggtggatggaaaactttacaataaagggaccaagctatcacccccagactctgtgtctctgaaagtgatacaaggtacacaggtctttccatagaacttctagtttacacaaaagtatgacagaggaactagtcaaatgttactacaaagaagcaactggacaaattcagaaagtaggagccttttcaggataaatgacagatttcttcaacaaatcaatggatgaaaaaaaaaggtaggagactagtcagaatagttaaaattactcttgaaaataattttaaaaagctataacaacaaatacaaagtgtttggatcctgattcagataaactataagaaggcattttctaacaaacagaaaactgaatataggccaggtatcagatattactgaagaactactgctaaatccattaagtaaaatcacagcggcttcccaggtggctctcggggttaacaatctgcctaccaatgcaggagaaaagggtttgatctctgggttgggaaccctcctgggaggaggaaatggcaacccgctccagtattcttgcctggaaaatcccatggacagaggagtctggaagctatactctatggggtcgcaaaaagtcagacaggactgagcacaccagaatatataatatttgtgggtatttttttttgtttagcctcgtcacattcagcaggcctattcaaactaatgaataacctgaacctttcctgagctcagaaaattttttctttcttaaaaaacttctctatttttcctggtatcattctggacttaccaggtagaaggtgctgggctgttatattaggctgtaggctttcctggtggctcagatggtaatgaatcagcctacaatgcaggagacctgggttcgatccctggctcaggaaggttccttggaaaaggaatgtctacccactccagtattcctgcctggagaactccatggacagaggagtctggtaggctatagttcttggaatcgcaaagagtcagatacaattgatcaaataacactttgactttgcataaaaagtcccacaaggaataaaagctgaaatccactctgagtcccacttaatagtcctgcatcctgatcaaaaagcatcactttctcactaagccatgtattgtgaaaatgagaaaatggactttctggatcaaggctaacctgtatgtctcaaattttaactgttttccttatctttttctttaagttctaggcttaaaatcacttgcagtgtgtatgcctgtaactacaaaacaaacaacaacaacaaaaaagatgtgtatgtacagaactatagaaaaattgtcatttttgtaggagcttcattacaaatcttagtatcttgggccaaggtccaaaagaaaagattgttttgtgatttgggggctcaaaaatttttaaagctccctaagtaatctgatttctgtgttgactatctggtgatgtccatgtgtagagtcttctcttgtgttgttggaagagggtgtttgctatgaccagtgtgttttcttggcaaaactctattagcctttgccccgcttcattccgtactccaaggccaaatttgcctgctactccaggtgtgtttcttgacttccagagatcaaactgccaacatccactggatcactgaataagcaagagagtttcagaaaaacatctatttctgctttattaactatgccaaagcctctgactgtgtggatcacaataaactgtgggaaattctgaaagagatgggaagaccagaccacctcacctgcctcttgagaaatctgtatgcaggtcaggaagcaacagttagaactggacatggaacaatagactggttccaaataggaaaaggagtacatcaaggctgtatattgtcaccctgcttatttaacttatatgcagagtacatcatgagaaatgctgggctggtggaaccacaagctggaatcaagactgccaggagaaatatcaataatctcagatatgcagatgataccactcttatggcagaaagtgaaaaagaactaaagagcctcttgatgaaagtgaaagaggagagtgaacaagttggcttaaagctcaacaatcagaaaactaagatcatggcatctggtcccatcacttcatggcaaacagatagcaaaacagtggaaacagtggctgactttacctttttgggctccaaaatcactgcagatggtgactgcagccatgaaattaaaagaggcttactccttggaaagaaagttatgaccaacctagctagacagcatattaaaaaccagagacattactttgttcaacaaaggtccgtctagtcaaggctatggtttttccagtggtcatgtatggatgtgagaggtggactgtgaagaaagctgagcgccaaagaattgatgcttttgaactgtggtgttggagaagactcttgagagtcccttggactgcaaggagatccaaccagtctgtcttaaaggagatcagttctgggtgttcattggaaggactgatgctgaagctgaaactccaatactttggccacctgatgtgaagagctgactcatttgaaaagaccctgatgctgggaaagattcagggagggaggagacggggataacagaggatgagatggttggatggcatcagtgactcaatggacatgggtttaggtggactccaggagttggtgatggacagggaggccttgcatgctgcagttcatggggtcacagagtcggacacaactgagcgactgaattgaattgaacagtcaaaaatttatgttattcatgcatttctgtacgctttccctacagaattttaaccaatttattataatagtctactgtactgcagggtcgtttataatcactctctatgacttctctgggggggaaaaaagtataaattaaacttttaattttggtcaaatttttaaaagttcttctggacacttatgaatacagtatgtaccaaattaatataaatataatatgcacattgacagataagattaaatgtggggtaaaatggtattaaaaatgattttcaaagatactatgagcagtatttttccatttttttacaattaattcatgtatatacaggtgagtatcactatcagaataaagtgaaactcagcatcaagtcaattttgtagatgtatgtactgaaaatttcacttacacaaacacagggaaaaagaaggaatttctgccagtactgttaattttttgactaccttcagaattatatgtcaaaaatcacatgatgagctatcagtaaaaattactgtttaagatctaccaacaaacaggctgatttagatcttctttttattttgtttaaaaagaaagaattgagagccacctattttacaactaaacttttttttgtcattcaccttctgaacttcaatactaacttttacaacagtcctttgtttggcactctgaagattcttacattctatggaatagatgagaagcatgcctcctttgcaaatgagaaataggatatgggacagctagaagtcttcatgtgcaggcaaatcacctgggtttcttgctaaaaatgcagattatgactcagtaggtctaaggtgcgtctgagattctgcgtttctaacagttcagttgctcagtcatgtctgactctttgcgaccccatgaatcgcagcatgccaggcctccctgtccttcaccaactcccggagttcactcagactcacgtccatcaagtcagtgatgccatccagccatctcatccttggtcgtccccttctcctcctgcccccaatccctcccagcatcaatcttttccagtgagtcaactcttcgcatgaggtggccaaagtactggagtttcagctttagcatcagtccttccaaaaaacaagcacctagtaaaggcaatgtggctgggaagtgggccacactttttagtagcaagggcctaaaccacaggcaggttctcaggcttgtcaatttttaggagagaacagacaataataataaaactcaggaaactgaatccttcaaactatttttgccaacgtaccccctggaaagtctacatgtactcccaagaataagcatgccccaatctgaagactgctactcaaaatcagttactcaaaatcaactaaatcagctactcaaaatcaatgaaaattactggcttttaagagtgctttaaaattttttttagttttactgaaatataactgattttcaatgatgtgtttaatttctgttgtacagcatggtgactcagttatacatgtatttcttttcatattcttttccattatcatttttcacaggatattaaatatatagttccctgtgctacacaggaggatcttcttgttaatcaggtgtttaaatttttaaattttaaaccactgactttagtcacatcacttttctacctaaattatttgatgacaccacattttcaaaaaaataaaatgcaaactcaccaacaagaaaatgggcttcccaaggtggtgctaatagtaaagaatccacccaccaatgcagaagatatgatacagtcccacaaaactctacttttttaaaatgtattatttatttaaataaaatttaaaactctgggcaatgtccaaagaacagacattaaaaaataaaaatcaacacaattactacatcccaagataatcactgttaagacttcagttaatttgtttgcagccttttctatatgactaagcatacaaatatgtgtgtatgtataaagataaactggagcaaaccatttgaaaaggctttttaaatctgttttttatatgccattatacctgaaagattttctctatataattaaaaaatattctaaaacttacttttcaatggcagccaaacagtccatcataatcttaaaaaattattctgttaaatctagtaaatctcaggacaatgtccctctatcaataatattagatatttgctagaggattaatttgcaatccataccttatattttaggtaaatataaacataatcactgcccaaaatgccatggaaaagcaagttagaataccataaaaaattcaaaatatcttactaagtctccttgaaaacactgttaggtagttagaataggaaaaagggagtccaaaatggcggtggctatgcccacaaaaacagaacaaaggaaggtccgaggaccggagtgaggacctcaggtagaacaaacagcactcctggctagcccgatttacacagggcaggcccagggggaggagaaaaaacatataaagagaggcgccaaaggacaggggtctctctctctcctcttcatgtcttttgggtcgtcatgccctcaggcctcgaggatgtagtttcctttattttctaaataaaactgagctgtaacactggtccatccgagagctgtaacgctggccagtccgagggctgtaatgctggtccatcgcttccaatttttgttgtgacgagacagaacccaggaaattacacactccccagacagaatgaaatacaatttagagttttgttttcattatacctaaatttctcaacagagagaggaaagcttcttaaatgcatatgtgataagtgaatgcttatgtcttccaatatgcaaaatcataaaggaagtataaataaatagaggagttcactgaaaagtaatggataggataaatgttagctatttggtagggaatataagccagtgactttggaatactatcagaaaagcttccttcagtatacagtatcttttgtaactgatatatgaaacaaacctgaataagaacaaagattgacttaacacttttaaaaatggtgaatctggagggaaatgtgggcaaggacaccagtccatgtgtgtaatatatggaagaagcacctgaccaatgacccagcctgtatcaagtgccctgtacactgtctgggctaagcctacctccaagcatctttctggctctaatatgctacactaacgccacaagctccaaatgtttacctaatttcccaaagagcaattcctaaatacacacaagggtaaatataaatcctgcattcaaagaatttaaagcatgcttaaataaattgtatctgtacacaaaggaagtcacagctcatctacctctttcaggaagtctccctcaagcccatgtaaacaacagatgcttcattctctgaatctcacttctgatttctgtaacatttactgcttttgtcattcatctgaactcagatgaacttttttgctaccttctactgcactattgaatgtatatatagttcatcaccagaaataaataatattaaattaaatgataaatactctctcataacttcaaagaggcatagttgttactcaggagttaagaggcacctaataatttgtttgttccaaaatattcactggaagaaatgatgctgaagctgaaactccaatattttggccacctgatgcgaagaactgactcatctgaaaagaccctgatgctgagaaagattgagggcaggaggagaagggaatgacacaggataagatggttggacggcatcactgacccgatggacagcagtctgagtaaactccgggggttggtgatagacagggaagcctggcgtgctgcagtccacgggggtcacaaagagtcagacacgactgagctactgaactgaactgaaaaatttgtttatggcacagacagccaaaaatgtgaaaagccataattgtgattcaaatatcacaatgtagcaacaacaataaaaaacacaaagtcttctttaacctgtcacccaaagtagcatttgaggttggagaaaatggagatggtgatagatttcaaagacttaacttttatattttgatatgtgaactttacaatcacctgaaatttgaaaagaaattattctgtcaaacttgacatcattttcagctcttttaaaatttatgcctcagtttgtttaagaattcataaaaaagtttcataaatatctcccattcagtattttacacattaacaaactacaaattttaggggaaaaaataccgattttcaattaacatccccatcatgaactacttaccaaagtatgtgtgaatatatgttatgtctccaagtaagaatgtacactgataagtaggtaagtaacttaaaagatgaagacatggagccaatccacacacatgcattctgaacaaaagtaaaagaagataaaggactagatcaactgtgacagaaagttcttagattaacagacttgaagtcaagcactttgctgtctaattccagatggtcattctccttactgggcttcaactcatatgcactaatcagtctgacaaaatttcaataacaacaacaaaaaaatcaaccaacaatagcttggcagttccttaaacagttaaacacagaattaccatatgaccaaaaaattctactcataggcatttacccaaataaaaacataaaaccaacaaaacacttgcacacaaatttttacagcatcattattcataaaagccaaaacagtgggtacaacctaaatgtctatctactaatgaatggagaaaaatgctgtatatccatacaatagaatattacctgtcataaaaagaatgtagtactgatacattctacatgctacaacattaatgaaccttgaaaacaatatgctaagtgaaagaagccaattacaaagaatacatattatataactttatatgaaatgtccacaatctacagagacaggcaaatctatacagaaagtaaattagtggttgcttaaggataagaaagaagcaggtcataacaaagggtatagttttcttttcgagattatgaaaatgttctaaaattgactacagtgatgttatacatatctctgaactactaaaatccactgaattatactttttaagtagctgaatgcatgggatgcaaattaccaatcccaaaacactgttaagtcaactaactttttatatttcatattgaatacttatattcaaggaattggaggaaatgatccttatcctaaaattaatcaaaatattcataatatattctaaaactattaaaagctattagccaaatcaggctctgtaataaactatgctttaaagttctcaaggtctcattggaaaaactgcctataagaattttaaataaccttaacaataaaaaattcttaaaataccaagatagataagaagctttcttttccaagtccttcaaaacgcaacatcttcagcccaagataatcaatttcacttaaaacattctctgaaattgctaaaaattatgaaaaccatgaaaatttctagcacagatttaaagcttattaaaactaattatttaatatttttttaacatagccagtatatgactccatgtagccccagaataaaactctattaaaagaagaaaagtagtcaaggtgtttagttaattaattcatccatgcacttaataaacactatgctggactactggctcagctggttaagaatccacctgcagtgttggagacctggggtttgattcctggcttgggaagatcccctggggaagggaatggctaccttcagtattctggtctggagaattccatggggtcccaaagagttggacacaactgagtgactttcactcacttactcatgctggactacaatgatggcgggggccgaaatttcacagtccttatggagtttgtggtctaactgggggacagctataaatcaaataattatacaaataaatccataattataaactgtatgaagtgatatatgagaagggtatatatctgtaagaacacatttaactacaggggcagagaagggtgcagagttctttggtgggatgggatcagtcatatattcctatgaaagtgacattccagctgatagctgaataataagtaagagttaggttttgggactcttttgatcacactacttaaaagggaagaaaggggacaatgaaaggaaggggaaaggagacatattcaaggatgcttaaaataatttaacgtttctatttatccaaaacaatatgccttaacaacaaatacactgttgccattgttgttgttgtccgactcttttgccaccccatggactggagcccaccaggcttctcagttcatggggacttcccaggcaagaatactgaaatgggttgccatttccttctccaggggatcttcctgacccagagatgaaacctgtatctcctgcattggcaggtgagttcttatttttcttatttatttacttttattgatagatcattataatagggtttttgccatacatcagtatgaataagccacaggtatacacgtgtcccctccatcctgaaccccctcccatctcccttaccaccctgcccctccaggttgtcagagcactggctgtgggtgcctagcaggtggatcctttaccactgaggtgataaccataataaataccagtcagcttgaagaagtgtgaggatatttttaaagtcttaaatactaacaatatttacaactcaaaaaatttacattggacccaagatctttcttttaaataatgctttcacataaatattcccatgaaagttctaaaaaaataaaaggagataaataatacaaaaatcatattttaggaaaggaaataactataactatatactacgaagcaaggcaaaggctatcagagttttgccaagagaacacaaggtcataacaaacatcctctgccaacaacacaagagacgactctacacacggacatcaccagatggtcaataccaaaatcattgatcatattcttcacaaccaaagatggaaaagctttatacattcagcaaagacaagacccgaagctgatggtgactcagatcatgctcactactgcaaaattcaggcttacactgaagaaaggccatttgggtatgacctaaatcaaaccccttatgattacacagtggaagtgatgaacacattcgtgggattggagctagtagacagagtgcctgtagaactatggacagaggttcataacactatgcaggaggtggtgaccaaaaccccccaaaaagaaatgcaagaaggtaaaatggttgtctgaggcagccttacaaataactgaaaaaagaagagaagcaaaacgcaaaggagaaaaagaaagatatacttaactgaatgtagagtttcagagaacagcaagaagagataagacagcctccttaagtgaacaatgcaaagaaatagaggaaaacaatagaatggggaagactagagatctcttcaagaaaactggagataccaagggaacagttcatgcaaagataggcacaacaaaggatagaaatggacggacgtaacagaagcagaacagattaagagaaggtggcaagaatacagagaactatacaaaaacaggtcttcatgaaccagataaccacaatgctatggtcactcatccagagccagacatgcaggagtgtgaagtcaagtgggtcttaggagacattactatgaaaaaactagtggaggtgatggaattccagctgagctatttcaaatcctaaaagatgatgctgttaaagtgctgcattcaatacatcagcaaatttcgtaaagtcagcaggggccacgggactggaaaaggtcagttttcattccaatcccaaagaaaggcaatgccatagaatgttcaaactaccatacaactgcattcatttcacacgctagcaaggtaatgctcaaaacccttcaagctaggcttcaacagtacctaaactgagaactccagatgtacaagctagatttaggaaaggcagaggaaccagagatcaagttgtcaacattggctggatcatggagagtgctaagtaattctagaaaaacatctacttctgcttcactgactatgttaaagtctttgattgtgtggatcacaacaagctgtggaaaattcttgaagagatgggagtaccagacccaccttacttgtctcctgaaaaacctgtatgcaggtcaagaagcaactgttagaactggacatggaataatggactggtttcaaataggaaagaagtatatcaagactgtatattgtcactctgcttacatgcagagtacatcatgtgaaatgccaggctggatgaatcataagctggaatcaagactgctaggagaaatatcaataacctcagatatgcagatgatacgaccctaatggcagacagtgaagaggaagtaaagaacctcttgatgagggtgaaagagtagagtgaaaaggttggcttaaaactcaacattcaaaaaaggaagatgacagcatccagtcccataaaagggggaaaagtggaagcagggacagattttattttcttgggctccaaaatcaccacagacagtgactgcagccatgaaattaaaagatgcttgctccttggaagaaaagctatgacaaacctagacagcatattaaaaagcagagacgttactttgccaacaaagatccatagtcaaagctatggtttttctagtagtcatggatggatgtgagagttggaccataaagactgagcactgaagaattgatgctttcaaatcgtggtgctgaagaagactctgagcatcccttggacagcaaggagacaaaccagtcagtcctaaaggaaaccaaccctgaattttcttcattggaaggactgttgctgaagctgaagctccaatactctggccacctgatgcaaagtgccaactcactgggaaagaccctgatgctggcaaagatggaaggtgggaggagaagagtgtggcagaggatgagatggttggatggcatcaccaacacaatggacatcagtttgagcaaattctgggagaaagtgtgctccttatggggcatgggttgcaatgagtaggacacaacttagctactgaacaacaacgacaaagattaaaatctcaatttctggacctcagaaacaagtaagtctcaaaagagtcagtaagtatttaaaacagctgctaacaagtaatgttatttacagtccctaaattttcccaccagatattaggaataagtagttaccgtatctaaaggcaaaatgatggaaaacattgagcaaaaatatctggggcccaagtgttaggatagtacattaacataaccatgaagaattcagaagcctacaaaatgtatgtctattctgtaagaaccaaacacaaaaagatttctgcttttggttatgacagaatagcccacagcagaccaacattaccttttataaccagaaaagctgtataaaatataaacaaagttcttaaggtatcagagactttctgaggtagttagggtttgaaataacaaagaacttgttaaaagaagccccagattctgtgcagctttccctctcagggcattccagctatttatttaatggcacagaacagggactgagggacttcctgggtggctcagtggttaagactccatgttccgaatgcaggggacctgggttcaatccctcgtcaaggaactaaatcgcccaggccacaactaaaaattccatgagccacaactaagacccagtgcagccaaataaacaataaatttaaaaaaaatttttttaaagataaggagctgagaagccaagaaaggacagctactaaaggggagaaaagtcagcagaggttttggcatcttcaaggaggtaaggggacaaaacttggtaactggatcttgccaagacgtaccagacttgagggattaagatcctatagaaaaggaaggtataaaagaacaaacctgacaatgtgtactgattttcctcttaaagcatttgtcgattcctaaaacgaaaaaagcagaaagctaaaaagccagcagaaaacaactgaaagcaaggagctcctacttttaagagcctcatgctgttgggaaggcaaaagcagaagaagcctgagaagcacccagtctctcagctgttcctggagggctaccaaagttgtacaagctagatgtttacaaaatctgaacccagcctcaagtcagctcaattccaaactgttgaggtgatctgccactattttatctgcctgccagaagatgagtgaaccttttctagagaaacgctagaacagtatacgcaactaactataatttctaattgtatctaaaattctaaatataatgtctggtagtcaatcaaaagttactcccccaaataatggtaataacaaccaccaagataaaaatgtgtgaagacagaaaatagaaagagacctaaaagtgatccagacagtggagttttcagatagactcttaagcaatttggctgatgtcaagaaaacagaccacaatatggagattttcaccagagaattagaatctatttttttaaaagagggaaaatcaaacgaaaagtctagcactaaaaaaaaaaaaaaatctgaaatcaagaataaaataaatgggatcaaaagcttacaagacatgccagaacagaggactagtgaacctggaacacaggtaagtaaagcctatccagaatgagaaacaaggaggaggaaaaaagatttaaaaaacggaaaaaagcataaaggatatatgggacaagacaaaaggtatagaatggattcaaccaaagtcagagaaggaagaaggaaaaaaagggggtagaaagaatatttgagaaaattagtttggaaatttttttctgaactaatgggagtcatactataaattcaagaggtctcagaaaccccaaacagaataaacacaaataaaaccattcttaggtgctaatactacatttctaaaattaaaatctattggagggaattctctggtgtctcagtggtaaagaatccgcttgccagtgcaggggacacggattcaatccctggtccgggaagatcccacacgccatggagccgctaagcccgtgtgccaccactactgagcctgtgctgtagagctcctgagcgcaggagccacgactactgcaccctgcttgcctcacagccggtgctccacgagaagagaagccgctgaagtgaaacgcctgtgcaccgcaactagagcaaagcccaaacagcaacaaaaacccagcgcagccaaaactaaataaatacaatctctcataattccaaagatgagtaactgaataagtgaaatacagcaaagtcagatcaccagcaacagctgaaatgtatcttatcaacatgtagaacatcccgggatcagccttaaaaaaaaaagttaatgcaaataacagagctatttgcctatctgccaaaaaaggaaagaaaaagtaaacataatactaaacctcctagtatttgatcaagataagaagtattgctacatagaaggaaactgacaatgctcagacaacatcttaataaaaatcacaaagatccaatcctaggagtcagctccacagattcaatctccagttcatgatgcatctcaaacttttcctatatcctggtatctttattttcctaaagttctaagatcaccagactgaaaatcagtcttagaacaatcagtgaatagtaaggttcccaagtcaggccggtactaattttaattttagtttagggaaagggaaagaggagtaggaaaaaaagaaagagcatgacagtccccagtctccaggggagtccaaataactccaaactagggattcacaactcctgggtttcagaagcctacaggattgtaacaaattctcaaatttatatgcacagtaatcactgtctatattccaaacaaataataaatctcaaatctatactatttttcaaatgtatatgattaataaactaaaaatccatttaaaagctaaaataaaggaagatgagagagaagaaaaaagaaatgacaagaagcaatgtcacctttgaattatgtaaccactctctagacatctctaaggacctatctgaccaaaaccacattcttaaccccagattactaaggataataccaaagtaaagccagggtacacagaaacagagtttcctacacaaacagcagaaaaataatctgatatctttaatccaacaattcaacatctcagaactcttcataaatgaattcaagatttgattctataaggcaaaatgccttatgactcctaatggccaaagaacaataaaaacaaacaaactcagggagcctaaacattccaaaatagggggtcaatgaaataaaatgccataaaatcattataacaaatgataatgtaaaagaatatttaataacatgaggaaatatttatcacatattaagaaggaaaaagaatacagaacagcaacagagggacaatatcaaaatggaaaatagatacagacataatggaatatctggaatatcgcagggtgattagctatctctgggtggtgggattgagaataatttaaattttgtttttatgagtctgttttgaaaatattcctcccataactcagggtgggtgttttttggcaatcagaaaaacatattcatttttaaatgtaaaattttaaaatagctgaaataggttcatctctcttctaaaatgcaaatcagtgttatcattttatttactaattttatttacttttcttggctgcgctgagtctttgttgctgcgtgagcttttccctaggtgaggtgagcagggacagtgctctaggtgtggcttctcactgcggcggcttctcctgtcgtggagcacaggcactagcgtgtgccggcttcactagttgtggcacatgggctcagcacagttgcagcatgcaggctcgacagttgtggctcccaggatctagagcacaggctcactacttgtggcacacaggcttagttgctccccagcacgtgggattttcctggatcaggaatcaaactcatgtctgattcgttaccacagagccacccgggaagccctgagataggttcatcttttatcctacatacagttttaaataatgtttgattttaatacaaaagactaagattaaaaaaaggttaacatttcaaaatgtatccaattttactacctaataaagtctttcactatacgtaaacgagaaggatcatcccatattaataaaattacttaacatgtacatatactttcaaaggtcctcccaatttttatataatacattaaaacttaaatgtcaaggtaatatagtatatctaaatatctttccctctctccattctaaccttgctgctaagtcgcctcagtcatgtccgaatctgtgcgaccccatagacaacagcccaccaggctccgccgtccctgggattctccaggcaagaaaactggagtgggttgccatttccttctccaaattctaaccttattgcactttttaatctgtattccctattaggaacatattacagccatgtaaaacactgaagcagctttgataacagaagtcaggaagtccaagatcagtcatatctcctaccctttcaactcttagaagtggacaatttatctttatctctctgaaccccagtttccctagctataaaagagaatgataatatttatcatagagtttttctgaagacgaaaccaaggaaacatgctaagtcctaaacatggtgcctgatcattagggggtactcaggggggtgattactagaggcacacacaaagagtttttaaatctgagaacttgccaagcctcctgaaaactctgaccttgggcaagttacttgacctatatggacctcagtttcctcgtatgcaaaatagatacaatacctatccaccaggtttgcagttaaggatttggtaaaattatatacaaaaatcatcttgcacacagtaggtgctccataaattgtagtatcactattagcaagaacaatacatatctgagtatagagatcagcagtttataaaatatttttacatataagagtgcctctaagaattaaccatcatttaaacagatgcatttttcttaattcccagagtagttgtaaacttcagaaaaaagtaaaacacaagcaaactttttaaacacactgaaaagtcaaaggctacttcattagtttcaaaataaaactgtgttatctataatgcaatctgctttaacatttttgaagtccaaataaaactaaaagggttagaagaaaaatgttccttactgcctttgaaagaaaaagtttaagtctttagaaaaaaaatctaagatctgaatttttctttttttaagaactaaaatgtaagtgcctttaatacaataaccctttcaaatcttctccacctttgtgcaaaagcagaacagctccaaagttaagaccaagcctgactgcctgagttcaaatcctgattctgtacaggagttaaaacttgaccagaggcaaattttaatgtctccatgtctgttgcttcagctgaaaatgaagatttctcacataactgctgtgaggatgaaatgagttaatacacttatgtagtgataagagagcctagcaaaaggaaggcaccttatgttccccattgttgttactgccttattattacccctcaagatgtcttgatcagtgacttataatcaataaatatttgctactctgtagacaatttcattgctagtcgctcaatcatgtccaactgtttgcaaccccatggactgtagtgtccaccaggctcctctgtccatgtaattctcctggcaagaatactagagcgggtagccttgcccttttccagaggattattctctgttggctcagatggtgaagaatccacttgcaatgcaagagaattgggttggacccctgggtcaggaagatcccctgcagaagggaacggctaccaactccagtattcttgcctggagaattccatggacagaggagcccagcaggctatagtccatgcagttgaaaagagtcagacagaactgagtgaacattttcactttttttcagacaatttcaacaaaaggctttacttaaaattagactttaacatgactgtcactgccagtaaaggtacagcaattgctgttaagactttagggccaaagtaagtaaaggcgatcccttccttaagcttcctagcatacagagctacaacttagccttacttgccaatagaagttcagagtcatccttatttgcaattagaagttcaggtatggcatacaccaatccagcagacatgaaactctcaaacccaagatccataatactcaactccttcgaagaaaaagttcagattactcccctattgtaatagtttagtgctttaaaataaaaactatactgcataagtcaacagaatatcataaagactaaaaacacaataaatgaaattgtttgaaagtcaaatatgcactaaatactagtttacgaatatatctgagaaaactgcagtcaatttctcctattacaaatgtctgtgttaactccaaatttattatgctgtccacttcaaatctggggccaggataatgagacaaagtcaaagtcaagttgccatcccactaaatccttgcctgcttgaaacatacacttccctttttattcctaactcagataagacttatgatacccaagtctcaccccatgaacagaaatttaaggagtgaaatcctagaagcagtctaacttgaaaccaggaaaatgttcccagagttattagatcaaacaatgccaaaccatttcccaactctatgtgattctaacttgggtacagaaaaatgatgattaccttcagactcaacaatttggtaagccctgaaaatcagaagtcaagtaccgagggacacatttcaactccagctgagggctggaatgtttacctggttcactctcacattaaaagctggatgtcgttatcaatcagggacacagtcacacagcagccaccaacaggacacacagcccacatcaggccacaggccacttggcatccttcactgagccacatcctactaaaggcctgactgacaacccttgacctggagaacaggacaatgggctggcagtcaagagttcgattcttgcagttatagatctattttttagatttttgactgatttgactagagaaatcacatttgagaaagcgtgaagaacttttgaaatacaggtggcaaacttctgagttatgcttcacatatccagtcactttatttgttcagtaacaaaaaacatatgacttgtaagttgttttgctcataaaatcatttccggacttgtaaaataatggtccagggggacagccagcacttttcttcagggtctgcacagatcttaaaacttcacgaagctcgtttttctatcagtacgtattgataaaactggagttcgatttgctccttctctccaagatgagctaaagctaagtaaatactgaaccaaagtactgtcagcatttcagaagcaatctgctacagaaaaacatacggttttcctgcaattccgtttaacacctaagttggggattcagaccgagcgagtgttggaagtcagattcattaaagtcagacttttttgtctgtatttgagcttctgggctggaaaactggtctgtgtcttcataaatctaagctctgagccatcatataatggaactcttctgttcagaacaaccagccggaaaaggtaccctctgcaaatcctacaatgtatgcccacttgcaaagacttcacaacttttcggccgcctgtgacttctacactcctccggagctaatcgcttctaatgaccaccacctccctcccccacgaagaatcactcttcccagccttacacttcgtcccggcagcaaccgactgaaccttctcccccgtctccggagccctcggcgcccttagacatcttcaccagtttgtccgcggtcccaaccctgagagccccgactcctgccttcacgtccctgagctgcccgcccccaagcccttctcaactaccaaacacggccgcagcatcacctggctccccgctgatctacgcgccccggcgccgccacacacctcgcccctttcaccccgaccttgctctcggaatcctaacccctccccgaggcgggggcgggcaagggctcttggcagcagcactgagacttcggaggccgcgcgtccccctcaccaggccccgcctgggcctctcggcgcggctgccctccacggcccccctgcccgagccgtgcttacgccgaacaatagggcagcacgagcccaggactcggcacttactcgggaaggtaggtggaggagaaggagctccacttgtgtagcgcgtagggcagaagccggcactcgggcgccgcagcaacagccccgccagccgccatcttgtcagcaccgaagcggccgccaccgaccgcccgcctagccgagaggagggaaggggcgtggcctgcacttaaaggggccgcggcccgcctgggcggtcagctctccaggtctcgcgtcgtgagcgctgcgtgaagcagtgagacgcacgagggttggctagtcactctggggggtctccgccgctgaaccgtcctgaatgactgactggcggaagctggcactggagggtgagcacctgacgggctctccggtggggcttgcaaaggaatggcttaaatgacttttcttgaaagctgaggtaagggaaaggccaaaaatattgtgaacagaaataaattgtagttatgggccaggatgggaaaatgagaagaatttggagaagggaccgccagtgagactggaaaccacggctcactgcagtttctaaattctttaaggaaacgcactgaaggaaacgagtggcacagctaacggcccttccttctggagttgtcct

SEQ ID NO: 78 - DNA, 11558 bp, Hippotragus equinus
  source 1..11558: mol_type = genomic DNA
gtaacaaaaaatctgggagcttagctcaggaagtttcagggatcctctaattcctcttcttgatcaggaggtcgtgctcctagatgaccttcaggcctgagaccaaaggctcacccacactttgaggtgaagatgagggcgggtagagggtatcccattacaactgaatttcaagtaaacagcaaataattttttgcactaaaaatatttcatgggacacagttatactaaaatctattcattgcttatctgaaattcaaatgtaactggaaagcctatattttatctggcaatcctacagatgagggatcagcattaaaactaatgattcccctaagatgaaacctgggattaaggaaaaaagaggccacagtgagccgtgacattttgaggagaggaatgaagttggtttctttcacgctaattaagcaatcacaaacgaccccatcagaaatctaaactcgtgattaacatgggactcgagaccaggggggaaaataatgaaaaaggttaagagccagagaagcaatcttcacagaaacggcagccagcagacggagttggtcccaggaaggcaggtaagagcaatgccttttcacctactctttcagaacagaacagggtttggcagattccagtggactcctccagcctccctgatacctggatgtcggcagaattctcctcaatattcacaattctccgacttttaaggatccacaaagtctcctcctaggtcctacctctagactgcccagaagcaaagcagagaaccaggaaaagcagttattcaggctgtaactggctcatgaacagccgtgtctagtcctctgaagaaccacttttcttggctcaggtaggacatttgctgtcccgccactgtttgccaaggctcgaaactggaggtatagatttacagaaaacaacttaatgcagaattcgttttgtgtctgtcattttgaacagagttcatccccacattattcacctgagatgatcagtaaggtcaagtgtgacttctttacaactgggaagcacaaatgacacatgaaatgccccaaggaaagggttcatggggtgaactctccactcccttttcccacttctattcagctgttttaaacgggctcattaatataactctatggggatcagacctatgcagttcacaagaaaaataaaaggaatgaaaaacacacaatagcaaggagagaagagaaatcattgttggtttttaataagcacactctaataatgaccactaaagttcatgagctttttatttgtttgtatcatagtttaaaatttcatattttggggacagtttcctttgttggaaaatgggcttgaaggatgctgtgctgaggcacatgcccattatatcatcatagccttttatttgtccaaggattgatataaaataatacctctggagagaaataactcctcttattaatctgtcttgagccagggaaagtaagcaatgaattaaaatgctttttgtttatttctctacaagtttatggtatagagtcaaattaattctcaaatcacaactcagtttgaaagttttttccttttgtttgtggtttcttctttgaacttagatttcagttggtagaaaggggttaaaaacctgagcaattcccacttgatatctgtgaaagaaacaagtacgagtccttgcagagagagaaaacagagggtttggatgtccttgtcggtcacctagtgagaatgtctttgtgggtgtttttgagatggtaagaacactctggatgcatgaaatgacacctgtgtgtccctgctgctaggtgtcccgtggcctgaccctacaagatgccaagagaagaggttcacttcttctatggttcccccaggaaagggcacagccactcttatgtcaccgctgaagagtaagttcaaaatcagacccagcggggttacagtttgccgtttgctgacacagcctctggcttccaccagcacatgtcggtccgtaaatctctctagtgtttatttctccagaaataaacctggcaatgaggtaaggagaccctgaggtcctacaaaaggtctcaggtttctctgaggccaaagaggcaaagagggagggaaggcaaaaacctggatcttgccatttttgttgcattcttggctatgaggcctttactgtgggttcccaggctgaaaatcctctgtctgagagcatgatgcctctgtcctcaagccttgcctgtctactccacttgggctcccagaggtggtttgcagatagaacagaggcaagttgccaaaggacagtgaggttgaagggcaggtgcgtccctccacctgctgactgagtccaaggtgaagagggtggtcataacctttgcatcaatgctttaccctaaagaaaggtgttttgtattatgaattatttaaaaataagtatttgcatgattaaacatttctaagtgctaagcaatgtataccaactcaagatgctattctctcctttgaaaaaaaatcttacaacctactgggagagttaggcctgggagtaatttcatcaggtatgagtgctgtgatggggacataagccacaggacatactctgcaaggtgagagtgggcaaggggtggtggcggtaggaggggcccctctctcagtggagattccatcaggacaaatgaggaatctgggttttatttggaccatctcttaagtgatctgctcagaacttcctgcaaacctgctgtcttgggagagacctgttgaattgctttactggagtgaactagcaggggcaagagagatggagaacctgtcaaaggcaccgaagaggaattcaggctggagtatttcttcggaagaccctagtgggattctctaatatccctgcatggtcaaatgggatgtggtggtgagatcttctgaaaaaatgtgccaacagcaaaaatatactcttcaggggtacaactgcacatggtattaggtagtatatttttcaggatttgcatgatgactcagcagactctatctctgtgaaaccacagttgagaagttctcagttgaggcggcacaagccacctatggagctcgtgaaaatgcagcttcctaggcactgctgcccaagaggctgactcagtaggtcttggggtcagggacccaggatctgtactttaacatgaatctcaggcaactcccttgcaggaggtatttgggtgacatctgaggagccctgctgggcaacgggttcttatggtacgtctggcacatcccagcatttttggctctcacttcctgtgtgtgagtgcaatgtgactgtggtgtgaggagttcaaacagagctctgtgtgtgtcaagatgcccaagggggtgaccacagacctaggagggagaatgagagcacaggcgtgctgggaatggaatcatctgccttcagtcatgagaacccactgaatgcccttgtaatagctccatttcaggaaggggtgatgcggtcaaaaaggcgctggctgggtacctcaggccagtcgctgtgaatgctggttctgccactctctggctgtgcaaccttgggcattttaccagcctaaagtcttagggatgtcagatgtgaaatgaatgtcatacctacccctgaggattgttgtgacagggccaatagcagggtgctcaccatagtgcttggcagggttgttgtgagaattaaataatctaatgaatacagaatggttatcacggtacccagcttacagcagacattaagtcaaagttaaattctgtttctttttttgtggactgacagctggggaaaatgttttaaactagccctgatggaaagatgactcagtccacagaggggtcagctgccactgcacctgttgcccttgcagcctggccgctggggcccacgacagttagcactgctgctgtggacacacacctgggaggctccgagagatggttctgtctctgtatacgcatgctggaggcccatgggtgcctggtgtggggtggggtggaatactccttggggactgggagatgctgctctgatcgcaaagcccctgtgaagagagaagattgagacacatttcttcacaatctggagcaaggtttccataccaaggtggacttgtctgtctctcgggccagggctgcagggattggcatcctgacagtgattctgggaattctactacttctcagctgctggtactgcagaagacgaagtggttaccgaagcttaaaggtcagtaaagttatcactgctgattctctccagttccaggacctcccttctccttctttctctgaagttctggggagtggaatgacagtctcatgatcacctccagcactgattcatggttctgatgcatctctctctatgctgtacatcttataagtcttcttttgcctctgcccaggcatgaatcccaaccaggaacttggcccatctttctgattccactcacagcaaactcgagggcctgcctatgtagctgattgttttgggggcaagggggaaggcttcgtggtcctcttgtacaattgaacagaagtacatgagacactccaggtcttaccaatccttctggggattcccactggctctgttactccacttagtggcccattcttcttaccctacctcttcacccctttctttccagggttcctgggaattctaagttctctaactctattagcaagcagtccagcatagccaggactcatgtagccatcagtgcaggaaactgttcacccctcagcagcacaaagcaccgccaggtttttaacaggctccttcctcctttgatgctcgatgtggttttattagaatttttgctcctttacccatatgagcaggaagttaacaaatgacaatgtccagtcttggggtaccaggatccttcacaaacaagcaaaatcaacagagtcactaacctgtgaagaccacaggtttcagaaaccttgcttaaaagacaggtagcagtttggaacttaagcatccaaagccattctccacagtgagcaacaggatagaaggagagttgcaatttttctttctcctctctctttattacagatctgaaagcttctggggttgatatatatggggaaaaatttttatctttacaaaagatgttgaaaagtccccttcctcatttagcaacacttcattcagagaaagtggttttgtgatggagaggagggctggtctgggtggagggctagagcctggcagtctgagaagaagttcagtttagttcagttcagtcgctcagtcgtgtccgactctttgtgaccccatgaatcgcagcatgccaggcctccctgtccatcaccaactcctggagttcactcagattcatgtccatcgagtcagtgatgccatccagccatctcatcctctgtcgtccccttctccccctgcccccaatccctaccagcatcagagtcttttccagtgagtcaactcttcgcatgaggtggccaaagtactggagcttcagctttagcatcattccttcaaaatcccagggctgatctccttcagaatggactggttggatctccttgcagtccaagggactctcaagagtcttctccaataccacagttcaaaagcatcaattcttcagcactcagccttcttcacagtccaactctcacatccatacatcaccacaggaaaaaccatagccttgactagacggaccttagtcggcaaagtaatgtctctgcttttgaatatgctatctaggttggtcataacttttcttccaaggagtaagcgtcttttaattttgtggctgcagtcaccatctgcagtgattttggagcccaaaaaaataaagtatgactgtttccactgtttcctcatctatttcccatgaagtgatgggaccggatgccatgattttagttttctgaatgttgagctttaagccaacttttccactctcctctttcactttcatcaagaggctttttagctcctcttcactttctgccataagggtggtgtcatctgcatatctgaggctattgatatttctccccacaatcttgatttcagcttgtgtttcttccagtccagtgtttctcatgatgtactctgcatagaagttaaataagcagggtgaaggggaaggtgaaaatggtagcttcaaattcttctccttgcttgaaagcttgggaagtcccatgtgacccttttcctaatgcccatcttgccatggtgtcccagatataaatcatgaaagggtgaacgtggggagacacaatcaccaagcagcagccctccagtgtggtggcatttatgggaaggagaagttctcgagtctgaataagactccaaccatagcaaagccttgggttgagagggtagggaatataactctttgctctctgctatacacttcatgtgtacctctagaacagggttatgacattgccttgtaatttgttactttttgcttcttccaccccttctctttatcccatttggagctgatgtggagagtattttttattccctttttacttccagagcctagcatgatgcgtggcacacagcaattgtatggcataaggatttggtctcactctgctgttgacttactggtggccttagattttcatttctctgagcctcatttgctctattatacacctagacacagatgacataacatgatgcatgtcactttttatgtaatatatgctttcttctataaataaaaaaattaattctatgtttacatattaaaaagaaaaacaatgattagtcgttcaaggaataaaagctctacaaactcaatatgttggtatccatcccttcagttcagttgctcagtcatgtccgactctttgcaaccccatgaatcgcagcatgccaggcctccctgtccatcaccaattcccggagttcactcaaacttctgtccatcgagtcggtgatgccatccagccatctcatcctctgtcatccccttctcctcctgcccccaatccctcccagcatcaggtcttttccagtgagtcaactctttgcatgaggtggccaaagtattggagtttcagcctcagcctcagtccttccaatgaacacccaggactggtgtcctttaggatggactgcagagtgaaagagttggcttaaagctcaacattcagaaaactaagatcatggcatctggtcccatcacttcatggcaaatagatggggaaacagtggcttactttattttggggggttccaaaatcactgcagatggtcattgcagccatgaaattaaaagacactcactctttggaaggaaagttatgaccaacctagaaagcatattgaaaagcagagacattactttgcaaacaaaggtctgtctagtcaaggctatagtttttccagtagtcatgtatggatgtgagagttggactgtgaagaaagctgagtgccgaagaattgatggtttgaactgtggtattggagaagactcttgagagtcccttggactgcaaggaagactgtccataattgctagcttgatgctacccagacaaaaaagcaacctttctcccctcattctgcttcaacactctcttatcttaaatgtgttcagtgcaagaatgacagtctgagccgtggcctccaacactgaacatttgcctggctgttcaacctgccatcctccactcctccagctctcgaccagtgacttgcagagtttctggaatttttatgagatttaaaaactgtgtttaaattccctggttccatctaatgtttaaaactggagtcatttatttttaaaattaatattaaaatcttgttttgagactttcgtatctactgaaaagccaggctggggaccagcagtctaagaaaagtaggtaaaattatgtaaggtagtgcattaagttctgtatttaattacacagttacctccctgtctctctttggtgattctgttttcattataaaacaaaaacataaatgacgattaatgcgagcttcaggtaccacttttaaccaacttttactaagctttgaaatatgtttatttttccactttcattgaccacagaatggtagaaaggttggttggatgtaaggtctcctaaaatttcttccttgcccaacaattcctcttagacctgaaaaacatcttttgaaaggaaagactgctttttgcagaaatgcgtttctgcaaaaaaatgatttataaggcattggaagttggctttcatatttatgaattttattctttcacttctaagttgaggacatagcacttctgattcttggggaaaaattaaaaaggtctcctgacagctcagtttacactcacatctttcagtgtcatgtttctcaatgtaagtcaggggcccctgcactcaaataacctagggttcttgctaaaatgtagagtctgggaccatctctagtggtgggacctaggaccctgtttgaacacacacacactgaagtttgatcttaatacacagaattggcagtgaactggggaagtgaatcaagctcttaacctatggtaggtgagaatttaaaaaaataaggaataaaatcaataatcaaggtaaagggagagaatgcattaacattaacacaccttgtgctgtgccatgctgtgcttagttgctcaatcatgtctgagtctttgcaacctcaaagactgtagcctgccaggctcctctgtccatggggattctccaggcaagaatactggagtgggttgccatgccctcctccaggggatcttcccaacccaggaatggaacccaggtctcctgcattgcaagcagattctttactctcttagccaccagggaagcccaagaatactggagtggttagcctatccctttcccatgggaacttttcaacccagggattgatccagggtctcctgcatagcaggcagattcttttgctgagctactcaggaagcccattaagcaccttactggaggtatatcactgggagctgtggaggggagcagaacttccttggatcctctcgtcaagattgggatccttgtgcttatatacttccaaaaggtagtgtcaataatgatttcagagtagagtttaggaaaacttctttacagccggcagactctataggtaccagccccaaccatgtctggtctcatccagttgatgatccaaacacttctcctccctgggagacccgtccggatgccattctttcaacccagtaacaccagtaatcaaccgcagtctacaggccagcctgcggaggaggcactgaaccctggcacagccttgctgttccaattccagccgggaccccagagagctgctcatgccctactggtgaatttggttcacagataatgtttgggtctgtaacttaaaaaaacggaattaggtgcaaacatttaaaagtaacattttatgtaaaaatcttaatttctagtttattttttgaaaaaaatcgaaagatctggcaaaacttggcagctatgcagtggtttgtccctttagaagggacacatactccctccttttctgtggccaccccccccgccccgacctcctccttcctctaagggtcagatcgtagcggggtcatgccaggcacaggcaataaggaagtgcgttgcctggagagccctggaccagcagtatcagtatcacttgggaacttgccagaaatgcaaatttatgggcttcaccctatacctactatgtcagaaattctgggtgtgagcccagcaatctgtgtttaacaagccccccaggagacactgctgcattctaaagtttgagaacgactattgtggagaatttaatggtaagaacaactaaaactctgctttttatgatcacaatgtgccagcaatttaaaacaccaccagtaatgaaatactccacttcaaaagaaactgtgcctctgcagtccctgttttggtacgtgtctctgtcttgcacaaactgttgtcattctattctagggatggagagcatcaccccctcaacctatgcaaataaccaaactataagcttttacccaccccttcccccaataattcaaagtgcacagcagcctgaggctgacttgtcattgttgtgatgcgacttggaagctcagcattacaaccacagtatttctatcacaacacaagcattcagtgtttcagatatattgctgtgattatgctgctgctgctgctaagtcgcttcagtagtgtccgactctgtgcgactccatggacggcagcccaccaggctcctccgtccatgggattctccaggcaagagtactggagtggggtgccattgccttctctgtgtcattatggggaaggcagaaatagtgtccctgctatcaagctgttcctatgtttctcctcactgtgaaaccacctcttgcctccctagctctgatctactcctcttgtaatcattctctgagatccagttgtatatttcactcttcttcctttcaaaaatattcattgaccaactaatagatgttaggcacagtatttggtgttttcttgtgctcagtcatgtctgactctttgtgatcccatagactgtagcctgccaggctcctctgtccatgggagttttccagggaagaatactggagtgggttgtcatttcctcctccaagggatcttcccaactccacatcgcctgcactggcaggtggggttctttaccactgagcaacgggggaaggctagttctgagaggtaggtaacattatcttaatattactgatgaaaacactggaattcagagagattaagtgactacctgaggatacactgaggataagtggcagggccaagattaaaactcattcttaaaatgtcagcttctttctccttttctttaatgcactcaattattttttctcacccattgaccttcatgaattcacatttcaggacaaaaacattcatgctggtactcaaagtaccctaacaggaggatgttcacatgagtggcttggtcaacaggacagcaaattgccttttcaagagaacaattgtgaacctgtggtaggttgagatcctgcatcctggtgtttctgtatatgcctacttttaactctaatgaataaaatattgccatttaaaaagcaagggcaatgtgaatatatttaatgctactgactaaaaaatggtttaaatgttaaattttatatggtatattttaccataataaaaagtaaatagtaagattaaaaacaaaggaattcacagaggttttcttaaattgtgtcctctcatatccagagtttcctgggtcaataaagaaacatctacgtgtaaggcccaaaggaagaacttggttctggatacaatgtcctcttgtctcatgttttttagtataattgcctttgtcctgaacatagacataactaacagaggaaaaaagtgcctattattaactgtatagagttgcactgtccaatagttgcactgtagccactagtcacatgcggttattaaaacctgaaatgcagtactttgaattaagacattctggaatacatact

SEQ ID NO: 79 - DNA, 56450 bp, Hippotragus equinus
  source 1..56450: mol_type = genomic DNA
tgaaacggctggatggcatcaccgactcaatggacatgagtttgagcaaactccgggagttggtgatggacagggaggccttacgtgctacagtccatggggtcgcagagtcggacacgactgagcgactgaactgagctcgtagagagggaagcgacggcaggctagaagaaggttcctcagcggctgccctccgctcaacccccgagggcatcctccggtctcttcccgccccgtctacgcgcggatgctgactccgccgactttttcttgactggcgaggtctcgggaccctccccgcggcgtcgatcctggcgctggggcttctcgctccaaagtcccccttacccgccggcgttcccacgcgttagtcggcggctttggggaaggcgccttcctgagcctccaggtcccttctgtgaagccggagtgaacagcagagtaaactgcagagctgggatgggaattaagtcagaaagcgtgcagtccgagggcgagaaatgcccccaggtccctccgcgccgagggcgcaccgcgggggcgcgttacctgcccgactccccaggtgcgggcccggcctgccctccccgccgccgccgccttcctccgccaagctggctgtgggcgaggagcgatggtctctgcccggcgctggcgcctcccgcgcgggcgcccgggtgcctgccccgcccgccgcccgcacccggaggtgctcgccgctcccggagctgggcggggcgggcgcggccctcgtgatccccgcgggcgcccggacctcgccctcccgccgccctgcgccctgcccggcccgatcggcccgcctggcctcagagccccgagccccgacgcccggcccgtcgcctcgctctcgctggcaggactggagggggcaaccccggggtcccggcggccagggccgacacccctgggaacggagtcggtgagttcagggagaaccggggcggtgggcgggtccgcggtgtgaaaacgcccccaacagccccccaggtcccggtccctccagactgatgaggaggacgcgcccagccccctctccatcccaccccccaaccgaaccccaaagccaggcttcacctggagagcctaaccggaggtctgggtccttgggagaccattttgggcaaatcggtggtttccatcagaagtcctgttggcgatggccctgcagacggggctgagcctgcccctccgaggagactaagctgggcaggtcactcgggccgaggctgtttggggagcgactcctaccagagagagagccctggggcgtcctggcatgggaggaggggtcctggattgggggcccctgaaagccccacttgtattggaattttgtttgctgacaggcccccagaccagcccacagggcccgggggacggggctgcaggtgaagggagtcaggtagtggccactggccactggcccctgcccgagccaaaaagtgaagaacgcttcagctgtggcctgccaggctcctctgtccacggggagctccacgcaggaatactggaggggattgccgtgccctcctccaggggaccttcccgacccaccagggattgaacacttgtctctggggtctcctctttacacgagcaccacctgggaaccctgagccagacctgtgtacaaaggccctccggtctcccaagctcagacacctgtgtcctgcgcaccttaaccacttgttgagaagaaccccagtccattttcagttggcctgggacctttacatttttatgtgttttgatttttttccttcttagttacatatttctttctgaaaggctggagtgataaagcgggtggcgaggcccccactggcccactgggtgcaaaggcagcaatgcccatcgccgtgaagcccagggagacggtcaggcttaaagaccatggcagtggagcagtgacgttggcacctgggttcagccactcacatccatcttttaccacctagccctctgccggccactccactaggcctcagcaagacccagctttctcgggcaagagccctgtacctggatctccagggcctcatgccttagaatccaagtaccatgcataggtccctgcgctccccctatgtccaaactccggacgcagtggtaggtgccccgcaggagtgactgaggactgctccaggcgcacagactagcaggcacggggccttattgattgaggcaggagtgactgaaacgttaaggccagctcagggggaggcttgagggttggtgaagaggagccagagccccacaggctactcggaagggtggctttggtgccctcggatggcagcatggtgatggttcatggggccccccgcccctgccatcgggtcagcgttcgggagctgcctgtctcattctttgcagaagcaatctctagaggatgaggccccctcccctgcacccacccaatgacctctccctctaattccgacatcctggcatcacccaaggctggagagggccggaggagtcatggcacagctgcaaacactgagacccgcagaggaaaggggctggtccctactcgtggggccggctggtgcctgaatcaggattggaacccagcccctgaccctcagggcatccttgtcccgcagcatcacctggggctccatccttgctctggagtctgtagccaaggatttcgtgcaagtgtggaaggatgtccgtgtagaagcaaggtttccagcagctccccagggagctgagagagtggagagatggagcaggagggaggcaagcggcagagcctgagctgctggggtgatttcagagcacctgcaggggtggggtgcctccggggtagaaacatgctcatgctgcagctgaggaaggttgaggggttggttgcatgtctgggaagccagccctgcctgcagaagtaaccacacagccccgctctgaggacagcatttgggaagcagccacaaatggttaatgcacagcccccctgcccccagctagcacctgggccttccccctgaatgtgcctgtacctttatcggtaagggtcacccacctgattctgagtcagagcgcattcctgccattgttagcagggcattgaagaggaacttgggcttgctgaaaagtttatcataggcagtgacggctcgttcttgcctttgttcccaggctcagggggcccctccagcccaagttgtgcgtaggaagcacccccacccatatttccccttcatggggtcaaaatatgaactcaaatctttaacagacacagatgagccacggctgaaatgcagtgatctgggttcaggctgcccactttgtaaaaccagttccactgtctctttccaacttactaacttccatgtagtgttctcttttctcccttataacttataaatgacgggggagggctaacagtctcgaagattaacaatgtgattaaatctgagccttgggccaggcacaaattgaaagtattttgttcaggaagctcatgactaggcgttatctacacccaagtggaaccaggggcagatagagcctggggagtctgccctccccagcacgcacaccctgggaggttcccccgggccagggcaggtcagaaccctgtccgctctgtgggtcaggaatgccccgtgttagtagggcatttaggcagacccaggtcaggctctcctcccatgctcccccctggctgtggtggttggagggatacctggtggagaccagggtcttggtgagcaaagtggggagtggtgggagagatgaccgtggctgaaaggctgtcccctccatgaatccagggtccttacgcgtggccgtacctgacagagtatctggtaggaccttctaccacatcccaagggcccccatcaacgtagcagcctgacacaagccagaaaggtgctaacagctcatgtcccaattgccagtgtctttcggtttatgccctttggttgctgaaatcaagcatattctccattctgtttaaggttattttctaaagatagtttttaaaaagctttagcaacctaaatgtccatcaacagagaaatggataaagaaaacgtggtacatgcatacagtggaatattcagttcagttcagccattcagtcatgtccgactctttgcgaccccatggactgcatcacaccaggcctccctgtccatcaccagctcccggagcttgctcaaatgcatgtccattttgtcagcaatgccattcaaccatctcatcctctgttgtccccttctcctcctgccttcagtctttctcagcatcagggtcttttccagtgagtcagttcttcacgtcaggttgccaaagtattggagtttcagctttagcatccatccttccagtgaatattcagggctgatctccttcaggatggactggttggatctccttgcagtccaagggactctcaagagtcttctccaacaccacagttcaaaagcatcagttcttcagtgctcagctttctttatggtccaattctcacatccatacatgactactggaaaaaccatagctttgactagacagacctttgttggttaagtaatggaatattactctgccattaaaacggaaatgccatttgcagcaacatggatggacatggattgtcatactgagcgaagcctgtcagagaaggagaaatatggtatgacattccttacacgtgtaatctaaaaagaaattatacaaatgaatttacaaaacagaagcagactcaaagaaaatgaacctacccttgccctgggaaagaggaggaagggatggatagggagtttgggatggacatgtacacgctgctgtattttaaatggataaccaacaaggacctcctgtagagcaccgggaattctgctcaatgttgtgtggcagcctgggtgggaggggagtttgggggagaagggatgcacgtgtatgtatggctgagtctcggcggttcacctgaaactatcacactgttgattaattggctacaccctaatgaaaaataaaagtgaaaaaaaaaaaaggaaaaaaaactagctagaaccaactgggtccaagatggggaaaaaaaaaaaaactttaaactaccaccgccgcccacccaccatcaccaccaccaccaccaacaaaataaactaacaaaaataattaaaagctttaagcttctgctgcacttcatcagctcactgaatgggaaggctggtcaccgtagtaaagccccgtgtcggggaccacaggctgctgacccctggctgccctgagaacccgcttccctgggaagcatcacctcccagctgcatggcatagcgtccgaggaacggggagggtctgaagtttccagtcactctcccaccaccgcctgctcacccagaagttgggccagagctaaaaacaggcaccggagtaaaagttttcagattatgtctaccccatgaagtaccgacagtccactcttgggttagctacgtgggaaacttgtttttcaagctctgtattacctcattcctggcttcattaagcggagcatcatgaacacacatcagtttccctggtggcttagaccataaaaaatctgcctgcagtgtttgagacctgggtttgatccctgagtcaggaagatcccctggagaggggaatgactacacattccagtattcttgcctggagagtcccatggacagaggcaggctacagtccatgggatgtgggggggtggggcggtcacaagctgttgaacacgactcagagatgaactctcacttaacaactcagggtcacccctggaacctccgagttggtgctgtcatgatgccctggttcccctgaagcactgtcccctggccatctctctctgttcacgtctcagcagcttttgcctggcctcactccaggcaatggcagccagcctgggtgtcttccctaccccatccctggcaggcaccctcctctctggaggtgactccctggtccagtatcaccagtccccaggctgcgatcgattttgctgtctgagccaggaagccaggtgccagccttgttagaaagaagcatcaaacagaagagacaggcttgagaggggcggggggtacgtcctctgggtgtgaagtctccaggcaggggttctgacccctagtgggccattcatccatgggtcatcagtcactgacccactctaagacaggtaagcttgcatggcaagaaaaatatactggtttccttttgttctatttttctccctcacacctctcaagttaagtttcttgaaatgaagcctgaaattgtgacttttcctttaggagaggagagagaatgctgactactcagctgatagtcacggctttcatctgctctgaaaataggatttcaaatgaatgttcttcttatgatagaattttctcaacgacagtaaaaaacgaagatgaataaaccccaggcatccatcaaatgactttttgttccattttttaaagacaaacagaaactatgtgctctggggaagcatcaagagtcagtttgggtttaatgttttcacgtccaaaaatctcagttcaagtgtaaagaaaatagtttgattctgacccatcagggcatcctcttaatacaacattcataacgcagtgcttgagtttggaaatattgagagggtcagtgcaaaaaaaaaagaaaaaagaaattatttttcatctattttaaagcatagtttgacagccacgggatctctgtggccactttcattttaagtggtatctgagtgttactcagaaaatgacactcttcataattaacgtcctgtacagcaagcttgctttctagcacagagcaagtgttgtttgcatttgcacagagatcactttcaggaggtcagcgtcagtgaatggagatgctgctcagaattcagaagcagatttgcgtctttggttggtgtttaaggcttcccagtgaaaccagacagactgggtcccttctccgatgttcctgaaaagcgggtttcagtccttcatgaagacttgctgaagtcacacagagattcttgagctttctgttcccaccaggatcccgtcacccagacagaatctgccccccaaccccgtcccactagaacagagctggactgagtgcagcagtcgtggtctctggccaagggtctgcagtccacctcccgcagaccggggcggggcaccaaaatgtatcccccagtgccagggggaggtcgcagtcatcacgatatatggaatgatgctctgctagctgttagcaggtgggcgtgctgggggaggaggaggcaggtggaggacccctcgaggaccttgtcagaacgcagattctgaatcaggagggcccgggcctgggagtctgcatttctcacagtccgggagatgctgctggtccacggagcgcaccctgagtagcaagaaaggtggtaaagttctgcttctcttggtttgtgatggctgggttttccttcctttgtcctcttgatgtgaattgagatcttgagtgttcagaaagggcacagtgtcatctgacttctgactctgagctgtggggactctacacgtggcttcccttattttgactgtgcatgtttccagacacaggtttgcctgttttcaaaaacgacctaacccaggtccagctcctgggaaattggtgttttctgcgttgtctcttcctctgtgactcagccggcacctgcacgggcttcctgggctgacccctgggccttgtgttactccaggtgtgaccttgaggagcagcagagatggggaagacactggatctctccaagctcacggatgaagaggccaagcacgtctgggaggtggttcaacgggacttcgaccttcgaaggaaagaagaggaaagactagagtaagtgtgtgtggcgggacccttgcagtgtggtcccagcatcctctggaggggctggccccttgggggtctctgggcaggcagacgacaataactcagtggaggacactggatgaaagtcacgggctttctgacgtccgttccgccttaattaaaacaaggagctctgagttccctcctgatggtcagacgttccctgaatagttttatttcaacttgatccagcgccagggtgacattctctgctaatgctaagcccacaaccttgcatgaataaaggtgatgaagagggaaggtcttgatgctgatctgcaacacccaggagccaggatcaagggctttcaggacaaaagccccagcagagctggggtgccccatcctcaccgtggaggccccgcaccatcttgcaggccgctcccatgggctgagctaaagcccccttggtgttatatgttcttcctctgctttgcttcttcctccgccaaacctccaaggcttagctgcctcccgggctcctttgttgcctgggggtattttgtgggttggcaggcctattgcaaaggagacattaagtgaagactcaaggcgggtgggaagtggccatgggaaaggcctgaaaggctcctgccgtggttgagggcagagaggaggtcagagctggggtgaggtgcaggcaatcacgaggccgagggtccagcaggacgtggactggctgttctctgtgtggctgcaggccttcaggcgagggagtaagaagacccagattctgctctgcagccggcaggctactgagaagcggtcagatgagctatcaagggggagccagaaagtttgctgaagggctggctgtggggccttgattttaggggcagtgttgaggtcacggatgactccagagtcagggcctgagtaactgtgggtttggaggggttctcacctcacgcggggaagctgagggcggagcaagtatggagggaaccagaacacagatctgtggacactgggtggtctgttagacacgaagtggacggggcggccccacacacaccagatgggagcccaacgagacaggactgtgggagtgtccacctacagaggccgtggctgctgtaatcacgccaaaccccacggcctaaagcaagcacacagctctctgctgagcctggagctcgggagtcaaggtgttgacaagctgtccagtgaaacaagttcagtggagcccagcatcccctggtgacggtggggaggggtctggggcagcaccaggaggcttcttgctgcctctctgcgcagccctcctcccctctgctctgtcctgggctgcaggtcacccccagcgttttcattacgaagcagctttcaccccactggtgtctggagccctgactcccatcagttgctgccacccaggaccagggcccagagccagccttggacatcgtcccggtgctgactggggcaggcgcccgccttgcctcgggtctcctgtctttgcctcagcctgaggctgcgcccggggtcagagccacacgctcttagtgacggagcccgcctggtctttcctgtctggggatcacagcccctccaagcagcccagctgttgtcactcttatttttaatggcagctcagaccctcccattccacgcctttatagaagcacagattgattgagggcgggggatcccagttctccagggagacctctgagggcgtcagcccctccctctgtccaggcagaccccaggtagttttgcagaaattcctgcttcttgcctacagggagcactgcaccctcctgacccccatcactctatttgccatatttcctgtcgtcatttcaggttacaaaggggagacacaccctggtagcctccagttactgctagaaaggaagtctccaaaggatcccactggtgacaccccctctcctgggggcgcccgtggatcaggtcaggtccctggtcagtcatttaaggtcagggtgacatccttgttcagaagtccccgaagccttctgctcagaatttagtgtcttcttggccagacatgtgacagttagggatgagcttgttaaatacaacagcgcaggacgtggtccctggaagtgtccgcatgcagagaggtggtggttgggagaatccacgccagagccaaggcgaggatactgaagccccagaagtgctcctgtgttagctcctcctgtgcgcaccggcccgctggtgatgcgcttggaagagataagccgtggggctgagcgaagggcgttcgcggaaacacggatgtgcttgtctcttgctgggtgttgttggttatccgtgcagcaagaggtgaagccacctctgcctatgacaagccttttccccagtgtccccctgacccctgggagcaagacccaggcatgtggtcatgcggctccatgagactagagcccacgggttcatgttccactcaggtggggctgagacttaggaagggcacagctcagaatacagactatttggcgtttggacactgacattggttctgtagagtgcattagctaaaataccagcagtctgttatgaaactgaagacattttaaaaatcataaacctccttcttcctggcctcatctcaatgttaatctgcatttaaccagtttcaatgttaaccatccatttcctgcaaccacaatatcccagtctctgtagcacactggagtttctgcacggtcccttggggtcctcatggactctcccagttcctgggtctctagtctctgaatcacaactgcctgcatgtaggcactggccctcagctgagcactgagcaggggcctgtaataaacgagcagctcaggggttgttcaggtgagcagggtttttttaattgttattgaaatgtagttgatttacaaggctgtgttagtttcagatgtacagcaatcagatgagtttgtgatgtctttgacacactccaaaagagaggccaaatggatgggccagctcaaaaccttaccaaggtcattgagagaacaaagtcaatagaggggaaaaaactgtgaaaccaagaaccaaacatattcattactttgaaagaactttcccaccctgaatacacatcagatggacacaatgtgtgcgctcaaggtcggtcaccagccgcaaggtcgatttactgagagacgattcacaaaatataccaattaggaaacaatcaaacaaaaacgcattccatttcatatttacagagtgaacagaagtgtgtgttagctgggttgctgttcggtttttctccccaagtgggagcaccccctgtaaaggatactggggcagggcctgggcgaagggtccagcaccctcttccaacgtggtgggagggaccagcactttgacttctgtcaaagtgagtgacctgtgagctggcccaggccctgacccaatgcccagtgcccggtagaccatccccacaacatgaaagcctctgacccctcggccaggcctgacctcctgccgtttgtgggggacacttgcggccctgtggggaagacagatgccagccggtgttgaagggcacaggctggagcatcttggtctgtgttcgctgtgagcctcctaacaagatgtcccgcatagaacccatttgttccagggaccaccaggcctgctggtagacctctcggacagctcccctccaaactgaccaggaggatgtccctggaaggctagctcctgagggaaagaggccgtgtggagcttccaaacagctttccttgcagactgttttgggaatttaaggaggaaggggggccgtatagcctctgctttagccccaagcagatataatgtctccctgaagttggcttatgcgaccagcgactggagagtgtatttactgtgtggagtgtgatgttattctcggcttcccctcagaacacagggctgcactccagaggaccccaaaccccaaaatgcacagaaaccattaggcagctcatcaagccttcactcccctccaagaccccaggccttggcatgacctcgcctgcttcttcacagaagcctcgaggctgccaggcatcgcctcccccatccctgcacttgccgtattcacagccaccctgtcttgcctctccgggtcctcgcctccgagtacctcgcctccgggtcctgtggacctttccgctgctcccagctcctggagctgcctcagctactccctttctgtcctctggcttccgcttggaatgtcagtagggtctagcaccacattgaaacaaagcaaaagcaagaacaaacaaacaaaaacacagaaagcctttcctttggccccagcgccctgccacgtgctggcacatcttgctccctgaacttaaatgatccaagcgctgcacgtccttccatctgcctcctgttccactggtctgtctttgcagctgcgcctcggggcccagtcgaagccccttctcagcccctagttttccctgaccttggactctgccctcctcaccgatcccgtgtctgtaactgacgtgttccttttcccacaccttcctggcttttctctgtggttactttgaaggcccctcttccttcttctggtgcattaaaggaataagttgcctaagacatgtcttctcaaagtccatgacagcatctgggccccttcagatctttaatctttcacatacccataggacacagaattcctacactgtttaaactgcttcagaccaggaaaaaaaaaaaatgttcattaggctcactctgatatcctatattaacaaagataaaggaggaaaaatacagctcagttaaatcaccattttaggatgcctaaggctgtaatggaagccactagccgcatgtgtctatttaacttaattgaatacaatttaaaaatcagttcttctgtctcattagtcatatgtcaagttttcagtagccacacacatggatggtggctgccacactggaccaacaaatatggaacatttccatcatcactgaaattgtattggacatcacaggctaaggagacaaaacttatgcttatctcagtactgtggaagaatgtttgatagcacactatttttgatgatttttttaagtaataaaattgaaattaaaggatacttttttaacatgatgaaaaaaatgcttcaaacaatagccatcatgatatattaatgttagaaacaagaatttctttcgttgccacttatcatgaccaatttagcatgttctattagtgctgctgctgctgctgttgctgctaagtcgcttcagtcatatccgactctgtgcgaccccatagacggcagcccaccaggctcccctgtccctgggattctccaggcaagaacactggagtggggtgccattgccttctccatctattagtgctagccagtgcaattagagaaagtaacaaaataagcagtataccagtggacagggaaatccaaaactattacctgcagaagattaaaaactaagatagttacctacaaaaaaaaattttttaagggagaatttagtagtctagctatataagatacaagaatataaaagaaaattgccagggtccagcccccgcgggatccaggggaacccgaaggagaaacggtgctggcaaatgaatgaatgaatgagagaggaatagaggagagaaagaggctgatattccttggttaacacagaaagccaataaagccccgagacaaggagcttgccctgttcacggaggccacaggtgccctcccagtctcccaagggaatgaagacacagaacatcttcccgttcaggtcttagaaacccgggcagataagtgaacgcagggagcctttatgctctaagggatcagcctgaaaaagagagtaagagaaagaaaaaaaagacacgggatgaccaagctttttcgagcaaggccccttactttattttcaaaagggacttttatacctcaacttgtacatagagggaaatgaaagatgcaaggttatacagagtcagcccaaacattccagcagttttgcccttatcgaaaccaggattttttctgcaaacctttcccacaaatgatgttgtgtacattatcttctggccttgaaggcctgtgaacattttatgaccctcttttgataaaggctgctcaaccagaaaacttattttccctcaaagtgttttttctttatatttctaatctatgtcagcctcagaaaatgctaaacagagttacatttctcacagagcaaaggtgcagtgagttacaagaaagaaccaattagctcaaaggtctggtgtggttaaattcaaggctacatttgtttttcttacattccaactatgctaactaatacactcccaggtacacagtggataagagatatgggaacttagcaacaagcactggcccaagaatgaaatcctacaccagcactactctagtaacttttaactctttgaaaggctctgtgttttaggcttcccgggcctctcacagttgggaggctgtgaacaattatatgtgtagctgcaagagtctggatagacctgccaagcaagctagaatgccaacagaggggggtttgaattgaaatattcctctcatgtccaggagacttattagttagagccctaagttgattttctccagagaaaggtggtcggggatagccccctattaatgtcaggagagttggtgaaaggctcaaaatagtaagacagattctggtttgggggtagatgctcgagctggtctagggagcccctcgagtcctgaagccttgcttaacagttctcttccacatgaccttgtcatggatgggatggcccgtgctggctcccggcagaaaaccagtgtcccctttgtagacatcagaggtaaccaattagaatgtacatagaaaaatcctatttataaaaaagaaaaaatgaagtacctaaggaggaaggggaaggtgaggtgaattgggagattagctttgatataaacacactcccatgtataaaatcgacagctagtgagatcctgctgaatagcacaggtagctgagttcgatgttctatgataacatacatgggggagtgcgtggggcgtctaagagggaggcgctctgtgtatacatacggctgactcacttcattgcacagcagagaccaacagaacacaaagaactataaagaaattatactccaataaaaaaagaaacatgtcatagccatataaagaatagtgtaaggcatcactaaacaacataccaaaactgtacatggtgacaaatggcatcgcatcctctgtatgggaagaatgctgcaatgacgttggctcttgaggaattagtgtcaaattcctaaggcatttgggagaatatgaaaaaaaaaaacattataggaaatgaagacgtaagacacagcaatttaaataagactaataatcagcagggccgcattccaggagataacaaaaagtatttaatgctgcattaattagcataacatgggcctttcacagatggaagtaatcagtgaaccaacgtgaaagttctaaaatgcgaccaagcgtgggtaacactttccagtacagtggcagcatttcatatcagtgagaaagggaaggattaattaaagctgagtgtcgggacagttgaccatgagtgcaagactgggggagggagtgtgacttaagttcaatttctaattgatatattaaaaatgtaaagcatgaaactatggaagttactggaagaaaatatagataaacatgtacctaatcttgaggtggaaaaccctacatgtgacaagacaggtaaaaatcacagcacaacatatcgataagtattgactaaatatgtacctctgaatttaaaaagacaatgtttaatttttttttaattagaagaaagttataacagaaatggcaatgagttatatctttgacctataaagaaagtcttaaaattggaatgataaagaagtttccaaattagaaaaacacagaaacccccaggtttaaaaaggaaaggggtaaatgagaatgcatgggtgactcatgtcgctgggtgaggacccgaattttcctacatggaacactcttttcaagggcacagcccacaagtcaaatattaggctgtgaaccatccccagaaaggcaaacaggtggtgatgtggatttgtaatctttgcaaacaaacccaaatgcctgagattatccatgaaagatctcctggtgtgaggcatggcttgcaaaccatgacttgctttaaaaataaataaataacgaggaatttgaagtcgccctttgctgggccacttagcaccactgacagacaactccagggctgaaaacacagaagctaaaccaggaagtcagctgccagcaaagcctggagattaactttggtctgagatcacttgcgagatttcggtgaggctccctcccagcagtctgtcgttcacacatcactatataattcctctttatccttttttccatcatttgctcactctgctcagaagagttcaaagaactttgctgctgttcagtcactaagtcgtgtctgactctttgcaagctcatggactgcagcactccaggctcctctgtcccccacatgtcctggagttgctcaaactcatgtgcattgagtcagtgatgccatccaaccatctcatcatctgctgccccttctcctcctgccttcaatctttctcagcatcatggtcctttccaatgagtcagctctttgcactgggtgaccaaaatgttggagcttcagcttcagcatgagtccctcaatggatattcagggtaggtttcctttaggattaactggtttaatctccttgctgtccaagggcctcttaagagtcttctccagcacctcagtttgaaagcatcaactcttccgggctcaaccttatttatggtccaactctcacatccatacaagactgctggaaaaaccactgaacctcagcaagtttccatttccctcattataattcctgacacttatttgtatagtcaggaccttggatcatgtactttcttttgatccttactgcttgaagcttgtcctctttcagcaattctctctgacacttatgtttcatttggttgacgtacttttaatactattgtccctcagttctgtgtcccattggttctttcgcactctttcttaagggtcatactagagattcgattttctcaggaaggacagggggtaggaagttcatacttgaaatctctcggttgggagtaagatctctgcttacacactttcccctctgaaacctggaagaataacaaacccccaaacgtgcccatttcctaatcccccaatctatgagtatgttgggctatgtggcaaaggggaataaaaatttcaggtgcaataaaacctgctagtcaggggcctggatgtggggggacaatcgggttaaccgagtaggtcagtgtgatcacaaggagcctgataaataaaaggaagggggagacaggacagtgtataagtgtcatttattgtgagaaggactcaacctaccactgctgactctgaagatggaagaagagccgtgagccagagaatgcaggtgccttctagaagctggagaaaacaagggaccagaccttcccccagagcctccagggaggctcacactcctgccaacaccttgattttaggtgccatctagaactttcatagctagagaggagaagtcaatgcctggcttcaaagtgccaaaggtcaagctgaccctcttttaggggctaatgcagctgatgcctttaagttgaagccagtgctcatttaccgttgtgaaaatcccaaggccctgaacaactgccagatccactgtgcctgtgttctataaacggagcagcagagcctggatggacagcgcatctgtttacagtatggttcactggatattttaagctcactgatgagacccactgctcagaaaaagattcctttcaaaatattactagtcactgacaatgggaaacatcccccaagagctcttatggagatgaacagtgatattaatagagttttcatactttataacacacatccaccctgcagcccatggttcaaggaggaatgttgactttcaacattcttagtctttaagaaatcttttttcaggaggctgtagctgctgtagatagtgattcctcagatagatctggggaaaacaaatggaaaaccttttggaagagacttgtcattctaaatgctttgaagaacacctgtgattcatgggaagaggtcaaagtatcaacattagcaggtgaaagaagttgattccagccctcacaggtggctttaaggagttcaagacttcaatgcaggaaatcacggcagatgtgatggaagtatcaagaaaactagaatgagaggtgaagcctaagatgtgagggaattgatgcaatctcatggtccaacttaaacagatgaaaagttgcttcttacgaatgagccaagaaagtggtttcttgagataggtctatcctggtgaagatggtgtgaaggttgttaaaatgattttttaaaaaagcatttagaatattcacaaacttggttggcaaagcaaaaacagaatttgagagaattaactccagttttgaaagaagttctactgtgggtaaattgctgtcaaatagcattgcgtgctacaaaaaaatctgtccgtgaaaggaagagtcaatccacagagcagacttcattgtcttattttaagaagctgccaccccggccttcagcaactacttccctgatcagtcagcaaacatcaacacagagctgtccccccaccgtcagacagaacatgactcagaagatggttaacgatttataacgcttaagtgctttaaagtgtgtgcatcgttttttcagccataatgctgttgcatacctactagacctcagtatagtgtaaacgtaacttttatttacactgggaaaccaagaaattcctgtgactcactttattgcaatactcactttattgtggtggtctggtccaaacccacagtaactccgaggtgtgcctgaattaccgccagatgtttgcccttctctgccctatcttctctccgcactcctgtctcttcagccctgtcctctgcattcaggagagtaaacgtgtggctcaaaataagtggttctcaagcattttgccctgagggacctgttagattcttaaatttctgaaaactccaaagaggttttgcttccctgggttatatctgtctatacttacccatcaaaaattgaaactgggcatttaaaaagtagttgttcatttatttaaatgaacagtagcccccttataacttaataaaaattttatgaaaaataaattttcccaaaacaaaaacataaatgaggacaatggcattgttctgtgttttttgaaaaccccttccatgtctggcttgattggagatgactgaattctgatatttcctctgcactcagggtgttgtaatgtgttgttgaagaaaatcggacttcatacagatgtagtagggaaaagaaggaggagcctttccagatgattatgggtgttgtgttctgacaatacatgaaaactctgtgactggtagtttcttgaagctgtaatgtggaatctgaaaccatgtcaatgaactttcccttccccgtgacattaaaatccgctggtctatgtcgcacgtggaatggttcttctatccgcatgtgctttggtgacacctgtgcagacttccccgatgtcagtacatttcattatacataatcaaagcaatcacattcatcatcattactgctgatctcatcagaaacctctctgtgacagaaaactctgaagctcagggcagcagagacataaaagttttccaaaagccttctctgagcttgaaagcctggattttgtcaccagcaactaataccatcacttgacatactctttaattaattaattagataattttgggctgtgctgggtctttgttgctgcatgcaggctttttccagttgcagtgagcatcggttattcttcactgctgtgtgagagcttctcattacgatggcttctctcgttgtggaactctagggccagtccatcctaaaggaaatcatccctgaatattcattagaaggactgatgttgaagctgaagctccaacaatactttggccacgtgatgtgaagacccgactcattggaaaagactctgatgttgggacacatggagggcatgaggagaagggggtgacagaggatgagatggttggatggcatcaccgacttaatggacatgagtttgagcgagctctggaaaatggtgaaggacagggaagcctgacatgctgcagcccgtggggttgcagagagtccgacacgactgagcgactgaacagggcaggcggcttcagcagctgcagctcacagctcagtagttgtcgcacgtgggcttagtggcctggtggcatgtggggtcttcacggacccgggaagaacccgtgtcccctgcattggcaggcaaggcggattcttaaccactggaccagcaaggaagtcccacttgacatgctttcaatcagagacacttcataagccatgctttcctttcctttctgagagcagaggtacagtctgttcctctggctggatctgttccgagagcccagagctttcacccaccactacttttgcactgccagtgcaggggcccaagagcaggaaagacaaactttagtgttattatgaaaagacttttgacattgtggcccctgtcgaggggtctagggtacccctggcggcccctggaccacactttgagaaccgctattctgaatcactgggcttgacgttctgcccattcccctcctcatcaccagcttcggttcctttccatcttcactttagcccagtcttctccatcccagcggatgtggtctgtggtctgtggtctttctggaccaccatctcagcctggcttctccttacctcctgctcctccccttatgcccactcagcacagcacacaggtggcttcaagccttcctctgtttctggtggtacatctcatccaggcatctgtgttcctaaaggtgaccttgacctgcagcttcatgtcgggcctttgcctactgaagcgtgtgtagtgcagggacatctggtcaaccccatgtttgctgtcggcaggctgtggatgtctctggcccctcagattctccaggttggtggatatgctctgtggctggccagcatctggtgctggaccaacatagggtccccgtcttcctgccctcctgttctccagctgtgaagaagagaagttatgttttaaagagtctaaagcagagtatctttatctgttccccccaaattcaacacctgaaatacatccacctcctctggactctgtgagctcttatttaagaggacctcatgccctgcacttttgcatcctgagatgcccctgcctccctatatcctcatctcttttcccaggaggtctgactctacctgggatggagaatgaggacacttatggagagaagctggacaaggccctgcccagccacggggtggcctctaggttctctggctgaggtagagacagcaagagtggagctgaagactaggcccttccccggccaggtgctccgcggggccaggtgggaagcctgaggcagacgctttctttgccttgtcaaggcagttttatctagactggcagtgaataatcgtttcaggttcctgctacctctagactgtgtttcttggcttgggggccaagagtcttattttgcgtctgtcttcatgcctactttagtgcacagccaggagagggaagtcagcgcagcgcagccaaagcctagcttgatcaggaggttccccgagctccgtagaatcactgccttgtcttagacccccaccctgctctggggcgtccccatcagaagccacagtttctgcggagttctctggagacaatggcatctagtgtctggctagtttctgtcgctaagaatggattaatttgatctcatctaaaactaaaaatattacatttggcagacattctctgcagccagaacaagagcagtgtgttcattgttgggggcacattttccagtcagtttcacttggcaagttcaccaggaagctgcgattgaacacttgctggtgtgaagaactagttttcccgggactcttcagtcttattctggaaaaccaacttggggagtcagctcaacctgctccaggaggaaatactgtctgactttgcccttaggactctctgtgtagcctttttagggaggttattcggacaactcagacagtaaagaatctgcctacagtgcaggagacctgggttcgatctctgggttgggaagacccccggagaagggaatggcaactcactccagtatcctcacccagagaatcccagggacagaggagcctggcgggctacagtccatgggtcgcaaagagtcagacacgaccgagggactgagcacatccaggcagcagtgggaccactgtgattctgaaccttaatggctcccttcacctggtctgggttgagcttctcaactctcacaatgagatcccgacctgacctccacttacctagtattgtccccagctcagcaccatttgctcaggccagggaggcagagcgggtgtggccggccgggccctggagaaggcagcatcaccccgacatccggatgaggcttctcgccctctcctgctgctgttccgaccagaccagggcctcctggatttcctgtcttctctaacctcctcctctgtttattcatttggctgtgctgggtctcagtggtagcatgggggatcttcatttgcagcactcggaatctttagttagagcatgtaaactcttagttgcagcctatgggatctaatttttcttaaacaatggaaccgggcaacagatttactctagatgaccgtgtggcctgacaagggtgcacccctccagggtccccccagccccatgtctgctagtttcttggagccaccaaccccacctggtctgagggagcttggaccctgggtcctagtggccatgggtccatgcttgtccagctgcacagggtgcctgggcagagcctgcaggctgtgggctttgcatcagaaaatctctgggctcagggtcagagctggggaatgaacctgggctccaggacctctgtccatcctcctcccgttacactgagtcacgtgagattgtgcgggctgtggtgggtgtccccctccagtgaggctgaatctgtatcgtttgccccctttggcaatgaaagaaagtcatgggcatactgcctgggaaaatgtaacctcatagagagtcacagaagtgctgaaatgcaatttcacatctatgaatgtagcaggtttcgattccagcctacctggatggcacgtgtttgaacccagcctgctggtcttccctggagtgggatggggtggtgctgtggacataaggcctgtctatagcaccattacctgactttggggtcactgttgtctgaatctctgaatttgatagctctgtgtgtgcgtgtgtgcacatttaaagcttgttgcaaaaacaaggggtccaatattttcttgtttccaataaagggggttgaagggcaagattaagaaggaaaactccaagagggagctgctttcagacacggcccacctgaataacacccactgcgcccactgcctgcagccctaccggctccttgagacccccaagaggcaatgcctggactgccacctcttcacttgcagaggctgtggccacccccacccagaggaggaaggctggctctgtgatccctgccacctggccaggtgagtgggatctcgagggcggagggtcctgcagatggggggcttggcctgtcccttccagggactcgtgtgtctgtgtgttgtgtgtgtgtgtgtgtgtgtgtgtgtgtgtgtgcacgcgcgcatgcgtgcaccccccagggcaaggcgtgagcctgagctccgtgtccccgcctgcagggtcgtgaagatgggctcactggagtggtactatgggcacgtaagagcccgcttcaagcgcttcgggagtgcccaggtggtccggtccctctgtgggcggctgcagagagcaggtaaggagtgggcctcctccccaggtgtccgatttggcacctagactctgtattttcagtaaacatttcccgttgagtctgatgataatcaagacttgaagagatgggttataactcaatcagtggctttcatattttggatccaagtatttattccatgaagaacttgaaatccagactggtcttacactcagcgtgtgttcacctgtgtggtccaccttgaggccatttgggtagacgaatatttcagggaaggctctgaggttgcctgaacttgggagttcctcctgaacttgaatggggagaactgagagttgttttcaggaagcactagcctgtcagcctgtcccctgagccccaggctctgccattacacctggccaggcatccaggctacgagagctattaggccactgtctgggggctcagcatcttgactgtctctcctgggggaccaaggccagtgccctcgggtctggagcccctgtaggtccagagaaggtgccatgctcctgagattgagggtgtcctcactgtgccccagcctggccatctgccctgggccttctggggaggggccaccttgtgtcttgtgccccttcaagccccaattaatgggaggatgcagaagctgggcgtggccacccccagggcatttgcacacgcactgggcctggcacgggtttcagaggggtctcagcacacccttgtgtgtttttaatggacttgttcatagttctttggcttcccagggtcttagttgtggcacttggggtcttaggcctttgcagcacacggggtcttcagtggcaccatctgaacccttagttgcagcatgagggatctagttccctgaccagagatcgaacccaggcccctgcattgggaacttggagtcagccgactggaccgccagggcagtcccttaggacactgttgaatttagcacagaccacccagaggcaccctcacctgtaaaggctcttagcacctggaggaacagaccaccgccgggctgagggaccttccctgggtgggggctgtgggcgcatgtgttaaaccaaaaccaagacacttttaagagtaaagaggtcctcctgagaaccgcgctgagacagccagcctcactaggggtgccccggggacacggggaggcactgtcaccctattcttgggggggttccccacctcctccctgggctgcttctccgtgacccatatctctatctcggccggagcttatcagtaaatccccgtgctggctcgggcagccagcagccagccagccgaggggtcttcctgcagcaggagtgtggtccagcccccctgcgcagggctcaggcgtgggaaccacaggcaaggtggaaaaagccattctgcggagcatctgagaatctcaagtcccggctcgcggtgggaaaccacacccacatcacaaccctgaggacctgggccttgccccggtgtggggggcgcttgtttctagagacccgagtgggttcaggaatccgccttaggtaaaaagccaggaggattctgacggcccagccagggcccggagctgcgggatccggtaccaccagcaacctcccgtttccgaactgtcaccgctgagggccaggaggtggcgctgcgaggcaaccaaagacccggttccgtcggggggtagggttggggggctgccttctccctgctgacccctatcagtgcagcagacaagggcgcgggaagcgagcgcgaaatgaggaagtcgtgcctttgaaaaaagtattcaaacttacagagaagaaaggatcaaagtgaatgttttgaaacctggcccaggcagggtagcagggcggggggcggggggcggcaccggggtcttccctgcgtgggaggcttcagagggttgggcgcgctccccacgcccccctcttccgcccctgaaacaggatgggaaggcagtgtccgggggcaggaaaggaagcccgacaccggcaggtggctcccggagaatgcctgtccgctcagcgccttttcctccatcataggtttacctgatggagtgcggagcgcaccccatgtccacagtaagtccttcctgctcacagaggtaccaaggtgccctcgacccctgagcaggtgccggggtccagccccggtggatccagggcgattcgaaggtggggacggagtcggcgtccttggaaaatacatatttaattacagatatatagagagagtagaaacggatagtgtagtaggaagattagtggagaaaaagaggctgaataacttggattgcgtggaatagcatccatgctccagacgggaattcagccagaaaaacggggagcaagagagaacgacatggggggtatcagtctttccggaaactgatccgatttctttatttttgggtttgcttatataccttttgttacatatagggatgaatacagagtcacgcgggggtcagcagtcctgacctttatcaaaatcaggtgcttcacatagaaaggtcttagggattttatgatcctttctttctgataaccaaaaaacttatttcttccaagggtgtttttttcttaaaccaggcaccatcctccaaataaagttgcattcctatagggtgagggtgtagtgagttacaatcaagaaaggaatttatttaacccaaggttaacatgattaatcttaaaggttaatacttatttctcctatatgtttaaaggttaatacttatttctcctatatgctagttatattcattataagggcagggaacatggagatttagcagcaaacatcagcccaacaaatgaaaatcctttcaccaatgttccccttaagatctatttagtcttaagatagtgataaagttacatttttacatagcaaggacacagtgatttataacaatgtacagtgatctattacaaaagagaaattcattaactcaaaaagtctagtattgctaaccttaaaaactactattttccttttctatattccaaatacattgattaatatattcccaggtgcctaaggatatggaggcctggcggcaatcattgactcaacaagaagaaaaagccctatgctaattaagactctcaaaatattcaaaaactctccgtgctgtttatggttgagaggtagtaaacaatcgtgtgcgtagtggcaggagtatggataatcctgtcacacaagctagtctgtcagcagagaggtttgacctgaaacacccttgtcccacccaggggagggaattagcagcaattattggcacaacaaatgaaaaacccttcaccaatataattcctaaccaacccactatactaataatttccaactccccaaaagaatttgcctttagtaagtctaaaacatctcgtgcctctcaggttgggaggctgtaaacaatcacatgtggccagacgaacctatacaggcgggctagataaccttcagaagagtccgtaagctgaaacactcttgtcacgcccaggaatttttattgacttggagctacaagttaactccttctctgagagaaatggttatggggaagaacataaaacagactctggttttggggtagatgctcgggaacagggggtttcctgaggcttgatcacgcctttgcgtatgccaagcctccttcctcatgacttttgccacgggcggagttcctcacgctggcccctggtaaggaggggggatgatccccgaggctgccagactgaaccccagaattcacggggtcatcctggtagtgtcaagagaagaacccaggccaggccagggcgaacaggagaaaagaggaaaaaatgagggggaggagggggcaggcctggggacaccggggtcagaaggagagagccggggaggggtgctaggggctgggcctcgccccccaagcccgggccgctgctgagaaggaggtgaatggactgcaggtgaagaggtttgctgggctgagcatgacagctccagggctccttcgcccaccacaccacagtgtcttcagatccctaggaggtggtcagtgaaggcgactgttggtgaaagtgatgcgggctgttggtttcctgctgtgattcagaccagccgtaagcgatgctctgatagggctctggaggccagcaaagggcctggtcaggtagcttcacagcaggtggaggtggggggatgggcggatgggtgggtgggtggatggatggtttgtccccgtctctctccctggtggagtcacgcaggcatccactgcaggtgggcctgagcagatgcccggagacccaagtggagaggaagagccgtctgaagaggatggagaagggggcacagcggcccaggcccagcccctcggcagccaagtaggtcttcccccggccccgcccccttcccccctgaagctggagcctctgttctgatttcccaagaaacctcaggctctgcgtgcctccagtagttaacctggcaggagcccggagacccgcccacctctgccgtgttccgcagtctctgagatggctgggtaccaaatccaggtgtcctctcagctctcagtatcggtatcccggtgggaacccagagcacgcagcagagggcagggcctgcctggacctccagcctggcccatccacccaggagtcctgtcgctcacgggtcctgagggcaccggtgtccccgagtcagcctttgtaactttcagggaagcagccccctcccgctctcctctgtgaactttcttgcttttgtttatagccaaccatgagtcttgtttttattggtttatgcctgttttcacctattttttaagactgttctttattttatttattagctatttttggccctgctggggctttgtggctgcatgttggccttctctagttgcagcgagctgggctttctctctagttgcagtgctttctctctagttgtagtgctttctctctagctgcagcgagtggggctttctctctagctgcagtgctttctctctagctgcagcaagcggggctttctctagctgcagtagcggggctttctctctagttgcagcaagcggggctttctctctagttgcagtgctttctctctggttgcagtgctttctctctggttgcagtgctttctctctagctgcagggctttctggcttcagggctttctctctagctgcagtgctttctctctagttgcagggctttctctctggttgctcatctttctcactggaagggcctctgctgttgcaagggcttcctggtggctgagagggtaaagcgtctgtctacaatgcggaagagctgggttcgatccctgggttgggaagatcccctggagaaggaaatggcaacccactccagtcttcttgcctgaaaaatcccacagacagaggagcatggtgggctacagtccacagagttgcaaagagtcagacacgactgagtgacttcactcactgctgttgcaaagctcgtgctctggggtatgtgggcttcaggaccttcagcacgtgggttcagtagctgtggctcccgggctctagaacgcaggctcagtgattctggtgcttgggtttagttgctccttggcatgtgggatcttcccaccagggatcaaacccgtgtctcctgcattgacaggtggattctgccactgaccaccagggaagccctgttttcccttagtttttaacttatttttggtgataaaggcaggaaagagagcctctggggatctgggcgggacaacagaagaggatgggggaggggctgctccctggggagcacaggcatcttcttataaaaataaaactgtacttgtgctatttatttactgggctcctgaaacactctctagtgtctgaaatattccctgcaaatacattcgaagggtggaaaccattatgaaggaaggatttggaactcagctctgctctagcatctagaggtgaaggagctcttgggggcccccttccctacctcctccccgtgctgggcgcccctccttcaccaaggggggagaggtgggagggcccccttagcctgagaaaccccgcctgtccccgaggctgcggcctgggtctgtgacctcagcgcctctgagcagccaggtgcctgtcagaggcccagcggggatttgcccctgctcttctcagaggggctgagggtgcagatcctgtgatgggggtgggctctgggcggccctcggagcctcctcggggtctgctcgggttcgtgtctagcacagaaggcagatgggcctgtggaagcgccctctcccccgatcccctgctgcccagggtcgggaagtctgccccccccaatcaggctgaccctccctcccctctccctggaatcccttcctgctcagaaaaagcgcctcctccccatccacggctgggactttgaggccgactccgacgactccgatccatcctgtggtcacccgccaagcctgtcctcggtctcaggggccacggacggcctgcaggtcagtggactctcttttcgcccctgagttgacctgggggacaggttttcgggccccaggaaaggacagcattctgggggacagtctgatggccctgcgggcatagcagcggaggggggaggcaactggattcggggtacagaagcctcacaccctcctgtcctgagagcctgggtgtgctgctttgagaagaggggtgcagagccgatgagtcgggcgcctgggttgtctaatgaaggcagactccccgtgacgcaggagcgcagggtagaggagtcagtcagtccccaagtcccacaaccctggtctgatccgcagggctcctgtaccttattgcccaagctaggacggtcttgtggtggaaggggctgttggtaatcgcaccaggacacggggcctccacagggctgctggggagagcctggctgtgtggcccctcggctccttggctctgtgcccttggtctgggcgacctgtgtgaggctcctcgcctcccacctcacgtggtaaaggggtgatctctgcctcacgggatcccttccatgagggactggagactgaggctggcgcaccccagccccagagtgacggcgccccagctgaagccctgacatctcagtgccctggcgcgggtggtgccagcccaggacggggtccacccagggtgatctacagacccctgggtgcagggcccaacagggcagagagctgggacccagcacccatcaggtctttggtccacggtcctgctctggtggcaagtccagagccctttgaatgaaagggagttgaattgctgaggtggagaggaggggtgacttgtgtttggtcggtcgaatggtacctgaaaactctcagtccttggactggaaagacccacattccgaggagatgcctgttcctagtgaaacctgccgaccgttcccgtgtgctcaggccctcacagatgacccctgcgcagaggagagcaccccccaggaggccgggatcctagaccaggctggtgccagggcccccgggtgccaccaccgtccagaagagcagagggtcggcctctcacctgctggaccagacgagctctcggagctctgcctgccgggagagtcctgccctgcaggcccaagggtcactgccactcctggtaagtgtgcttgaccatggtcttccacacgggctccgtgtagaggagggggtcactggaacctaccccccctccccatcccgatctgtgctgggacactggctgattgccaggagccccttccttcctgggattgtccagcatgcgcggacctggcagacgccattgtcaccggagctccccggggtgggatgcctccccgtaaccctcagaggtaccagctcatccccctggctggccacacagctcactgccgcctgtgacgggggacgtcgagtgggagtgggatagagacacacaggtgtccctgaaatgactagggtcaccagtcacctggaccaaccttcctgaccgcaggaccaggcagttccaaacctgggaccgaaatagggtgcaggtccgtctgggctgcctgcctgccagctgtgactcgggaggtctgcaagtgctgagaccctgggttcgctcagtttgatcttgttgtcagtggctttgagatgaaatctcaaatcgctctctgtctctgtgccctgtgggagcgggcgccggggtccagggggtcaggtgtccgagtgatgtagacgccgatgagaccacagacagcacgggctgcccgccaccatgtgctcccacctgacctgacctgaccgcattcggggccagctcccggggaaatgtagttagacagtgtctgccaggaaatgggtcttctttccattctcccttttcattgtattatagggactctaatctcatgatccacccgcccattaagatgctggaggcatttggggggtggggaggggacttttatttccccacaaacaatggataagtgaatctacattgaccgagtctttggatgaagacgtagatctcggcacttttcctcccgggttccctcatcacccctagcacgcggatggtgggggcagtgggaggggaggggaagacagactctgtggagctggggcaggtgcctggggggaccggcagttctgagtaccaagcccagctctgctgaccaactcaccatcctatctcatggactctaagacacatctgtcacctcgcctcttaaatcgggagcatcttacagcaagtatgggagattgatcagtagtgccgtctcaataaatgtatcagacaagccacagggtctgatctttagagtatggtgtgtgcctgatcaaaccccttaaccaccaggcctcggtgccctcattgtaaaccagggccagcacctaactcaccacagtgttggggactttaaatgggatggttgtatctgttagctattgccgagtaacaacttatcacaaacggactggcttaaagctacacacgttgacaagcccacagaggccaggtgtctggcagagcttccccaggtcctcagcacaggtctcctgggctgcaaccacagggtcggcagggccagagcctcgtccgagctcagagccccgcccccaggccgtgcagggtgtcggcagagccccgcggcgggtcagacacaagagcagcttgtggacgctgactcctgggacacgggctcctgtgtgtcctcccacgccagctcacctcttccctgccccagcatggctgtgtatggtgtgctccaggccaacttggagggtactttcttgtgaggacttgggggatgttccaccaccagagcccaggaataagcctctgaagccacaccatcagtgacccgtcagtcatcgatgacgagtcggtcatcagtgactagtctggcaggaaagccagcccccagagactaaggtggagagacccaaagtcatgtccacgcgtggaaacttgccgggacccacgtctgccacaccaggcaccacctggcttccaacacttggggcccccagtgagtgccggctggggcaggggcttctgtccccaaagttccccgtgggggaacaaggactctgctcccttcttaccttagttgagggatcttcagccccgtatcatcagtggagtagaatcatgtctccgttatctttgatctctcatttttcttcattggataaaacgcccagtggccttcagtttttcattccacataagccgaccccattcttactccaaagggacgaacatcctcaggaatgggcagctgtcctcccagtacctggccgacgtggacacctcggatgaagaaaacacctggactcagagagtggcctctcaccatcccagacagaaaggctggaccgcctctgacagccaggtaaaggggggcggaaagaatgcattctggttgcttcttcaggtctgaagtctttttaccttaacgtcagttcacctctgagagcttaacgctttcacaacttttaaactacaagatgggcaagcctacataacagagatgcggtaccttcaaaatatattttttattgacatgaaattcacatagcacacaattaaccattttaaagtgaacagtccagggtttccctggtggcgcggtagtgaggaatccacctgccagtgcaggagacatgggttcaatccctggtctgggaggattccacatgctacggagcaactaagcccgtgggccacaaatactgagcctgtgctctggagcccgggaactgcccctagagaaaggcccgtgcagcagtgaagacccagcgcagccaaataaataaataaaatttaaaaataaatgacgcatttagcagaatacacatttacaaaacattttagctaaacatttagcaaaataaacaatctccatctagcagattcacgaggtgatgcaagcacccctctgtcagttccaagccatctttgtcaccacaaaggaaagcttgcatcttcccgcctcacaaacatcggcctgctttctgtctctgtggatttgcctcttctggacatttcacataaatgcgatcgtacaatgtgtgacctttagtttctggcttctttcactgagagcagtgttcttgagattgatggcgttatagcaggtatcaatacttgatcccctataatgaaaatatctattttatactctatcaataaagtattgtgtcttcagggaattccctggatatccaggggttaggactctgaccttccactgcaggggacttgggtttgatcagtggttggggatcttaagatatatatatatttcacaagaggaagaagcaacctgttattccaaagcctttcagttcagttcagtctctcagtcgtgttcgactgtttgaaacccatggactacagcacaccaggcttccctttccatcagtagttggtctggagcttgctcaaattcatgtccatcaagtcggtgatgccgtacaaccatctcatcctctgtcatccccttctcctcctgccttcaatctttcccagcatcagggtcttttccaatgagtcagctctttgcatcaggtgaccaaaggattggagtttcagcttcagcatcagtcctttcaatgattattcaggactgatttcctttaggatggactggttggatctccttgcagtccaagggactctctcaagagtcttctccaacaccaaagttcaaaagcattggttcttcggctctcagcttgctttatagtccaactgtcacatccatacatgaccactggaaaaaccatagccttgactagaacctttgtcggcgaaataatgtttctgctttttaatatgctgtctaggttggtcatagcttttcttccaaggagcaaacgtcttttaatttcatggctgcagtcaccatctgcagtgattttggagccctaaaaaataaagtctctcactatttccattatttctccatctatttgccatgaagtgatgggaccagatgccagaccttcattttctgaatgttgagctttaagccaactttctcactctcctctttcactttcatcaagaggctctttagttcttccctttctgccatgagggtgacatcatctgcatatctgagcttattgatatttctcccagcagtcttgattccagcttgtgcttcatccagcctggcgtcacaggctaccaaatgctccccagggccttggggatgagaagtagggctgcccagcaggtagggcaaagctgagccctctgccctttgctgagccctctgcccccatcggtatccgccccccgccccagcactaacagcaggagatcttcccttcccccgtagggagggtggggcgccggcctgtcctccatccaggctggcctggaatgggcgaggggcctctccagcctcaggccctccgtgactgtgctctggaaggcggcctgtggagctcccgacttgcaggaagagcctttctttgcctggctctttggtgaatcactgtcaggtttgtgttcaaacacctgattgggccaaagcatgagtggagcagaagcgtggtgtgctccagctctgcgtgtctccctctccagagtctgtgccctcagcccagctggccctcgttcctgtaacaccgcctggaggtgtcacccgacccggggccgggcatttctcctgctcccacctccatccctgagaggtgtcgctgaccctttgtcctgagggcagcagggcatgagaggccctgaaaaggcctgcaaggaagagctgtctctctctgccatgcgacccagggtgggtctcacttcctttagggaacagctgcggagatgctgacacaaaggaagcgggctttgattcagaccaggggtcactggcttggcccctgggggtgggggaggatggtggtggagggaaaggccactccaagacagagatctcccccatacagagacctccccaggcagaggcctccccaggcagagacctccccaggcagagacctcctcaggacagagacctcctcaggacagagacctccccaggcagagacctccccaggcagagacctccccaggtagagacctctctgggcagagacctccccaggcagagacctccccaggacagaggcctccccaagcagagacctccccaggacagagacctccccaggacagagacctctccaggacagagacctccccaggacagagacctccccaggcagagacctctctaggcagagacctctctagaagagacctccccaggacagagacctctccaggacagagacctccccaggcagagacctccccaggcagagacctctctagacagagacctcctcaggacagagacctccccaggaagagacctccccagaacagagacgtccccagaacagagacctccccaggcagagacctccacaggacagagacctcctcaggacagagacatccccaggcagagacctccccaggcagagacctccccaggacaggggcctcctcaggacagagacctccccaggaagagacctccccagaacagagacctccccaggcagagacctctctaggcagagacctccacaggacagagacctcctcaggacagagacatccccaggcagagacctccccaggcagagacctccccaggacaggggcctccccaggcagagacctccccaggcagaggcctccccaggcagaggcctccccaggcagagacctccccaggacagaggcctccccaggcagagacctccctgggttacagaacacagctggcagagcagttcccagttcccagggacaatggggtgaagactagaattaaattgtctattttcagcaagtttttagtttagcaacttcagtgactttcaggaaaatacagatcccggtattagccctactgacaccagtcctccttcttgcctccttgaatttcatacttgtaccttgtctctggaattcttctccatttctttctcttgactttatttactctgactaacattttgcttgcagggtgtcctccacatctttatgaacagggagttgggcaggatgaagagcaacctcccaaggtagcagcatccccaagtgtcagtgaagacccagggccaacccttacagggtcttcatggaggagctgctgcagggccctggaggaaggtctctgcctccacccacctctcagagcagctcttctaaaccagatctcatagacatgcccgtgggagggcaagagttctcgagaataatcttttgttggagtccatctgaatggtcctcccatgacctgttgtctgtctctgagtctgtactcatggttgggactttctgggtgaggggtactcagcaaagactttgtataaacaatcattcatgctgagaggaggccgaagatggtgcaatggtaccaaggatggatgctgcaaggccctgagatggtatgccatggcatgtaccccaccccgagtggtgggtggtgaatgctggggacctgagagcttgggctccagacactgactcagtttccccacaaagggcctcaccagcagcaagtggcagtagtttgttttcctccatggctgggtctgtctggactgtatttgtaagttgtttgtttacattttgctgcaaaggagctgaaaacactaggagtttattctgagttgccacccgtgtgtcccaggagcatatgatttacctcgacatggagcttacacggggcagagggactcccacttttgcagaagagagggctaagagcttgttgggttcctgagcgcctgagaggcaagtgtgccctggggggtgggggggtgtctgcacggggccagcggctcttgatcccaggtggaaaagcaggatggtgctctgtgcctcgtgtccgtgccatccaggaggcggatggccgagtcctcgcccagagagcagcgtggagcccgaagctcacctcccggactgaggggcgtggcctccccatcgctccacgctgccctgccccccagcccctctctatcaggaggagaacttcctgattctcatcatgggtgcgcttccttctgtttcactctggaggtgacatttcactgtgcctgtgttgggctctggttggttcagctcttaccctctggccacatgttccatgccggccatgctccctgcacgaggctgtcctctgagcacccctccctgccccaccaggcattgattgttgcttctcagatgacagagagtgcaaccagagctggttccagttgccagcagccatttgaggtgatggcggggcccctcctgcccgaaaccttcatacttaagtttctcagctcatgttcttctccgggcagacttgcccactcaggggccccgctgctgtgaagatcaaactaattacctacgaaacaacgggcaagagtcttcccagcctgccagttccatttccctctttaggcggcccactgacaagatgatggcaggaaagatacatctgctgggctcagaggaaaatggaagaattgatttcctctgtcctggcctgggagctaatagactgtgactcaagattcaagagctggtgactcagggacgaggaagctgtacgctgagtcactttaggtcgttacctgggcgcctcctggcccacggtgacccggggcgctggctgttttgttacatcagcccggcacgatcgattcccaccttcctgtgtggctcatgatcggcggtgatgggtccactgcccatggcagtgacgccgaacatgtcacctctcctgctttagtcatgtcccccaggccctgctgcccactcctgctgcagcttggtacccccagagccctgtggtcagaacacaggccacccagttcccttcccagcccccgtccccaatggtgtgcttggctctcctttcaccgcctgtgatcggacatgcaggtgtcagctgtggatttcctgctgatacagtcatgcttctggcagccagatgacccccaggggccaggcaggggccaggaaggtcccggccaagtaaggagagagctgaagcccctttgttaagggaggttgaggcacccacccaggtctctcttgagatttcctgggttgtgagctcgtggtgtggtgctcagagagccagggttgggggtgggggggtgtcccctgccccatccaggccccccaccatcagctgtacctagagcctgtgcctcagtgggcccagcagaaggtgcaggaaactcagaggcatgcaggcgtgcagccttagtcagttcagttcagtcccatctgactctttgtgaccccatggactgcagcacgccaggcctctctgtccatcaccaactcccagagttgactcaaactcatgtccattgagtcggtgatgccatccaaccatctcatcctctgtcgcccccttctcctcctaccttcaatctttcccaacatcagggtcttttcaaatgagttagcttttcacatcaggtggccaaaggattggagtttcagcttcagcatcagtccttccaatgaatattcaagactgatttccttcaggatagactggttggatctccttgctatccaagggattctcaagagtcttctcaagagttgaaagcatcaactcttcagggctcagccttctttatgatccaactctcacatctgtacatgttggttcccttctattccagcccctgtttatggtgcaatcacaactgcatttataacagagactttaacaattttcaccaaataatcccaccctgaaaattcactttgagaagcacatacacagataagagcctggagcagagattgccagacacaagcactattttcctctgagtttctcagcagctgaggcagataagtagacattctgggttgtatgaatctcatccaagccaggtgacaaacttccctggttctagattcaagaagggacatgtggcgaaggtgctgctcactgtgtcatagaaaacctgcctgcgatgttcacacaagagtcacagatacgctgtggacacgtctcagctccaggcaggcatctgcgactctgactccccttgcaaagccgacaggaggcctgggcacagagcctggcaagcagagagacgccatgaatgccgctgtccttatgcaagttcaggacccacccccaagcccttgggtgatgctagacatgaatgccactgtccttatgcaagttcaggacccactcccgagccctacttcagtatagacatgaagcggacagaggaaaacccagagaacagacgtgtcgactcgctgggcctcagctgaccagttccaaacagtccaggccaagatcttggtttggcactttagcaatgatgctaactaagcccaagggaatggcttggggacccagtttggggacagagagatattcaaaatggtgcctctccaatggtctggatgctgttaggatcttcaggacaccccaccctgcctggttctggaggctggggagggcagcaccttgaccatgctcgtgtggggggtggatgagaccacagctccagccgagttccgggggacagaggacggggtgcctcctggagccctgcctctgagcacggtgattccagatgacccactgagtgagacccacccgcttgtccatttcagcatccaggtggcgacgagcccacagatgctgacgcggaagaggcggccctcaagagaaagctggaggagttgaccagccacatcagtgaccaaggggtctcatccgcagaggaggaagagggcacggatgcaggggctgagatgggcagaagcaagaccatcgaggaccaccctggggccacttgggaggtgaggtccccccgagcagtctcggcaggagacggggaggcagggccagggatcagcagtttgtgactaagccatcagcccagacacaaccgttggtgagccctgagggccccgggtgcccggctgcccgtggagtgcagagagaagcatcgtcactacgggatgtatgtcagtgagagccccgcagcctctccgcctcgtggtcacatttggggcttccctgtcctaggtgcgcacggcagcaggccaaacacccagctggggaaaggacccgctgagtcctggggaccccgagcagcccagcaggaccacggaggcagagctggcggagctggagggccaagtggccgccacaacttgcgaggtgcggcggacagagagccaggtaggcggctggccacgcgatgcccatcccgcacgggagatggagcactgttggcttcacgagaaagaataagtgaacccggagtccccaggctggactgcagcctagaacgtgcatggcctggagacacgcccttctcctcagggacggaagagtgccccagacagatggtggaggccctgaaggctggggaagggccctgaagagctcgcatagcgcagcccacactctcagctccagagcaggaatttgggggtgtctatcagaaccaccctccatccacccccagcaccccagccctggctattccccttcaggtcagcaagagacaggcagtatggaaggaagaggctgacccttcccctccctgtcctgggaggactgtcccgaaggaggcttagattttaggatggccccagggctcaaattctgcccaagggtcaccctgtgtgcttgggtccagggcttgagtttgggggcggggggagggggtcagtggtatgcaaagatcaaaggatggagcaggggcttccagagacaacaaaggagcctgggctgtactctgcctgcccctggggaccctgcagaagaggggttcagccctcagagcgcgggggacccagcccccactgcccattcattcccgcttctgttctctccagcacctgcccttccatccccaaggagaggggtgtgttgccaggctgggcaggctatggggagcaagccagcctgggaactctgggctcacttattccttctcgaggggcagacagtcctcaacctcccgagtgtggccggtgtcatgtagacacacagatgcagcagtgaacacctcagaccaagcccctgccttcgtggagctcacatccttagtgggaggaggcagagagcaagtccatgaccaaggagctcatctcggttcacgaggagaggagagcccgagggagcactgggacaggccacttagaagggtggtcaggaaggaataacactagaagaaggcgtggggcttcctggtggtccagtggctaagactccgctctcccagtgcagggggcctgggttcgatccctagtcaggggactagctcccacatgctgcaactaagggtcctgcatgccgcaactaggacctgatgcaaccaaataaataagcaaagatttaaaaaaaagaaggcagcgtgtgcagaggccctgcagcagtgtgaacgaggcatgttcagggatggagtgaggtgtgaggggcaggccgattccagagaaccctggggacctcaggaacgatggcgggccttaggaggcatctgaatggagctgacgggccctggttcctgttcccggaagcttcctcttcccactctccccccagtcactaccatcttccttccaaccctcaaggatgagcctccagacaatgtctagaatccctctcctcacccctgggggtgggtgacccttccgatgaccatggaagatgggtgaaaatgaggtccccaggaagtgcccctggtcgcgacacccatcttagggggagtatcacgttagcaaattcgatgaaagtggagcagctgctcttcctggtctgcgacattgagaagggatgtctatctgtcgttcctccaggtttcaaatatcaagtccaggattgcagccttgcaggcagcggggctcacggtgcggccctcaggaaagccccagaggaagtctaacctcccggtgagtggagggacttcggggccctgggggatcgtgcctggagccctgggaggggcacggggtggcctggggcaccgattgcccccaccagccgcctccctcttccctcccctgatgtcagtgacctggatgggattctttttcatctgttactgccaattctaacataaagagcactttactggggggaggcgggctggggggtgccccggacgggcttaacagagctccacttcacagcgggtgcgatcaaggggcagggtggagatccgcccacagcagagacctgggagcggcatcctcctccccgattcaagtcaggaatctccagacagaccacactgtgagggaatctggcagaagaatgacaggtgctcccacgagagccccaggggcagctgccaggacgccccagttgaacctgaacttcacatgtgcaacaagtcatttccttgtatgagtacacgcggtgcactctttgggggcgagcatatactacagcgttcacttatggttgatctgcaaatcagagccagctgggcattccgtattttaatctgctgaacccagagccccagtggtgtgtttggaggactaacaggccatcccagcctttcaggccgagtattagtacatccgttcttagtcctgctcacctgccctgcggctggaggtcagacaggctgtcatgacgcccagacgccttctttgttctccagatctttcttccccggcttgtcaggaaatctggccagagtctgaaggatccaaacgcagaccctatggatgaggccgaggtatgtgttcactgcacccaggctcgacggggtgggagagggtaaacgattggcctgacttttctagcagcaggacaagccggtgggcggtggagctgaaatattcagactttaagaagcctggcgagtctcccaggctggcttcccccagaggcacggcttggggtagggtgtctatcggtggcggtggagatggggggtgtagctgggaaaacccagcaggggaatggaagggtaggacagagggcagggctggggtaggggctggggaggaggtgggcagacccccaggcagggcaacaggctcagggtaacacagagccctggagacactgcaggtcacaggggagtcgtcctgtgcctggaccacgtgctggacgtgtgccccctgcatgctcaccggtcacagggtctggggacagccctgctctgggagccactcatccagcccgtgggagggagcacggggcctccgtgcaggcagcagcacaagggtagacgttgtggagggggcgacacccctcagcctgcccttcaggaagacacgtggggggggcagcgccagtcccagggccccacggagagtgacatctgctccacatcctgccagctcctggagatctcgcgtgaccatctagtcacttctgcttctcatgacagcggcactgggtcgctcttcccagcaaacatggtattttttccatcccttccatctgaggtttacagcacttggtgagccagggcggatgccaccccggttgcagtgatgggagactggcggtcagggaggagaccacacagaccaccgagctagagggtctcaaacaggagccctggccctgaccccagcctctcctcggggccagacctccctgacgtgtcccgggatgcccggccctggaggtgtccacggccaggcccccggtacagccccagagcagctgggctgaatcccaggtggccgggtcggcaggacttcccaggaagtcagtcggttttgctctcgcttccccctgaggaggcaaaacagagaaagacttgtcccagagtagagacttgagtgacaggaaaggcaagggaagggaaggtgtgagtcagcaaccgcgggtgctgggcttgtatcgttgtgtggttcggtcgctcagtcgtgtctgactctctgtccccatggactgcagcacaccaggcttccctgtccatcaccgtctcctggagtttacccagactcatgtccattgagtcagtgatgccatccaaccatctcattctccgtcatccccttctcctcccgccttcagtctttcccagcatcagggtcttttccaatagtcagttcttcacatcaggtggccaaagtattggagtttcagcttcagcatcagtccttccaatgaatattcaggactgatttcctttaggatggactggttggatctccttgcagtccaagggactctcaagagtcttctccaacaccacagactcttgagagtcccttcccaaaatgggcagttctccaaaaggcatacatctcttttatattctggcatttggtaatttattgataacatgcattgtagtacttttaaagttcttcatttgtcagaatttgcttgaatggtgagaaatttgcatttagcttccggtgcccctaacaatcacagcaacacagtgacacccagagacgtgtcgttcttctaggtggaggctgtgccctgtctcgtgaggaggaagctcagcaattaccccaaaagccaaggtaagtcacttggtcccctcattcctaaggcctaagagagtgtgaaaatgaccagtcagggccccaggtttgtaagtaagcctcatgcccagacccacaggacaccccactgtcccctggccacccgcagtgactgttgccgtgagctgatgcctggatccctgggatttgctcctttaagcacataaaggtgaaggatgtggtgtctgtgtcttgtgatatgatttgaacgtacatggtagggcgccagtggtaaagaatcggcctgccagtgcaggaggcacaagagacgcaggttccatccctgggttgggaagatcccctggagaaggaaatggcaagccactccagtatttcttgcctggaaagtgccatggacagaagagcctggggggctacagtccatggggtctcaaggagtcagacatcactgagctcacacatgcgtgcacggtgcccagctccagacctcacacagagcgtgggacacagtttcttgatgtcttggtggtgacaagggcagcagccgtcctgggtggtgcgttcgttctcatgctccttttaaaatttcttaggaggcaaagacacttgtttgaggtaagcctgtgagtaataaacaagcccccttctgttttccccaaagacaaagatgatgactccttcagtcgaaagtccatgtaccgtggatccctgacccagagaaaccccaacggcaggaagagagctgccaaccacagctttgcggtgagttttctctgttcactggggcggctttaaaattctgtgacctgtcaggctgacacatgaagtcttcaaagtaaagaattgggataaactcacaagaaaagtaagatcaagaaaagatctaaaggaaagtggaaaacatatctaaaggtaccccagtgtcaggctgattgggggggtcgcctcgccctgggggtctgggcttgggacccaggacagcccgcgaggcagtggggactccccacccagccccgcatgccttgggatccaggacagcatgcaaggcagtggggactccctgcccagccccgcacgccttgggatctggaacagcccgcaaggcagtggggactccccgcccagccccgtgcgccttccctgcatggtaaaggtcgtgcagctgagccacctgtgcggatgctggggtcggtgctgtccccctgcttccctgggagggacctccatgcagaaggagcctggggttcctccccaagcccagggagcatcaggctggcccgggagcggctgtggccttgacgcctgcaggagcgcctctggcaggcctgctcccacaccacggtccctggtgtttccagccacacgagatcctgggggaagcgccgggttctctgacgcgggtgctgcctgcccgggccccccactgcagtccacacacacacagacacacacacacacacagacacacacacacacacagacacacacacacacacagacacacacacacacacacacacacacggtgctgtcacagcgcgagacagccgacctcgagggaccagactcacgcccacagcccagggatgggcaggaggcctcggtggccaccatcagggtcccaacaccctggatccccgccgctgtccacacccacaccacacctgccggctgcaaccacccagcaacaattctgacttcatcccggttatgcaagtctgagccgatgccttggctgtccgagaagacgaagtgcctgctctgttatttccatggactccatctttaaacagatttctaaggatttcacaacactcactgctgatgcctggggctgggagacgggcaggcaggtggggcctacgggtccgactcagccagcctccccccagcgcagacgaggccgcctgggccgtggccagagcagggccattcactgcaggagactgataacgaaatcaccaacgggggcttgaaaatctaagtgcttccaaatgagaacacaccttcctgtgtttcaccgcttccagttgtcaaaatactttctatcttcacagcccgtttgatgagggctggtgtcatggacccaaattcatagctgaggagactaggcagagaggggttgaatgaaaaaccggcagggggttgaccgatgccttctgacggaggtccacgggtttgtgtgtgcagctgtgtgccctcctgtgtgtgcgtgtgtgtgtgtgtacatgcccgtgtgtttttatgtgcacacactgatacagctaagtgcgtctttactcgtgtgcacacctgtgtgtctccatgtcccccgtccttgcctgagtttccgtgcctgtgtgcgcctatgtgtacagctgtgtgtctcacacccacttgtgcatacggtgtgtccatgtgcatttgtgcttcacagaaacccgtgatgacccaccagccctaagaggagaggttcgcctgaacgggacacccaccctcttcccctccacctcggtcaccgtgtcccgcctcctgcctgcgctttccactgcacacagcccagtggaggaagacgaagagatgctgaatctgtgatgcccaagggccttgcccactgagatttgcttccgacccgactgtctcaccacgagccctgatcccatccccactgaccccacggtgtctcagtcctcacaggggccacgctgcccacaggctggcccatggccgctccagggggactttcagaactggcatccgtgttgatccagataacttgggctttggcagtgtgctggggtttgtggaaacgatggggctgatcctccttctccaaatgaaagctgcttcaaataggcagctcctaaattcagtgctggaagtgattaaagatgcctgtacgtggaagaggatcggttctttgtaacgtgcaggcctccttattcacaaagtgaacggggcgtcactggctcagatggtaaaggatctgcctaccagtgggttgggagggtcctctggaggaggaaatggcacaacccactccagtattcttgcctggagaattccaaggacagaggagcctggcaagccacagtccatgggggtcgcagagagtcagacacaaccgagcgactaactcctcgcttctggcttcttcaccagacaaaacttgcagtaattatagaacaagagaacaaacaaggccagactttgagaagagcctgggggggcagacaggcacctgggagggaaggtttgggcgggggtgccagaagccaaggcactccctggggctcaggggtcctggcaagagcagcagagcatctcaaacaggaaaaggctcactgaccacaaggaaagaacaccactgttgcccgtgctcagccgtgtccgacttcgagaccccgtggactgcagcccggcaggctcctctgtgcatgggatttcccaggcaagaacactggggcggattgccatttcctcctgcgtttgccccaccagctgccatgacatctccagcttcccaagggcccctcaggcactctgggtcctctgatgactgcccccagaaaccacggggtgggggacatcattctgctctgtcagctgggctgagctctgggctctgcgatgaggggggtagggctggagcggtgccaccgcccgctggtgaaccccggagtaaagtaagcaacagacagtctacagcaggaatgggaaagggctttatctgatccaggctgagggctacagcccgaggcatggcctctcagatccctcagaatccgcgccagagaagcaggctttcagcagtttcgtgtctcacctaaacaaaaaaacattaaacaagtcagggatacatcccttcaaggtttcaaaaacagaacgtgcacagagagtcagcacggccttggcacctgggaggggcatcttagcatcaaaggagggccagccttggggtcccaggacgggaggcatctcatctttattttgaacatggacattcttagttgggcagcttcccaggcgactcagtggtaaagaaccccctcagcccccaacaatgcaggaggcacagagtcacgggttcagtccctgaaccgggacgatcccctggaggaggaaatggcaatccgccccagtgttcttgcctgggaaatcccatgcacagaggagcctgccaggctgcagtccacagggtctcgaagtcggacatgactgagcacgggcaacagtggtgtcctttccttgtggtcagtgagccttttcctgtttgagtttaagcagctgcacaaagcaggtttgatgggccacaaacaggctgttctagtcggtatcaaattcagggtgactcgcatgtaagtggggcttccctgacggctcagttggtaaagaacccacctgaaatgcaggggatcccagttctgggttccatccctgggtcaggaagatctcctggagaagggaacggctacccactccagtattctggcctggagaattccatggactgtagagttcacggagtcggacacgactgagcgactttccctttcccctataagccaacatgacttccccaggcctcagtatgtggacctctctttcatcaacaccaaccctgcactgtagcgaagatgcttggctgaaaggggagagttcgctaccccacacactcacgcacacatacgcgctcacacagacacacaagggcatgctcccccaacggtctgccgaggaagctcctccagctgccctggtctcacggggtctgctcccccgagggcctggtgccgggcagccctccagggagagaaggagaggccccctccacttgggggctggcctcagcagtgcttccagcagcacccctcagcagagccactctgaaccccgctcaccccgcgctcccccgggatccagacggaatccatcccaggggcctcagcttgcagccggggtgtgggccgggcccccctctgcccctcacgctccccctctgcccctcacgctctatggacagcccccctcgcctgtgccccaccccccgacctccactccagacccccagggagcccacctgccccccacaaaaccttcatcaccgggaatgggcagctatgggaggaaagagaagcatgcgtgaccctctgagggccgggaactgctctggaactttcctcaaggtctgatggagtctggggaagggccgcggggcccctgcacatgtccggggggaacagccaggaggggtcccccaagaatgggctcctcaagatgatgctcggggccatgtaaatgacctttgctatgttgctgttcaggcgctcagtcgtgtctgactctttgcaaccccatggactgcagcacgccaggcctccctgtccatcaccaactcccggagtttactcagactcacgtccgtcgagttggtgatgccatccaaccatctcatcctctgttgtccccttctcctcctgccttcaatctttcccagcatcagggtcttttccagtgagtcagctcttttcatcggaggtcaaaggattgaagcttcagcttcagcatcagtccttccaatgaatatcagggttgatttcctttaggatggactggttggtctcctatcattattcagattatgaggcccaagtgaaatggagaacagtgtgtagttattttaaatggcataagtgtacagattttttgacaacttgaggatattatggttaaatggaaataatgagattcaaaaatgcataaatccgatgaacctacccagaatataggtgaaaagcctatgaaaaggaagtacatcatgtgggatcaatgattgacttctctggtgcatgggtgtccttttattcctatttttctgtacgtgctaaattctatccaagtgtatgtaaattgcttttataataaaaataagcctcttcattatttatttcataatagaaatacaggtatttgttttataatcatagcttcccaggtggtgctagtggtaaagaaccctcctgccaatgcaggggacataggagacaggggctcaatccctgggtcaagaagatgccccagagaagggtacagcaaccctccagtattcttgcctagagagtctcatggacagagaagcgtggcgggctacggtccataggatcgcaaagagtcagacacgactgaagcagcttagcatacgttatttattttataatagaaatgtacacgttcgttttataatcataatatgtgtgtgtgttcattgctcagtcgtgtctgattctttgcgaccccatggactgtaacgcaccaggctcctctgtccatgggattttccaggcaagaatatagagtggattgccattcccttcaccagataatcatcataaacttctttcaactgtaattatgacgactctggaaagggctggaataaacataatttttcagtggtagaaacaggacgaaagtggtttgtacgtaataaatgcagctgtgaaaaggcacatgggtgacggaccagccggggaagggttaggagggtgtcgttcagctgtgatggcctctttgggtaactctgcatgggaagtgggacttaaaggaagagggaggtggcgggagggtcacctctgtgtcagccgtcttgtggctcggagcacccagaccagcggtgcctggctctgcagtctacccaaagtgtgcagaaggaaagctaatgtgttttaaaaccactcagcccaaatgaaattatgtaacccaggaaaggacacatcacattggtgatgagagttaaaaaaaaaattagaagaaaaaagaaaatgactcttccgatgtggcccagggagggaggctggcggagagggagggagggggtccggtcagctgcttcctcctggcgcataaaaggggtgagcgcgccccacctgggtctccgctcccgtccacggcactcaccagctgctgggaacctcggtgagtagctctcaaggcgctggagagggcgggggtccctgacgctccagcctcctcccctgccacctttccctccccatcagggcagaggtccatcctggcagccgggaccagctctggtggggaccccaccccgtttgtgcgtccaggggccactcctgcctgtcggggccccccgttcactcggctggcacggtggaaatgaaaggtggaaccgtccaggcaactctgctgggaacacagacctggagtctcaccagccaggagacagcaagcccccggctctcaggaggctggaccttgagggtcaggagacaggctccgccagggctctcctacgacgccctcacccagcaggggtcccagccaggggacagcaagcccccggctctcaggaggctggaccttgagggtcaggagacaggctccgccagggctctcctacgacgccctcacccagcaggggtcccagccaggggacagcaagcccccggctctcaggaggctggaccttgagggtcaggagacaggctccgccagggctctcctacgacgccctcacccagcaggggtcccagccaggggacagcaaccagcccagccggtctgggagcacctctttatccctctactttcatgacggcacctccatttcctctaagttggagtcccccccccccccgccgccaacaggtctctaaaaaaggaaggggtgggcgttttaaatctcagttggagagcacgctccttgggaccagggcttcccaggtggctcagatggtaaagaatccacttgcaacacgggagacacaggttcgatccctgggtagggaagatcccccagaggaggaaatggctgcctaccctagccgaaccctaacaataccctccagtattcttgcctggagaatcccagggacagagaagcctggcgggatacagtccacggcattgtaaagagtcagacacgactgagggactaacgctttcactttccgctgggctcagggacaggccggaaagccaaggtcagcagaggagtcttccctgaaacagacaagctctctggtgtcttctgctggttccttaagtgccaagggagtggggagcgggggaaggagccagccctaagaggtgcgggcacctgcggaaggagttgccaggtttgacgggtggacgctgtttcaggctcagcccagccgggtgagaggtggatttctgggtgcctctgtcgcccacagctctccccaacctgtacagggctgtcctgctgcgtgagggcagatccccacgggctgctggttgatcttggagactcagcggcttgggtctggggtcacgggggctggtgagcactcctggcagggatggtggatgacgacccttctacagtgcctggctgtcagcaggcagggggcaggatggacctgggctgggggagagaaagagccctgcacccaggtcccccaccctgagtgcggtccgggctcagcaacccccagacccccgcccccgggtcatgtctgaggttgggccaccccctccacctcagcagccacccggctcctcctggcaggtccccaccaacctgctcgcctctgccatcccccccaacaccccgccaaggccaagtgtgcacacccacagtggagcagaggcctcccacactcctggctcccagacacagatggacagacagacagaccgaggcacgtccaagacagcccagctctgcacccacagctcatattccccccggattccttctgatgacagacggtccttgtaaacatggctgagcccaggagaggccaatacacacatgggtcacctcagcgaacgctcactgtgcagagcagagactggggcccccgggggagcgagggatgcgcacagaaccaggcgcacctgctgttccgggctcactgccaccccagcagagcagagaagtgcacactggagcctggctgggtgtgcacacgcgtgtgaccccaggcacacctgtgcatatccatgtccatgtacatgaatgtgtgcacacactcacatccactctgacacacagagtgtgtgaggcgttatccgaggcaccccgctttgcgcacacgcgccctcatgtgcgctcacctttgcccccaggctgcaccctcccgagcggggcctctgcaaggagccagtgggatgaaggcggtgggggcctggctcctctgcctgctgctgctgggcctggccctgcagggggctgccagcagagcccaccagcactccatggagatccgcagtgagtgtccaccccgcccccacccccaggggtcacagcggggacctggccactttctgggctggggcatccttgctaagcatcccggagctggggtttggcctcctgctccccagacccttcccccagatggccccgacagctgctctcaagggtcccgacccagcacacgggggagggtcactcctcaccacacgggtggcctagggctgagtgcacgtcacccatgagaaccgggctgtggggacaggaaaggaaagggagtgtgtcctggtgtgagtctgaaatcctatttcctgaagccaccccagcaccagaaatgggcggacgggcgagcctcctgtgcggggggggtggtcccggcacggcctgggtgacaggcagcggtaagctgagcacacagccggcccggccaccagggctgcatgcaccagggcacaggcctccacgcgctcttctcactctttccagcccccgacatcaaccctgcctggtacgcgggccgagggatccggcctgtgggccgcttcggccggcggagagctgccccggggaacggacccaggcctggcccccggcgcgtgccagcctgcttccccctggaaggcggcgccgagccctcccgagccctcccagggtggctggcggcccagctggtccaggactagcagcaggacccccgcccccccccctccccctcccccagcgaccttccctccagtcctaataaaagcagctggcttgttcacacgtgtctgcgtggcgacagagtgcacggtgctccccctcacgggatgttagcctggaaggaccctcagagcccagcagcccagaggccccaggactcgcccaagggcacccggcactgagcagggggctggggcggccttggccacccacctccagcccgtgccgccccccaagccaccctgaccagttgctcaggctgcgcactgcacgaggccgctgtgcaggggccccagggagggcatcacggcccctcggcctcacctgccccgctctctgctgcagttctttttgcctccctgttggtacttgtggaagagaaagaaacagggggtgcttgtttccagtactcttgggttcgagtatttcaaccccatcctgtgtccctttcaaattgcacgatgtccctgtgtcctgtttc

SEQ ID NO: 80 - DNA, 72419 bp, Hippotragus equinus
  source 1..72419: mol_type = genomic DNA
tttaaaattcgttgtgaacgtagtactcaaaaagctcacttctataatgcatgaatccatttttgctaacttttaccctctgtggcgctgacacgctaaaaatatgccctaatctctgctttgaaggcaaggggtgggggtgggaaggaggaccttttatttcctcggggagtgaagccaataaaacgtatgaatagatccagcccaacctcgtgctctgtgtcccgggggcgggctccgccttccccgagccccatccccagctgcgccctcggattctgccatctggcggctggagtcccggcttcctccttaaagggcagcagcggagcgtctcggggacgcatgcgccccaatttgcgcccggggaattaaagagcgagaagaaaagccccaccgaaacccgcgccccaaacaaaacccaagtggaggaaagcgcgcggctccgcagctcccgcagagcaggcgcctcccgcctcgcccgcgtcgccggccgcggcgggatgcgcacggaccggcccgcgacgccccggccgccactgtccccgcacctggacgccggtcgggtggccgcgccccagccgcgctcgctcgccgccgcggctccccccgagtcgcccggcgccggcggggcacctcgctctccatggggctgagggactggctgaggaccgcgtgctgctgctgcccctgcaagtgcctggaggagcccgccgtgccggagaaggagcctctggtcaggtgggtgcgcgcgccccggccgtaatctggggctccctggctgccgccgggcaccacggactcgggggtacccgtgtgcccctctgagctggggaggtgcgcttgttttaagctcacacggaggcacagactaagccccttggttcctcgaagaagatcctgctccttgggggttgttccttgggtaaagtttttgccagaatgcacaaatccttggaggcgcctgagatccaagaagatgcgtgtgggaaacagcaagagcttcggtgtagttccctgggcagagaactaccggagagaagtttgcacaggggtcctattaaatacaactgtgattgtctgtttcacaggcatatttcagtgaaatgggcgactgtgaatttctttcacccaggaaaaaagttggataccttatcattcaatttgttaggaagagaagacatttacagtgatggagagcaaggagatatttttcacattaaaaaaagtacatatttttctcaaaggatagtggaatgttgattcatgacagattaagctattaagtgtgaggaaattaatgcacgttagcaatgtgctaagtgcctttgtgaagggaccatacaacacggctttgttcagggctgtgattgtaagcaattattttatatcttgactgctgaaatcaaggtttcatttcggcatgacttgggggtaggtagggtagaaacaaaatatttaaaatgaaattaggaattagtagatgaggcaaaattctagggttttctaggcaaaaacatggaagctagtgtttcttatgaaatatgcaactaatatgataaagctttcacaactttctgaaaacacgatttaccttttcttactctatcaagtccaaacactccccttgacttttgagatcttacataaccccttccctcctgtccactcctgttttccggtatattacacactgtgcactctttgacttaatcagacaggcatccttactgctctacaaacaatctaagcttcttattccctccaagcttgtttcaagtggtgacctttattcttcctgccccttcttaaatgctagttttcaagtctccctcaaacagtcagtcgtctttgattttttcgttcttattcatctttctctcctagctagggtttagaacttgctatctgctcctcatggtttagtgagcacatatatacgaaaacatgtatgtcctgtttgttttctgtgtataatatgcacaccatacacaatgtttttgtttgctcctgcaatggtgttcccacttcgattattagattgttgtgggcagggagaaacccagtaatctacccctagtcttaaaatagtggatagcaatctggaatttcaggcttggataataccctcaatttgtcaatattcgtagtaacatgaaataacagccttcagcttggtctcattctcagagccttgggtctttccagtactctgttgggaattgctatttaagataatagttctggttgttttaaaaaatctcaaccctctcctgccttggtttacattgtaagtcagcgaatttgcaagtaatcttaagactttagagtcagttggagcagaatagcatagtgctcgtgagccagattgcctggggttaaattctagcctgggtgacctggcacaagttatgaaactttttgtactttaatttcctcatctgtaaaatgggaatcataatagtatgtacctcagagggatgcagtgtatagatacctgcatgttctttcctgccctaatcattagaaggtctaaattgaaatcttttttagatgtgaaattcagtgctttttaatacattcacagagctgtgcagtcatcaacactcttaactctggacatttttcatcactccaaaaagaagcactatactcattggcagtcacttgctaccttcccttccctgcccactccctgccatcccccaggcccacagtcaaccactgatctactttttgtctttggagatttacttctggacattttgtataaatggaatccttcaatatgtggccttttgcatctgactttcacttagcataatgttttcaagtttcatctatgttgtaggtttatcagcacttaagtcattttatcgttggataatattccagtatatagatgttttacattttatttatcaattgatagatatttgggtgatttccactttttggcttttaaaataatgattctgtgaacattagtgtacaaatttttgtgtggacatatgtttttgattctcttgggtatatacctagaagtggaattgctaggtcacttagtaaattgtacattttaactttctgagttgctgccaggctgttttccaaagtgactggtttgaaatcttgacgtggtgaagtcatatggccagatggtcttaatttttattttattaagaacttcattcttcatgtcatttttttttcatttataaaaaaagattttatacagacattgcctgccctcaactgaatcctttattccatcataaagcagtggttatcaagctttatttaatccccaaggcaatagtgctggaagagatatggttgaaaggaagacttttgtcatttgtgtgcgtggtcatctgcagtccttttccaaaacagaccagggaacctcattagttcagcaaaactagtttttaatctcagctcctgtgtcaacctgacattgccacttgtggtttttagaaatattcattgatttatttggctgcgttgagtctcagttgtggcacacagacttgggagttgtggcagtgcatgggttttgctgccccgcagcatgtgggattccagttccctgaccaggagcccaactggtgtctcccacaacaaggcaaatttttaaccactggaccaccaggaaagtccctgtgtttttgatcttgccttgtttgctttttctggaattttgtacttaaagggaatggctgccagttgtctggcttgcatgtatattttcccatgagttctttctttgccctttctcttgaagtatgctggggcctcccccgatgataaattcatccccatgttgctgttttctttagctggcatcctctgctttcccttgtgtcgggcacagatgtctttaaagtgcagtcaattgtacccccacctcctccttcacctcccactcatcatgagatctggttccttcccctgcatgattacatgaaaactcttcacttgaaagttacaagagaaagaaagctgctgttcttttcgtggtgtacacggagtgcccctgtgctgaccatccgggcctgatttcccatttcctcattctctggcctctgattttgcattctcttgtctctgtgcctgtgatccatctaatcctgctggtttcccttctggtgttgctgtcaatggcataattgttagctagacatctttttgtttggtctactgcagaagatgagatggttagatagcatcactgactcagtggacattaatttgagcaaactccagttttttccagtaatcatctgtggatgtgagagttggaccacaaagaaggctgaacactgaagaattgatgcttttgaactatggtgctagagaagactcttgagagtcccttgaacagcaaagatcaaaccagtcaatcctaaagattgaaatcaaccctgaatattcattggaagtcctgatgttgaaacggaagctccaatactttggccacctgatgtggagagctgactcattggaatagaccctgatgctgggaaagattgagggcaggaggagaaggggacgacagagggtgggatggttgggtggcatcatcgactcaacggacatgagtttgagcaacctctgggagatagtggacagggaagcctggcttgctgcagttaattagttaataaggtcctaaagaatcagacacgacttagccactgaacagcaatagtgaccagataaaataggtgttattcattccccattttataggtaaggaactcagggcttagagtgtttaaataattagttgacagtcacaactggtaagttggagagtcagaatttgaatccatgtctgtttgacttcagtgtttattccttgcattgcagaaaattcagaaagctaccaaacagtttccaagtttaactgatagtgtttatatcctagacactggtagatgtcactagctttagctcctgcccattgtgactcttttctccttttcgcctttcttctatgtccttccttagtttaattcttctacttgaatgcaggggcaacctgaccttgagagccaagaccagggggagttaagaaacctgagttcttgtcccaactattaattgtctgtgggactttggggaagtcttgtaacttccttgaaccttagtttcttcttctgtccagggaaggcatctgactttaaggtgcagccttgaagagctgttccaggcttgatgtagactgtcttctttctgtggctttatgtcagctgaaattctgtttgacatggaatacaggggcagcaaggttgtgtgtagtcctgggaaggagcctgaaggcctctgatgtgtgaagtgaagtgaagtcgctcagtcgtgcctgactgtttgcgaccccatggacagtagcctgcaccaagctcctctgtcagtgggattttccaggcaagagtactggaatgggttgccatttccttctccagggaatcttcctgacccagggatcgaacccaggtctcccacattgtacacagacgctttaccatctgagccaccatgatgtgtgagtcatgactatgatccagctgccaagttcggcttcatcagcaaatatgtgagtaggcatttctaacagcaggaagcttaaaacaagtctaggcttggagaaaggatccatagcctgatgtgggcttgacaccaggcctctgtgataaaaaagccaaagatttcattcagtctcactatttcctcaccttcaccccaggtttaggaatgaatcatgtaatgtccatcttgtccatcttgtccatcatctgtgtaaagtttgaagttctgaaagtcattcttctccacactgtttttctcaaggagagttagtaatgatcacaatgacagcaaaatatccatatgcactgaggacaggacgatgatgcaaatgcatcgttttggaatggctggatcgttgtttatttgtttgtaaaacagcaaatgacgctttgacccaagatttcatgttgctaattaaaagaaacagtggggtacctgttattaggttccaggactgctgtgacaaattgccacaaacttgatagctgtatattaaggcatatatgtagaatctagaaaaatggaacagataaatctgtttgcagagtaggaatagagacgtagacatagtaaggagatgtgtggacacagtgggagaaggggagggtgacatcatttgggagattggggatgacatatatacattaccatgtgtaaagcagacagctagtgggaactgttgtatagcacagggagctcagcttgttgctctgtgatgacctagggggtgggatggggagagcatggaagggaggtccaagagggaggggttatatgtatacttatagctgatggcagatggtgactgcagccgtgaaattaaaagacgtttgctccttggaagttatgaccaacctagacagcatattaaaaagcagagatattattttgctgacaaagatctctttagtcaaagctatggtttttccagtaatcgtgtatggatatgagagttggactataaagaaagctgagcaccaaagaatcaatgctttttaactgtggtgttagagaagactcttgagagtcccttggactgcaaggagatcaaaccagtcaatcctaaaggaaatcagtcctgaatagtcattggaaggactgacgccaaagctgaaactccaatactttggccacctgattcgaagaactgactcattgggagagaccctcatgctgggaaagattgaaggcaggaggagaaccggttgacagaggatgagatggttggatggcatcactgactggatggccatgagtttgagcaagctctgggagatagtgaaggacagagaagtctggcatgctgcagtccgtggggttgtgaagagtcggatacaactgagtgactgaacaacagtatatatttgttttgcaaccaataacaggccctgcactctgttctttggtgtctttttttttttagaaaataattttggtgaggctgtatatatctaaagaacccctgtactgcctagaaaggagttaagactttgctgtattgcctctcattatttttttcttaactttaaaaatcttgtgtttgtatatcaaagactgaaaacatacaagcacttatacagtgtaaaatacaactacagggacttccctggtggtccagtggttaagactttgccttccaatggagggcaggggggtgcaggttgaatccctagttggggagctaagatcccacatgcctggtggccaaaaaacgaaaacataaaaaagaagcaatattgaaacaaattcaataatgacttaaaaaatggtccacatgaaaaaaaaagaacaactacaagatggataccgcccaaggcaagagatagctgtgggcaacccacaccgcccccacccttgattatatctagacttgtgtgatggtcatttccttgcttttcttgatagcttttccgcctatgtatgcaccttaaaaatggactttagttttgcctgcttttaaactttatatatgcaggatcaaactgtgtgtgtgcttgactttgtgagcttggtccaagctggggcatgtagtcggtggttctcactgcttgatggtgtattcccactgattcacccattcttttgttagtgggttttatggtgtattccctttggttcacccattctgttggtggacttttgggtggtttcgagtttggggctattactcacggtatagattttaaagtcagcacaaaagggcaaattgttcattcttcagccacattggcctcctcctgggtcctcagatacactcttagcgccctccctgcctagcatatcctttcttcacttacccaggaaactccctccctcgattcaagtctctacttaaagttattttatcagaaagatcttccctgaccaccctctttcaaacagtacttttcaccctcactctgacccttattcctgaggctgatcaccactagacatgaatatatatgcttactgtccgcttcctctggaagactctgagccccaccttcataaatttaaacagctcaaagatattaagagcttgtctgtgagtccggagagtgggattccagcctcgtttctgccattcggagccctgtgacgctgggaagtcacaagtcattcattcaacaaattgagcatccattaagtgtcaggtcctgttctaagcactccacgtacatcgttgagcaaaagagatacagatgctctcctcagggggcttttattatggttttagggaagcacaacaagcagtaagcatagtattgataaataaatcagaaggtaaacaaatacagtcatccctaggtatctgcagggagttggttccagaaagcaccgtctcctctgcacctcccccaacccagggatgtagaccctgtgaatacggaggtagagtcggggcagaagagcatgcgtgcaattttaaatagattggtcagagtaagcctcgttgaagaggggatatttaaacagtgatatgacggaggggagggagcgaggcgtgtggatatggggtgggggtgggcagggagcactatcataggagaatcagcctgtgcaagggcccggagatggccgcctgactggtgggttcagggaacagcaaagagaccagagtagctggcatgtcacgtggggattatggaccacggtgtgacctgggcttatattctatgtcagatgggagcccctggagggttgtgagggaggggtgacaggaattgattgacatattgaaaagatcactttaactgtgttaagaagagcgttggtagaggtagtggttgaaaaaggtgaaagtgagagaaagcgttagtcgctcagtcgtgtccgaccgactctgcgagcccatggactgtagtcctccagacttctcttgtccatgggatttcccaagcaagaatactggcgtggctagccattcccttctccatgggatcttccagacctggaaaaaggtagatcagtgggaaaaaaatggcagggattcttttgtaagatagaggttctttgacctggggagtggtactggtagagatgggcatttgtttaatgtgtggtcaataggattttctattggattagtgttgggggtgagagaaccaaggatgacttgaagggttttggcctgaggaaggataggtttcccatcttctaggtggggagactgttggtggggagctttggagggaaggtcaggggcttggtgcaccatgttgaacttgagctatggaccaggcatcctcatggagaagggaagaaggcaggccgtgcaggagtctgggacttgagagcgtgtctgagctggggattcagttacaagtttgagaatcttcctcaggaagatggcatttaaagctgtgagaccaggagttagtgtaaacaaggcagagaccaagggctgagtctaatcttcccgcaccccaatgtttcctcatctgggagacagaaaaatcatgcctcccctgccttcttcacagacttcttgtcagaaccatcttcaggcctttaaagcactgaatttaaagcagtgaatgaaacccatgatgatgtgagactgtttcagccttgggatgggagagacatgaagggtgagagcatgtcagggagcaagaggggcccagaaaagcacccgcagttttcttcttacatattgagaaggtagatacctctgctgttgaaggatgtcatgagaccaggtgtttaaacactgataaaattgccagaatccttgggatgatgtttagacttggggttcagtcatgttcaaacattggattaatactgatgtttctaagcctagagtctcccttagccctgttgatattggaagaaaagaatcccgagaggtttggcctcacaccctagctggggttggggatggaagctgaaactttgctcatcttaccttctgggagaaaagagcagcctttgcttcgcttcatgtgtgacttcagagtcacctctcagatgcctgaagttcataaaatatttaccatcagcagatggcgtccaggggcgaaacggcccctctcactttcctcaaacctttagagatcatttcacaggggagggagggagggagggagagtgaagctccgattcagtgccctcttctccctgctgtctgacctcctgggctctgtcccagaccccagggcctttgcacggagttctctttacacaaatgtcccacagtgctttacaggcttgagtgcacagaggttcccaagcttctgcttaagttgttcgctttaggtttttcttcgctctggactctccaccctaaggattcaaagttttaaaacaaagcagatgctgccttgcctgggtgatggagcaggatgaaaggaatggggagcagggatcttgggaaccaggctggtctgacaggtccttctccatgagttcaagccctcattcacttttaccttgattggtgttttggtgaaattattaacttaatgatttatttagtggtgtgccccacctctctaggccttcaaagaaaccaggtttgtaacttgaatagataagaagaaggtgatgggagtgaggtccaggtgagggagggagccaagcagagtagggggctcctctgcagacaggacagccgcccagatcctgagcttgagagcattactcggatgaaagtcattgctcaccctggggcagaagcccttggttctttcccctgttttatattgtcccctggggagaggatcagtgactaggcaggcagagtctgagactcaggggttgtcaggggagcactgctcctaattagaggatgctggggaggcgctgcctgtctggagacatcctaacaggccagtgttgaccttcctacagagctgccttcaggactctaggttaaggatgggtggtactcttagatgttggctggagtcatatgtgtgtgtctgtgtgtgtgtatgtgtgcgtgcttgtggggtggggagaagagagagaagacagaaatattgattaactgattgtgagagggtaggactgactggccaaggggcttccctggtggcttggtggtaaagaatccacctgccaatacaggagatggggatttgatccctgagttgggaagattgcctggagaataaagtggcagtctgctccagtattcttgtttgggaaatcccatggacagaggagcctggcaggctgcagtccatggggctgcaaagaggcgaacatgacttagctactaaacaacaatgagcgactggccaagaaggcacctgtcataatcttctcaaaacaagccaagaaattgtggcttatgaagccaaaagtggctagattactcaaggtcagatgctgtttatcaccttcccaggttgcatagtggtaaagaatctgcctgccagagcagacacgagagactcaagtttggtccctggatcaggaagattccctggagaagggaatggcaacccactccagtattcttgtctggaaaattccatttgacagaggagccctgtgggctagagtccatggggtcacagagagtcggatacaactgagtgactgagcacacacccattcaagtggatactggctaatgtctaaacctcctgcattagggaacttgtaatgagttatgtttgggatttcctttagtactttggggtcacagctctgtaacttttaaaagtacttgtaaagcagcttctctgtgcccacccccaccaggtgatgtgggttgtgaagaaatactgagtacatcccggtgactcagatggtgaagaatctgcctgcagtgtgggagacccaggttctatctctgggtcgggaagatcccctggagccttctgccagttccttactggcaacctgctccagtattcttgcctgggaaatcccatggacagaggagcctggtgggctacagtccatagttcgcaaagagttggacacgacccagcaacaaacactttcacttttcacctctaccttagagccgtggaacctatctttcaacttgttgagacaaacaaatgaaacagatttggggaaaaatgaaagactgagtttctggaacgtaactcaggtttcaggatctgagagggatgtgtactgtcctggtgaaaactgtgcccccggggtttggatgccttgagaagaagtcccaggggaatttgcttcccagggaaatcgggaaccacttcacacctggagtcagtatctgggccactatgtttgaggacccatcccatcccagcccttggatgcactctatgaactctatgactgtggctgcttagagatgccccttcagggaccttgtgctggagggtggggaccatcctgtcctgggagaagtcagacaactgtggagtctcgtccccatctgccgagtgggatagcgtcactgtcaccctgcccccctgagacctcagatggttgtacagagggagggatagagtgtggagggtctggggtaaagtgctgtgcggttttactggccgcaaaattgcttaggcataaagatgttggagttcatgctcttcacgctctgatgctgtccggtgccgcctgctctggagaattcctctttgcccagcgttcttgctccctgggctctcctgctctctgcagcctccttttccattcctctgaggcctcgctttccttcctccttgttcccagaggcttcctctggccccctggcttctgcggtgatgcagatgcatgagcgtttcccccacatctaggtctcctgccctgtcctcggtcctaagcccagatcctgagtgctctctgcgagtcctgcaggtgtgcaggtcagccgtggctcctcccgtcctctgtaaaggcatcaccctcacgcggtcagcactgactcccctcctcccacctccgtgtcacccatctggggtcaatagggcagccatggctgagtctctgatgctgcaggaacccacgcttgctgttcccacctctgtttctcaagcccgcaccctccttcacttgtgccccaaccagtatctcaaaatgtttcgaattaaacgtggacttatttagcagtagaataccacctttcctatgccccaaaggaatcttctctgtaactctcatgaattacaggtttgaaccagctgttctggttgtggttggtttgtggcatcttcctctctctgccgagcagccctgcccatctcctggcccactgctcccttacagtggccccgaggcccccgacactaggaactcaaagaccacggcaggaaagccacacccaccctcttgtgaccgttgattgtgacagcctcctaagccctgttccttctttatcgagagttgttgctctaaaactcagacctgacaaggctcagaatcgcttcgataacttatcaccgttctcagaaccaaagttgaactccttgaactccagcagaccccaaatgtccttttcttcctgtctgtccatttccctccgtgggagcctgtgtggtcagccctgcgtgaacacttgggagttcccccaccctatggacactttcagtttccataccctgtaggtgtccctctgtcaggaacaccattccctttgcttctcttctctggagaaaggctctgtgcttctcaggtctgggttagtatttactccacgtaacctttctttaacttccttctcatcacacataatgtgtctctgtctctctgttcctacaactttctgtttgcacttaaaaagaaaattcacttgcctccttgtaatatagtcacaccagcaacaggggcaatgccgtttatttgtgagttcctggagcatccagcccagtagcagtatacagttgaataaacgaatgcatgaatgaatgaatgagatagacatgcttggtaaagctcgtacaggcaccaaggcatcatttgcctccctgtttgttggctcatcattcttaaaaggagcgagtggtgggtctctctgttcagcttttgcagtgtcaggcagctaagggaaaacggcatttctgacaatcttgtggctgagctgtgtctgactccctgaaagtcgctccttctctataattctgatcactctatccagtctccgcccctgcacttctgaactggagagacttcaagagcacttttcagcatccattcaggtagctggcctcctgtagaccttggctccaagctcccatcccctctctgtcccagttttcatgagcgggctgtggttggctctcccaagcctgacccagacgtcatcactcaagtgctggagtccatccctagctgggagggttcctgtgctgaacaccagtttggagacccaaactttgcttcctgttgcaacatctccttagtgccaacttctgaatatttcatgttggtttaagccttaacattaccttcagcccagttgtccgtttctcttatccttccttcccagatgctgtctgcttatcaggcgcccactgtctgccctcctttgccattcactcctgttacacctgcagatggccaccctgtggctgtggggcattgtagctctgcctcagacgagggcatcactcaccgttcaggtgaaaagccagagcgcttctaccctctcctgctcctggattatgcagggtaatacctatcctgtctcacctgagttgcttcagttccatcttaatgaatccctcaggtccactcttcacccctctgaagcattcttcacactgtagccaggaagattttttttttttaattgtggtaaaagtcacataatataaagcatactgtgttaaccatggtcttccctgatagctcagttaaagaatccgcctgcaatgcatgagaccctggttcaactcctgggtcaggaagatccactgaagaagggataggctacccagtccagtattcttgggcttccgtcttggctcagttggtaaagaatctgcctgcagtgcgggagacctgggtttgatccctgggttggaaagatcccctggagaagagacaggctacccactccagtattcttgcctggagaattccatgggctgtacagtccatggggctgcaacgagttggacacgagcaagcgcctttcactttcatgttaactgtatctgactgtacagttcagtggctctaagtacattcacattgttgtacaactctcaccatcatccatctcccggatttttcaccttccaaaactgaaactctgtccctattaaacactaagacccccttccccttccccacctcctcccactcttggcccttctcatctaccaatgactttttttattaaaaaaaaaaatatatatatatatatatatattatttggctgggctgagtttaagttgcagcatctgagatctagttccctgcccagggatagaacctggatcccttgaattgagagccgggattcttagccagtggaccaccaagaaagtccccagtgtactttctgactctgtgcatttgagtattcgttgttgtcattgttcagtcgctgagttgtgtccgactcttttcaaccccgtcgactgcagcatgctaggcttctctgacctccactgtctcccagagtttgctcatattcatgtccactgagttggtgatgctatctaaccatctcatcctctgccatccccttttccttttgcctttagtctttcccagcatgccggtctcttccaatgagtcagctctccacataaggtggtcaaagtactggagcttcagcttcagcatccgtccttccagtgaatgttcaggattggtttcctttaggattgactggtttgatctccttgcagtccaagggactctcaagagtcttctccaacaccacagttcaaaagcatcaattcttcagtgctcagcattttttatggtccaactctcacatccatacgtgactattggaaagaccaatacactgacctttgttggcaaagtaatatctctgctttttaatatattgtctaggtttgtcatagcttttcttcgaaggagcaagtgtcttttaatttcatggctgtagttaccatccgcagtgattttggagcccaagaaaagaaaatctgtcactgtttccactttttcccctgtatttgccatggagtgatggtatcagatgccacgttcttagtttttttgtataagttagccagaaaaatcttcaaaggtgtaatattgttcatgtcacattacagtcctgcttaaagcccttctgcatcttagctagcccctaggaataagggccacatttctaaagaatgttagaaaacacggcctacagagccaagagtatctggccccagctgtctcctcagcttctctttcactcacgagccaacatcccccttctttccttaccttcaccctgcttcagtccacccctgggcctttgaacctgccatttccttttttggaactctgtttcttgtctttcagcttaaaactcatttaaatcccttttttacaacgcctacctaatgcctacccctactgcctctcacagcagcagagaagctgcttccctggtggctcagaggttaaagcatctgcctctaatgtgggagacctgggttcaatccctgggtcaggaagattcccctggagaaggaaatggcagcccactccagtattcttgcctggagaatcccatggacggaggagcctggtgggctacaatccacggggtcgcaaagattaggacacgactgagcgacctaactagctttgcctgcctctcgcagctccatgagctccccctttggagcacttaccctgcttttaattagactggcgtgtggtcattcgttactctctgtccctccctagactccaaggtccagggacagggaccacgtttgtgttgctcacaattttataagccctgtgagtaacgtggagtcagggacttgtacatattattaacgtcagatgaaggggatgaccccagcatgacccaacctgaccagtcccacagaagttaaccaggtctttgtataagcatggcctaggtatgacactctgccactcagctcctcgtaaacatagatactgcctcgtaaagggtaaatcatgacccaggtgtcagcatgtggctcctgaaatccttactcagcatccagtactgcttattgaaagtattcagatgtgcatgtttattacttaattttcttgttgtaagaaatttgatagataatatcaatacataccattgtactttgaattcactcttatttccttgaattcagaactggtaaaaatttcatctcttcatattaattgtttgcttcttttaatcacatgagaattctattcctcattggaattcctttttttttttttgtcttagctgtcagggtattcatgataatttcatgtttaacatggtaagattacctctgccagctatcctattttagctgtcctctgttgttttaaaagcgattttttaattgttctgttgtgttatgcttcattattaaaaacagtgcagattcttttgcttggaatatatatttatatgttgtgtgtgcatgctaagttgctttagccgtgtctgactctttgcgactctgtggactgcagcccaccaggctcctctgtccatgggattttccaggcaagaatactggagtgggttgccgtgccctcctccaggggatcttcctgatccagggattaaacccctatctatctctcagtctcctgcactggctggcgagttctttaccactagcgtcactgtgctctagagcccgtgctccacaacaggtgaaccctcccgccacaactgttacatgttactgagagagttaacttcagttcagttcagttcagtcactcagtcatgtccgactctttgccatcatggactgcagcacaccaggcttccctgtccatcaccaactcccggagcttgctcaaactcatgtccatcgagtcggtgatgccatccaaccacctcatcctctcttgtccccttctcctcctgccttcaatttttcccagcatcagggtcctttccaatgagtcagttctccacatcaggcagccaaagtattggagcttgagcttcagcatcagtccttccaatgaatattcaggactgatttcctttaggattgactagtttgatcttgcagtccaagggactctcaagagtcttctccaacaccacagttcaaaagcatcaattctttggcactcagctttctttatggtccaactctcacatccatacatgaccactggaaaaaacatagcattgattagacagacctttgttggcaaagtagtgtctctgttttttagtatactgtctaggttggttaaagcttttcttccgaggagcgctaagcattaaggagagttaacaagcaggttgataagaagtccaagcctaaggcccctttaaggaagaggtaaacattctttctttttcacacttttttgccttagacaagtaggcctcataagcagcagtatctcttgttcaaggacctgcctttttttgagctttggatgcatgttatgggagaaaatctgggtaaaaactttcacagccttgagctctgagttaacctgtttcttctggctaatctcatgctgatgtcatcctaggatgtatgttatgggaaacggtctgggcaaaattctcacagccttgaggtatttttttcctgttcttagcagctagcagaaaagtgtataaggccccgctaaactagtgaagcgggtactctttctacccacttctgatgtctatgtcagaagctttctttgtcctgtcattttaaataaaattctgcacacaaagctctgagtgactgagacctgtctttggtcccagagttatttatttctcctttggagaccacgaagccagtggcactgttcactgtaagctatcattacattatgcaatatgtaatatattttaatttatatgttacttacatgtggtgtatatatatatttagttagttattttgggtctttgttgctgcacagcttttctctagctgtggaagtcaggggctactctctggttgtgatgtgtggctcctcttgttgcagagcccatagttgtggctcttgggcctagttgctttgtgacatgtgtatcctcccggaccagagattgaacgtgtcaatccaactgcattgacaggtggattctttaccactgagccaccagggaagcctgatgtatgtattacatgtaatatgtagtacaaagcccttatgcccccttttcttatcccatagtggtagcaacgcatattcttcgtttggagccacgctggcgagggacgatgaaaagaatttgtggagtatgcctcacgacgtgtcccacacagaggcagacgatgacaggatcctgtacaacctgatcgtcgttcgcaatcagcaggccaaagattcagaggtaagcagcttttgagatcttgctatgtgcagatggtaatgcacagcaaaagagagcaatgacagaggaaaacagcttgaaacagagaaaagaatgaagcatgatatgtgtgaaacgaagggcaggtctcttagcagcatctagtcatgaattatagctggtcttcgtatacctgcttaatacacagataagactgatttctaattgttgctttagtgatataaattgcaactgtatggaaagagcaaggcagtgctgctcagaccatgaagatgctttatggtcttaactagcttaaccagtccatgtctaatctttccagttgtttggcaagccacagttcaacattcagactgaaggctggagggtactttgcatcatccccagttttgaattaatgtttttttttttttttgttttatcttcttgaattgtgcttattgatcaaatagtttatctggcgtatttgagatgatttgtgtgataaggcttgaaatcactcttaatggacttttaatcaaaggtattgatacaggaacactagactattgaaaaggagatgacttcataaattaagagaaaacagcagaagggatcatattttattttctctttttttttaaaaagtagtagtatatactataacaatacagtataatgttatattataggtgtctttttccatataatacagcctaagttttctaacctctgtgttcaactgtcagttctgagtagatacctatattagatatgacttttatatgttcctttgtatattatagtaatcgagaagaatagggacatttaaaatgccaggctcttgctttgaagtaaagtaccagagtgtgtgtgtatggggcagttatggcaagggagatctgtttcttatgtaggtttctttatatttttgattattaattgttttttctccaaaacatgctgtagcaggatatgataatcttttttttttttttggccacatggctcgtaggatctcagctccccagcccagagatcagtcccccacccgccgcagtggaagtgaggagttgtaaccactggactgccaaggaagtcccagtaacttttagaagagccacgtgtcccagtccttttattctggtgtgacctggggtaccttagggggatagaggcagacttagaagtgaggaatcacagttgcctctggctcttaaggcctgagggaagggcagctgaagagtccccagtggctttgatgaacatcctttcttggctgtggggtcttgctgaggaccgcttctacaaaatattggtcacagggcttaagtcaaagactaggagaaggaaatggcaaccctctctggtatttttgcctggaaaatcccatagacagaggaactggcgggctgcagaccatggggtcacgaaagagtcagacatgtcttagctactaaagcagcaccaccaacatcctactagtggccacatgcctgctacccccggcgccccttactcccactgcaatcccctcctccactggcaacattcgaaagacatcatacaggctgcttaggccaggaacagccgtcctggctgcccctcccgagcatatggacgggaatgcatgcatgacctagtttttcctttaatgggaagccatttagggtttctgctggtgagaatggaaccagttctttttttccccttttctttccccactctgctcaaagctgtgacggtaatagggaaatgaaacgtatagtactcctctccctctccccccacagggtctcatgccaactaggaaaggggcttgaagggtgtttgcactgggcctggcagctctctcagaggagctccagcttctctgccctgtttacctttgctattgaagaatccgtggaggaggcaatgtgagctgcaaatcgctctgaataagcacagcttccaaagaggccattgtgtcattttgtgctgcgcttgggcctgtgtgaagggccttccagagggcttgcctaagaaggaaagtcaagtttaactctagagaaagaaaccctgcaaccaagacaggccatcggtcaacaacatgaagatgtgatgatgtgatgatgatgatgaaatggtgtggaatgtctattcatagtgcttccttctttttaggtgtaaaatatatatacaaatatattccctggtggctcagatggtaaagagtctgccgggggtgcaggagacatgggttcaatcccttcatcacgaaaatcccctggagaagggaatagctatacactccagtattgttgcctggagaattccatggatagaggagcctggtaggctatagcccatgggattacaaagagtcaaacatgactgaagtgactaacacactatatctatgtatatatatacatatatacacatatataagtgaaagtctctcagtcgtggctgactctttgtgaccccatggactatagagtccatggaattctccaagccagaatactggagtggatagcctttcccttctcagggggttcttcccaatccagggatgaaacccaggtctcctgcattgcatgcctcccgcattgcagttggattctttaccagctgagccaccagggaagccccgtacatataaaggtgtttataaagtatgtatttgaaggtatatgggcttccctggtgcctcagtggtaaggaacctgcctgcactgggaagatcccctggagggcggcatggcaacccactctagtactatcgtctagagaatcccatggacagaggagcctggaaggctgcagtccatagggtcgcatggagttggacacaagtgactaagcagcagcggcatctgcacatacatacatacatacatacgtatatacataatatataaagaaagtgtaagtgttagttgctctctcgtgtccaactctttgcgacccatgcactgtagcctacaaggttcctctgttcatggaattctccaggcaagaatatatatacatgtggttaaaagaagtttattttctaccaaaagtatgatacgcatattaagaggattgttgttcagttgctaagtcgtgtctgactctttgcaaccctttgaactgcagcacgccaggcttcctgtcctttaccatctcccagagcttgctcaaactcacgtccattgagtcagtgatgccatccaaccatctcatcctctgttgcccccttctcctcttaaccctcaatctttcccagcatcattctctacacagattggatcatatattacatatcattctgtactttgttttttttccatttaataatatattttggacatatttccatttcaccatgtgtagatttcccttattgttttgaggggctctctgttctcttgcattgatttcccatcatttattcagacagtccctgttatttaggttgattcaggttgattcaggttttttgttgttagaagcagaagcagtgcctcagtgggtatccatatgtacttctgtgatcttctgttgttttttcaggtgtggaattactggatcaaagagtacatgtgtatttaaaatgtaggaattccttagtgcttcctttgtggaagaacctaggaaaaccacgttagggtgcagaactgagtaacactggaaattcacacagtgtttaagaggagcggctgctgatctccagatagctatttgccatgctgagactgtggatctggaagtgccagaactctggatttttaagagaaacgaaagccctaaatttacatataaaatgttcagattattaaatgatagctcacattaaacatgtgtcagctaaacaaaatatgtttatgggctatatacgtaatgtttacaatacagactgctgccactgctgctgagttgcttcagtcatgtctgactcggtgcaaccccatagactgcagcccaccaggctcctctgtcccggcaagaacactggattgggttggcaagaacactggattgggttggcatttccttctccaatgcatgcatgctaagttgcttcagttgtgtctgactctggattgtccaggcaagaacactggattgggttggcatttccttctccaatgcatgcatgctaagttgcttcagttgtgtctgactctgtgtgaccccatggacagcagcccaccaggctcctctgtccaggcaagaacactggattgggttggcatttccttctccaatgcatgcatgctaagttgcttcagttgtgtctgactctgtgtgaccccatggacagcagcccaccaggctcctctgtccacaggattctccagacaagaatacagactactactactcaatattattattaccttgttcaataggattgaaaatgaactaactgtgaatttagaaggtagaagtagaaatctgatggtgggtgtatctatagcttattttctttttcatgcaggataaaattggcacaaattttaataaaatagaggattttagttttttgagagaaaaacaaattccacctactaaggaataaggaaccctagatatttttgcatgaggacgatttagaaactcaagcaaggcattaaggaaaatttaacattgtgttttttccttgagtagcaatagcgtgaaaaacctaggaacgtctgtacttggaattctctgaaaattgaagagtaatttcaaaacagtgtgtgtatcgcctacattcccttactgaatctggagctggtgggagaagggctatgagtatagttaaggctaaatttgcagtgttgtcccaaagtggaaaaaaaatcagaaaagacgatatataggaggacaaataatgaaccatggcctgaatttaaagttacttgcagtgtcagaaaataaaatagtaacactatttaattctaacacaatccactttcatttacacaagccttcaaaagcttgaagacagcagaactgatacatttacagacttccaagtagtggaaaaattttgctgttgtctttaattttggaaaatattttatgcttaactaagaaataatagggacttccctggcagtccagtgtgttttgaatggaggggggtgtttaaaagaaaagttatgaccaacctagatagcatattcaaaagcagagacattagtttgccaactaaggtccgtctagtcaaggctgtggtttttccagtggtcatgtatggatgtgagagttggactgtgaagaaggctgagcaccgaagaattgatgcttttgaagtgtggtgttggagaagactcttgagagtcccttggactgcaaggagatccaaccagtccattctgaaggagatcagccctgggatttctttggaaggaatgatgctaaagctgaaactccagtactttggccacctcatgcgaagagttgactcattggaaaagactctgatgctgggagggattgggggcatgaggagaaggggacgaccaaggatgagatggctggatggcatcactgactcgatggacatgagtctgagtgaactccgggagctggtgatggacagggaggcctggtgtgctgcgattcatggggtcacaaggagtcggacacgactgagtgactgaactgaactgaactgaactggggaactaacaccccacattccaaaccaccaaaaatttttttaaaaatagtaaacaaccacaaaatcatgtcaataaatcattgtccttatgttcattctcattaacctagctgtatacttcatataacactctgtattctagggggcctaataatggttaatgaaataccattgcaccttatttgttttgtataagtaattctagtcatactgaccgaccctgccctccaagataataatgacaactgtgccaagcactgttcagctgcttgacatacattgtcctctacataacagccgtgagatggatgccattattatttctttttgaatcaacttgttcaaggccacaccattgaaatatggagccaggatctgaatctggactttgtgaatctagagacgtaaaatgtaatgagcaccatgattgaagttgtaagagaggactagatattgtctgtgattccatgaagatttcaaaatgcacgggcggaatctatccaaagtctatttctgtgactttttgaaaccagtgatgtgaaaagcaggctcacatcagtgggatgagaaatgtgtttggcttggggattgtgaccaaagttcagaaagtggtccctgtcaaaatccacctttcccacattatggatctacacgctggttaagactggttaagtacagctggttaagactccaaccaagtgttttggttttattagttccaagattcttcattgtgtttcttcttagcccttcattgtttagtgttctcttgtcttgttatttggtgtctctttcgatggttcagtaatagatcttttaggagtttgtgcatggctttgagatttttttactctgttcaaaaatacttacattttttattaagaatgtgagtgctgaaaatcagaccgttctcataaacatgattaaggactattttggttcaaaataggtaatgtttatgtggcacaatcggtgatagaaatgctaggcttgtttttaaatctattcaataattacgtgctcggaaacgtaccttgttctgatgatgagcttctatcactgagtgaagtagtgtttacgcactgcagcagccacgtgaacaccagatgccacgtggctcaagggatcctgtgaaaacttgaaaatctccctctgctgagccccagggagtgggctgtatgttattgttcttcaaaactttacaggcaaaaacataaaatgttcctgtttacaatttgtttgttcttcctgtgtgtcgggactccctgctggcagagtgttgccaggcattgtaaacagttcctataaaacatttaaaagagtgacagatgttcccaggggtttgtttgcaacgtctggattatacgctcagcctgtcatatccctggtaccgaaagaaaggacaaaagagagttaagtggaatgtctggtcggaggatgtgagggggtggagagagggttgagttgattgggtaccagccacattacttggaagcacttggaggcgggatgttctggtggggctctgcatgactccctccaagtcttcacttgctgagtggggcttgctctggtcaggccctctgacttctctacaagtgggtgaacactggctacagttggcgataggactgtaagttttaagtcaagcgtcaaggagcaaaataacagtggaaaatggaagcgattctgtgtaattctgggcttctcaaaaggcctctttgtttaggatgcagatgatccagattgttgaatgtaagcattcttttttttttttttttaaactttttattttgtattagggtatagccgattaatgaacaatgttggtagtttcaggtaaacagtgaagggactcagccatacatacgcatgtatccattctcccccaaactcctctcccatccaggcatgcaagcattctttatttgactttgctagtgactgtttgggttagagggagagagaataaaaacactcattaggatctgagaatcaagtcgtcttaccctctgtgttctaggtaataatatttatgggggttcatgctgggtgctgagcagaagcgcccttcttgatgtgtgtgctccagacaaaaactcaagcctcacagtaaccctatgaagaaggggttttgacacataagatcagagactttgaccatctgtccaaggcattgagagtggtgcagctggatcatagttcagtctgtgtgtatgacctggaagtctctatggacagaaacacttgctgccgtctctctctcgagcttagaaagcgcttcagtggaatctttttggtcaaagacaaagtgaatgggtgttaatcaaatgggtgttgaagtgaagtgaagtgaagtcgctcagtcgtgtccgactctttgcgaccccatggactgtatcccaccaggctcctccgtccatgggattttccaggcaagagtactggagcgggctgccatttccttctccagggcatcttcccgacccaaggatcaagcccaggtctcctgcattgcaggcagatgctttaccatctgagccaccagggaagccaaatgggtgttgacttcctgccaaagtagctgccttgggccgtgtatttgtcaactgtttctcaccctgcaccaactgaatcacagagtggatgatgttggcatttgtttagtatcagcctcgctggtggctcagacagtaaacaatttgcctgcagtgcgtcagacctgggtttgatccctaggtcaggaagatctcctggagaagggaatggcaacccactccagtattcttgcctggagaatcccatggacagaggagcctcgtgggctacagtctgtggggtcacaaagagttggagacgactgagcgactaacaaaacagcaaacctctgttgtgcagtgcatgcaaacagcctctaggtgctgccgcctcgggaacttttcacacctcaggcaccattctgggtacaaaaggtctgttgggctccaccgaagacattgtctgtctgtctgtaatgttcttttctattctttgcccacccccgacttcaaaaatctaagcattttggatattagcattaaggtgatacgtgtttcttagcaagtaggtagcacatcaaaactctgtgtaagccaacagagttgagacagaaaatgaagcaggcaaagggaaaatcattgtagatattcagtaggatgtgaggtggtgaaaggcatgcgttttggaattagacagttggggatgagaggcatacctctgccatgtcctgagatgacactgaatatttagttatgtgacctcagggagttcttactgtttattgtccaatctgggacacgatcgcaaggtcttaactaagaggacgggggaggatttctctggtggtccagtggttaagactctgcttccagtgcaggaaccgagggtcgatcccaggtcgggaaatttaagatccagcgtgctgcgtgccgtggccaaaaaactttttttaaaaaaaagaaagaagtttcctaatattgaatatgtacaggcatgtgtgcttagtcatgtctgactctttgtgacctcatggaatatagcctaccaggctcctcagtccatgcagttttccaggcaagaatgctgaagtgggttgccattctctactccaggggatcttcccgacccagggatcgaacccgtgtctcttgagtctcctacattggcaggtggattctttaccaccgagccactgagtatgccaggccaaacatagaaatggaaactgctctagttaagctggaatgtatgatcacctttttaaaaagtgtggtaaaatataaataacaaaaattgccattttaaccatatttaaatgtcagttcagtgtcaactaagtacattcacattgttgggcggccatcatcaccaccacccccaggacttttcatcttcccaaactagaactccatatcccttacacgataactcccttctcccctttcgcagcccctgaaacccagctttctactttctgtctctacgaatgagactgtactaggtacctcgtattaagtgaatcatacaatatttgtctttttgtgactggctgacttcacttagcctaagatcctcaaagttcatccatgttgtagcatgtgttagaatttccttcctttttaaaactgaataacattctattgtatgtatagaatacacatggactgtagcctactacactcctccgtccatgggattttccaggcaagagtactggagtggggtgccatttccttctccagaggatcttcctgacccagggattgaacccaggtctcctgcactgtaggcagatgctttaccatctgagccgccacggaagtcctattgtatgtataagccacattttgtttactcattcttctgtcagcaggcgtttgggttgcttccaacttttcgccagtgtgagtaatgctgctgtgaacatggttatacaaatatttgcttgagtccctgatttaaattcttttgggtgcatacccagaagtggaattactggatcataccataattctatgtttaatttttgaggaatcaccatactctttcacagtatctgtaccattttactttctcagtagcaaagcatgagagttctaatttatccacagcctccccaacacttgttagtaagatcacctttcttaacctccacactgatcagtgaaacagctgatgacttcagattgatcagttttcacatccagatagagacagttgcagctgtggaccactcaccaccactgaatattagtattagggttataaacccagaagaaactgatgcctccttctgaacgacttgtccacggaagagaaatagagagatcagaagactgggagagctctttgtatgtgaatttagttctgtttttttcctgagcatccacatgctaatgtgtaatggccaggccctctttctattcctgttccttagattgtccttcctggcctcctttccttggagctccagaaaggtagtagataatacaccttgggagtactgacaggtcagtgtcagagaagatggacaatgccttggggacctctaggaagatgcagtgcctggaggagaagggcagggagctgtccatctctttccattactagaacttcactgtcgcagtaacaagtggctgcatttttgggtttcctaagttaccgtgcttgtgctggtgaatttccagaagacagaccacatgtttattggtgctcatgggcaggatcatttgatgataagaactgtatctctccgttagttttcctaaaactggcataaagcagaaaccataaagctgcctcagtgcgcttcagtgcagttcagtcactcagtcgtgtctgactctttgtgaccccatggactgcagcactccaggcttccctgtccatcaccaattcccagagcttactcaaacttatgttcatcgagtcagggatgccatccaaccatctcatccgctgtcgtccccttctcctcccttcttcagtctttcccagcatcagggtctcttccagtgagtcagttatttgcatcaggtggccaatgtattggagtttcagtttcagcatcagtccttccaatgaatattcaggactgatttccgttaggatggactggttggatctccttgcagtccaagggactctcaagagtcttctccaacaccacagttcaaaagcatcaattctttggcactcagctttctttatggtccaactctcacatccatacgtgactactagaaaaaccatagctttgactagatgtacctttgttgacaaagtaatgtctctgctttttaatatgctctctgggttgatcatagcttttcttccaagggggaagcgtcttttaatttcatggttgcagtcaccatctgcagtgattttggagccccccaaaataaagtctctcactgtttccattgtttccccatctatttgcatgaagtgatggggccagatgccatgatcttcgttttctgaatgttgagctttaagccaactttttcactctcctctttcactttcatcaagaggctctttagttcttcactttctgccataagggtggtatcatctgcatatctgaggttattgatatttctcctggcagtcttgattccagcttgtgcttcaccagcctggcatttcacatgatgtactctgcatagaagttcaagaagcagggtgacaatatacagccttgacgtactccttttcctatttggaaccagtctgttgttccatgtccagttctaactgttgcttcttgacctgcatacagatttctcaggaggcaggtgaggtagtctagtattcctgtctctggaagaattttccacagttgttgtgatccaactgcctcaagttgtatatttttaagtatatagttcagttcagttcagttcagtcgctcagtcgtgtccgactctttgcgaccccatgaatcgcagcacaccaggcctccctgtccatcaccaactcctggagttctagttataaatttgaaacatgagggattatcagcaaattaagccttcagtgaactacctccgtgatgactttgttttttttccttgaacaaatgagatcatcagaaataccttcctgtgtagagtcagggagactcctccacagaatacctggattttcacagcagatttttgatgtagatgagttattaatttaaaaaaagtgagagaggcttccctggtggttcagtggttaagactctgagctcccaatgcatggggccccgggttcaatccctgatcagggaactacatcccacatgtcacaactaaagatcctgcctgccacaactaagaccccgttcagccaaaaaaatatataaattaaaaaaagaagaagaagaatgtgagagagagaccctaagaggttttctcttcctgacagcatccagaaatgggcttgtgactcagggttcgatgcccttccctctagggaggagaagagctacaggatctgaggattgagggcagatagctacaggattgtctctgttctttattttaaatgggagcaaaaataatcatgtggtaaaataagtctctgggcctagaactttgtacagaagattgtaaaacactttccagctatttccctctttaaaaaacaccagtatgtctaatttttcaaggtatctgctatttaggatttgtttcaacaaaattctgcctaatgtgtctaacctatttattggttaattttattaaaaacaatgtgtctaatggtcagttaggcaagcttgatttcaaatgagtactttcagttcttcatatccccgagagtctagtattttctagtcttgatgtttatttagtgttaacaatgcagaaaattcctttatgctcttcttgcatctacttcctctcaactcaatacaaggatgaagtgatttctatttgccatgcagttagaatttctgctttcatcaaagtaaggacctgctttcaatttcacaactgttcttaggtcaacgtgatgggcatgtatgccaggggcctggttgtttgctcatgcaaatctcacaggcttatgataccgtgggtgtgtcacttccgccccagatctaatactcagctttgcaggtctgtgcacttgattttttcagggcacacagagctgtttgaacttagggggcatattattcagagaaacagaagcaggaggatgtgtgcgtatatctgtatctctatatctgtatatttattcctatatctatctatctctacttctctatcttatctatctctatcattctatcatatttacctatttacattttttgttaaggaaatggttcacacaattgtggaggcttggtgagtcagcatctgatgggggaggccggagatttaggggtagttgcaattcaagttcaaaggcagaattccttcctgcagagaggagggtaatctttgttttaatcacaaccttcaagtgattaggtagggcccttccacattgagcttccttcctcagctgataaagaatccgcctgcagtgtgggaggcctgggtttgatccctgggttgggatgatcccctggagaagggaaaggctacccactccagtattctggcctggagaattccatggactgtatagtgcacatggttgcaaagagtcagacatgactgagccaggccacattatagagagtactctgctttactcccagtgtgctaatttaaatattaatctgttacacagaataccttcagagaaacatccagaatatttgaccaaatatctgggcgctgtgactcagccaacttgacacaaagatgaaccatcatagaggattttactaacactaaccaaatttgcaagagactgccatgtaaacccgaatgtatgtaaccatttgatgggccgtaaacctgactaatctgtccagcctctcccatataatgaaatatgtaaaggaagctagtgaccacactggaaggtgactggggaagaaggatcagagctcagcggccactgacatcagaggaacacttgctgctctcagtacattacactgtgctcttcctcagtcactaagtcgtgtctgacccttttcaactccacggactgcagcccgacaggctcctaagaggatttcccaggcaagaatactggaatgggttgccgttttcttctccaggccaagccaagtgaagttgcttggttgtgcccaactctttgtgatcccatggactgtagcctaccaggctcctccgtccatggaattttccaggcaagagtactggagtgggttgccatttccttcttccgaggtacttcccagaccagagattgaaccgcctatgtctctttacaactgagtctccagggaagccatccatataccgtgttgacagctgttgtcctccagatgtgataacctagaactttcacccccggtataaagttattcctctgatttggtcaggacacctggccccttgatggtggtggatagaggtttctgaacatcacccccaggtgacttgtagcttcaggaactggacataagcaggggtttgggagggcaggcaatgggatatggaatcaagggagatccagaataatgtaatattagacgaatctgggctgccgtctatggggtcacacagagtcggacacgactgaagtgacttagcagcagcagcagcagactgagagcaggggctatttgtttagtcactaagtcatgtcccagtctttgctaccccacagattgtagccctctaggcttctctgtccatgggattctccaggcaagaatactggagtgggttgccatttccttctccagagagcaagggagatatttcagatattttaaactgaagaggctaggcagatacccaacagagccagcagattagtaatggaaggtaagatctctagacatttcagttccagtgaaataatctatgtagatttattgcagatagaatttaatgcattgccaaggctcagcaagtcctccctatcccattttctcccatggaacctcttgactcttttctcagtccaatagtgatgtcatgtgtgttgcctatggacagctacacttctaaaattgaagacacattcattttcttcatttgttatttaatatataaagctggactgagagcatagaaattgaggaggctgttgagctttgcggaatctctgcctaaatagactgtggtggccttcagcagttatatattttcctcttcgcagaaaggagagagcccaggggaagtggtgacctctgagtggtatcccttgtgatcagaatagctccttgcttcctcatcagtccttttggccccattcattggcttgaaattcttctaaggtggagtagcataagtatcaaatccaagttacatcaactcaccgggcagttctgctgttggcagtccatcctgtacatattcttatactgttaaacaaagatacttgttctttgcagtagtgttttgaaaggtgaacatctgaaataaaaatcttttttggttaaaaaaataatgaggtttaaaacaaaaagaaagcagtgcttgtgatgagccagtctaaagcttgaggcaaaaagaaaggtcagttacactgtattgaaaaatgttattatttgttcattgtgtatttttttatgttatttttaaaaatattgcattaaaatatttatcttgagaaaaaaaaatgaggtaggatttacagatcctggcttggaaagatagttatgatctattgctaagtgggtatgtataatgtgtagaaaaatgttccatttgtataaaagtatatgtatgctaatatataactaacaatttcttcataggaaggtcacctatgaactttttttagctttggtgacctctggggagtagaattgggtggtaaaaaggatactttctcttttaatttcatgatcttctttactgacagcagtacatacgtgtgttttgcttctgtgtacatctgcttggtataaaataattatttcacagcacactttgtggaggatatttccctgggtctttctaatctgtacgagtgtgggtatgttgaagaaaggggaagaagtgggaagaaggagagagggaggaagggagagacaagagagattaaaagagaaaatgagagctagtttaggaggaactggagcacgctttgaggaatcctgccaaaatggactgaatggcagaatgtgcatgaagcagccagttggtatttatctttttaacattctaagattcatctgataaggcaggctctttctctggagcttacctcctctccaaccgcctgtgaattcacatggtaattaacagagccgcggttgtccgctccttccccacccccaccttctccgctacccctcccccgccgcttcttttgattggtcttgcttgtcttagagtaactgaaaatggctcttaattgcacagagcctgccagagccctggatactggtgtgctgggactgcagggtgtgaatgtgctcagctggggaatctcggaaggcttatggggagtcctctgtaagaacagctttctggttttgagtggatgtggggagtgggagctggaggggaggtgggggtggatggcagcacccgcctggttctgttgggggcccagatctgtggcttctccaccctaaaatcccaagtgttctggaaggagatcatgtttttcttgatatgaaaccacccttccatttaggtattcagtccctgggtaactgttgttacatcataattagaccgcgtgaccatgctgttcccccccaccctggagggagctgtgccctttgatgggtttgcaatacaagaggcaggtcaggtgccttatgaatgaatacaaactgggtctgccctcttgaaataatcctcctgtttaattagaaatgaggtgaggtaaagtcactcccaagcttgtttaccacattgctgttgtcattgttattattaagtaacttggagcctagacctagagattatcatactaagtaagacatatagagacagacaaataccatatgatactactcatatgtggaatctaatttttaaaaaagatacaaatgaactcatttacaaaacagaagcagatttataaatgttgaaaaaaaacttaatgggtaccaagcaggaaatgttgaggggtgtgtggataaatcaggagtttgggatgaacacaccagcactgctatgtataaggtagatgaccgaagggccctactgtatagcacagggaactctacccagaattatgtgataacctatgtgagaaaagaatttaaaaagtgatgactatttgcacatgtgtaactgaatcactttacagtacaccggaaactaacagaacattgtaaatcaattatactccaataacattaaaatattttttgaaaattaaatgtgtctgtgtgtgttagttgctcagtcatgtctgactgtgtgtcaccccatgaactggcccacaaggctcttctgtccatgggattctccaggcaagagtactggagtggatcagtcagttcagtcgcccagtcgtgtccaactctttgcgaccccatggactgcagcacgccaggcctccctgtccattaccaattcctggagtccacccaaatccatgtccatcgagtcgatgatgccatccaaccatctcatcctctgtcatccgctcctcctcccaccttcagtctttcccagcatcagggtcttttcaaatgagtcagctcttcgcatcaggtgatcaaagtgttggagttcagcttcaacatcaatccttccaatgaacattcaggactgatttcctttaggatggactggttggatctccttgcagtccaagggactctcaagagtcttctccaagactatagctcaaaagcatcaattctttagcactcagctttctttatagtccaactctcacaaccatgcatgaccactggaaaaaccatagccatgactagatggagttttgtttgcaaagaaatgtctctgtgttttaatatgctatttctcatttccactgtataattgttagggatttgatttaagtcataactggactgggtaggtaagcataaacaaagatttaagaagaaaaatccactgaaactggcttcaagttattattcttatttttgagtaagcatagacaaaaccttaaaaaagtaaataacttgtaactagtttcagtggacctgagccaggtttacctggttccttctcctatggatgtggtttgcggtaggaggccacatgcagtgagcagtgtgtgtttgggccccgcgtcgtctgtgctggctgtggatccaagaaccagaagatcctgtgctccagctgcttccccaggcccagatgctgggcagtcatcagggaggggccaggcaggaggaaggcctcacagacccaccaggatactttttgtttcatggtgcagttgaacgcaccttagtctctcagagtttactttttactcttacttgtgtttgccagccttggcgagtttaccaggaggttttgaaaccatgtacaagtggtcaaaatgtccctggggttgagtttgttgttaaacacaggacatgcttcagggacaggagtttttatctgttaactctttgccagcagttacttaaagcttggtggattccaatgagagctatgggtgggagtgtcaacagcttgtaagaagagatagaccctcagaccaaggactggtcagggtgtctgctcttccagcccagccttggcaatgtgcgaagataagttttaaaacaccctcttgtcgtcttacactgcagagagtatcatctgtctaaagtcagtgcagtttctgtatttcttccttctgggaaatgactgtaggccatgctcttcagccatcacccatttgcctctaggcagaagcctggagggggaagggtgatggagtgtgaggaaaaaggtgatgtgcaaacaggagactgcttgaagtaagactgagctacccagggatgtatttgtcacccccaagatgggcaacctttgagtgcagaactattctgcctgcctttctggggccccattgacttctcgacctccgctgcccctgccaggattcttctcatggtgccctctggctgcgccccttttgttggctcctcatcaagcctggtccccctacccccagttatcccaccactaacatttttttttctcccatctttccacccaattcaacatccttttactctctgtaggctcagctcaactggaaatttaaaaagaaacaagtaccaggtcaaagctagaggaattcagtgaagagtatgaatgacttgaagggagaaatgtgtgaccccgaactcatcatcactggtgaaatgtgaggaagagcggaggtttgctgagcagagaggtccctcagtgtagtggtttcttgctgggcgtccagatgtattcatgcctggcgtcactgtggcttttggtcctgagctggggttggagcaacctcatcaccttggaaacactgccagaagcctgtgagattcctggggtagggacagaatcctgtctgagggccctgagggtggaggccagggcactggatgagccagtctacttcttaaacccaaaggattttgtggggcctaagggctgaattgttgaaaggagtggactttggcatggactggcagtcagcatcaagcacagcaagcatcagccttgagctggacaagaatgcggacagtgagctgggggtgcctggctatgctagccatctgactgaggtcgggtaaggcggggacatttgaacactgtctcccttcgagctggcggatcctctgctgatgtggaaacactggctgccgttcacactactcaccctgcctgttcttctgccctagtttggaaaggtcttttcttcctctctagtttctcctgctcccagctcttcttccagccatggaaagcagagggcagggctttgtaatgtgtcccagtaggtaaacaagcagaacctgatttttttggtccatccttctctgcattttgcttgctcatattttcacccctgtctgggcttgtatttaaagtgaatgtctcggctgatgcgggctaagatttagtcactgagaggaactggctcaagcccacatgtatctaggtttctcattgctgaatgtttctgaactctcagcattttcatcgatgcttcagttctcacctttgtattttgatccatgacatgctatttatcttttacttgctttaaagtgacattcgggggatagaaagcatcttcaaacatatttgggcttccctggtggctcagacagtaaagagtctgcctgtaatgcagaaggcccagattcaatccctgggtggggaagattccctggagaagggaatggcaacccactccagtattcttgcctggagaattccacggacagagaagcctggcagactacagtccatggggtcgctgtgagtcagacacaactgaatgactaacacgttgaacataaagcactagaaggtacatgctgaagtgtttcagagggatgagtctctattgggtggagagtagtttgcactattgcttcttcttttttttctttacagtgacttagtttcttccttccttcctttcttttttaaaagtgtttatttatttgactgcacctggtctttgttgcctcacgcatggcctttgatctttgttgaggcacatgacatctttaactgtggcgtgtgaactctcagctgtgatatgtgggacctagtcccctgcccagggattgaactcaggcctctggaattgggagtgtggcgtcttagccattggatctccagggaagtctggcactatgtgtcacctttttaacctatcgtggcagtgtgcagtgtgcttctggcacatgtcgccttccttgcaagttcatcagtcatattggattagggctcactttaatgacttcattttaacttgatcacttttgtaaagacactgtttcccaataaagtcacactctgaggcactgggggttaggactcgtcatacaaattttgtggggacacagttcaacccgttcagttcagttcagttcgtgtccgactctgtgaccccatgaattgcagcacgctaggcctcccagtccatcaccaactcctggagttccctcagactcaggtccatcgagtcagtgatgccatccagtcatctcatcctctgtcgtccccttctcctcctgcccccaatccctcccagcatcagagtcttttccaatgagtcaactctttgcatgaggtggccaaagtactggagtttcagctttagcatcattccttccaaagaaatcccagggctgatctccttcagaatggactggttggatctccttgcagtccaagggactctcaagagtcttctccaacaccacagttcaaaagcatcaattcttcggcactcagcctttttcacagtccaactctcacatccatacatgaccacaggaaaacccatagccttgactagacggacctttgttggcaaagtaatgtctctgcttttgaatatactgtctaggttggtcatacgttttcttccaaggagtaagcgtcttttaatctcatggctgcggtcaccatctgcagtgattttggagcccaaaaaataaagtctgacactgtttccactgtttccccatctatttcccctgaagtgatgggaccggatgccatgatcttcattttctgaatgttgagctttaagtcaacttttttgctctcctctttcactttcatcaagaggctttttagttcctcttcactttctgccataagggtggtgtcatctgcatatctgaggttattgatatttctcccagcaatcttgattccagcttgtgtttcttccagtccagcgtttctcatgatgtactctgcatagaagttaaagaagcagggtgaaaatatacagccttgatgtactccttttcctatttggaaccagtctgttgtccatgtccagttctaactgttgcttcctgacctgcatacagatttctcaagaggcaggtcaggtggtctggtattcccatctctctcagaattttgcacagtttcttgtgatccacacagtcaaaggctttggcatagtcaataaagcagaaatagatgtttttctggaactctcttgctttttccatgatccagcagatgttggcaatttgatctctggttcctctgccttttctaaaaccagcttgaacatcaggaagttcacggttcacgtattgctgaagcctggcttggagaattttgagcattactttactagcatgtgagatgagtgcaattgtgcggtagtttgagcatgtgaaaagaagagaggtgaaaagcaaaggagaaaaggaaagatacaagcatctgaatgcagagttccagagaatagcaagaagagataagaaagccttcttcagcgatcaatacaaaaaaatagaggaaaagaacagaatgggaaagactagagatctcttcaagaaaattagagataccaagggaacatttcatgcaaagatgggctcgataaaggaaagaaatggtatggacctaacagaagcagaagatattaggaagaagtggcaagaatacacagaagaactgtacaaaaaagatcttcacgacccagataatcatgatggtgtgatcacttatctagagccagacatcctggaatgtgaagtcaagtgggccttagaaagcatcactatgaacaaagctaatggaagtgatggaattccagttgagctgtttcaaatcctgaaagacgatgctgtgaaagtgctgcactcaatatgccagcacatttgcaaaactcagcagtggccacaggactggaaaaggtcagttttcgttccaataccaaagaatggcaatgccaaagttcaacccgtaatggggaccagaaatagttactttgtttggtcatcagatgtagaccctgtggctatagcagtgtttaaagagtctgccctcagggagcttacattctattaaaaggacactgacaacaaataacgtaggttttgcttgctccttagaaggaaagctataacagacctagatagtgtattaaaaagcagagacatcactttgcctacaaaggtccgtatagtcaaagccattgtctttccattagtcatgtatggatgtgagagttggaccataaagaaagctgaacaccaaatagtcgatgcttttgaattggggtgtttggagaaggttcttgagagtctcttggaaagcaaggagatcaaaccagtcaatcctaaagattaaaattaaccctgaatattcattggaaggactgatgctgaagctgaaactccaatattttggccacctgatggaaagaactgacttattggaaaagaccctgatgcagggaaagattgaaggcaggaggagaaggcagcgacagtgaatgagacggttggatgacatcacagacttactagacatgagtttgagcaaactccaggagatagtgaacggcgtgctgcagtccttggggtcacaaagagttggacagaacttagtgactgagcaacaacacaaggttatatagcggtggaaaaaatttcccttcttcccttctttggctggactgataattaaattgatataagacagattaacaggagaaaaatgaacttaattatgtatatatgagattcccataaagataggaagactccaagggcagccacataattgaagtttatgtaacatcctgagtgaagaaaaggggtgtaggagtctgggggttcaacgttggaggaaagccattcatgggaaggcagaggagatgtttgaaaaacatgtctccttgttatgcagataagtttcctagataaaaaataattatgggtacaggccccctttccaatataaatttaggtggctgaagggaaattaaaaaacttttcttaaatctgatgggttttgattgcctttaccctcaaatattgggttggccaaaaagttcatttaagttttcctggaacatcttatggaaaaaccttgaacttcttggccaacccaataatccttatgccaaagagatatgttttagggtaacaaaaccttctcccctttcagttgtgataaatgtttggaagaaaaataagataatatgagggaacagaaagtgactttgggctcagtgcagagacctgattgggctgggaactgagccttgtaaagggcattccaggcagagggaacagcacgtgcagaggctcagaggcaggagtgagcaggtgtgtctggggacagcggggaggccagggtggctgcggcagggggagccaggggaggatctgtgctgcgtgaccctgagcagactggcaaggaccagacccctcaggcctggtaggcaccatgagggttttgaattctaagaggggtagggagtgctttcgaattaatcaaataggaaatgctcatttgttcctttgcaagatctgttcttctctggccccagttacttctaatctgggcaacttgtattccctgggagtcctgagcaggcctggccttccactgtgcctctcctctgcattgcgagatacatctccgcaggaatcctggtctctgcacataccctgagcagagacactgtctgccgtttgtctggactgtcttgtcagggtgttttacagtgaacagccttgggaggtagaggtctccttctggagcaaagggtgggtgggtctatcccattataaaaggtcaggttccctgagtttagggttccttccctgtaatgtagcctactgcacgtgtaggcatcctttagctctcttctcattactgggtgggattgggcatgaagaatgctgatctcctgctggattctttgtttctgaccctggagtcttgtgtcttttgcctgcgctcatgaaactgtggagggagaccatattagtttctaagcttgtgagtcaaatctcagatgcttcacaattctcaacacccttaaaatagttctcatgttggcatcatgactgagagcttgaccatgggtcaatgctttggtgtatgtgtgtggtttttaaactttttttctgttatttttggaactcttcacacttccctcttccatgaaacttgtcagaaaacagatctaattgaaactgccctggcctgaggaaaggcaagaacttagagggcgaggtgaggacatggtctcagaagtttctgtgcttaaaggcctgatggagcactgatgcagcttttaacgcaagagacgttaagtgctgtcatcctgggtatctgtgttttaaggattcagacctcctttgagtgagatgtgtgcactgtgggaatgggggtgggagtgtttctgagagtaagtcaggaggactggattcctccatgccacatgtctctctctacagtctagacaagctgtggtccatgggccaaattccagttttattggaacacggacactcccacttgtttatatgtgttttctggatgctttggtgcttcagtgacaaagatgagtaattgtgatggagaccttgtgttctgtcagttcagttcagttcagtcactcagttgggtccgacttttccaatgagtcagctcttcgcatcaggtggccaaagtattggcgtttcagcttcagcatcagtccttccaatgaatattcgggactgatttcctttaggactgactgctttgatctccttgcagtccaagggactctcaagagccttttccaacaccccagttcaaaagcttcaattctttggcactcagctgtctctatggtccaactctgacatccatacatgactacttgaaaaaccattaaatatgtcttgtaaacatatgaaatatgttttgtaaaacatgtgttgtgaaatatgaaaagctattaaatgtgtcttgtaaaccctaaaatatttagttatctggcttgatgccatccaagctttgcttgtggtttggtgctcagcagaagctctgatactttggccacctgatgcaaagagccaactcattggaaaagaccctgatgctggaaaagattgaaggccaaaggagaagagggcagaagaggatgagatggttagatagcatctctgactcaatggacatgaatttgagcaaactctgggaaatagtgaaggagagggaagcctggcctgctgcagtcgtggtgtcacagagtaggagacgacttagcaaccaaacaacaacatacttggctcaaatgcttgtgtggcagatttaatttttcaaacaacaaggacacataaccaaccccccttgaggagggctccccacatccactgcttgatgatgctttggaagaagacatcctctttggaacctgagagaccttttcagccttttcatttatggctgcaaaacagctttcaattcctgatgcttttttcttttgaaaaatgcctgtacatttatgtatcatgttagattagtcaacattttaaaaaacaccctagcatttctaaacatgttaattttaccatggatgggtggcgctgttttaacatgctgagagttttaaatgcagagggattgttttaggggctttgtttgaattaattaaagcctgccatgttgataaggtaacaggcaggtgactgacaaggcagagttctggaaaattggaaatgactgccgagtttaggattcatgaaggcagcttcctaattggcttgacaaagggtcatccgtgtgtctgtgacagccagggaagactggagtaattataaaccatgtgttaaccagtgtgtttccaggcagttacaagactgcttccacttaacccattattttgccttgaggcggaggcattacgtcatgcttgggcctttgtcagagtcacctccaaacactggagcggggggagtggcatcttcgggttctgctgaagatggtagaggagtaaaacctggacagcaggcgagatactggaattgtaaggaaaaatgttttacaaggcttgactctaaatagtaacttccgattgttataggaaccctgtggtcattgacaggtgacagagcaagcatttttcgccccttttgaagggtctgtgtgaccccgcggtgtgcccgtgggggtataacatgctggagatgttcttcgagtgattggccagtggttcagtttataggtccatgtcttgaaaaggacatagatcacttagagcaggtctggagtagacaatgaaagtacagaacagttagaaagtagcagtcaagtgaggggagaggaggggtgaacgcagattgctaaatcagattcacccggatcatagattttacccagcatcaaactttccctgagagctcagttggtaaagaatctgcctgtgatgcatgagacccaggttcgatctctgggtcaggaagatcccctggagaagggaatggctacccactccagtattcttgcctgggaaatcccatagacagaggagcctggcgggctacagttcatggggtcacaaagagtcggacacaactgagcgactaaaccaccacctcttccaggcttagtagcactttcaatgacacagacaattgagaggctcaggagaagcagagaaaagtctgggacactgaaaatgtctcccagggccccctccaccccacaggacatgtacccctgactctgaatactaggcgaggttcacagggttacctcacacagtgcaaagcgtttataaattatgaaagagctctggtgtgtgccccctcgttattctgtagaatatgtgacattctccagggactataccccaaagatatttgatgtcttgagtccaagtcatcctatggccagagacatcctgctaagggtattctatagtcaaaccttcttcctagcaagtattgatagtctagttacctggaagttcccttgataagaaaatcagatagatttacctgccgccttgggcttcccaggtggtgtccgtggtaaagaacccaccttccaatgcagcgagttcagtccctggatcaggaagatccctggaggagggcatggcaacccactccagtattcttgcctggagaatccccatgggcagaggagcctggcacgaaacagtccatgatatcagttcagtagtgtccaactctgtgaccccatgaactgtagcctgccaggctcctctgtccatgggattctccaggcaagaatattggagtgggtagccattcccttctccaggggatcttcctgatcctgggttcgaacccgtgtctcctgtggcttgtgaactgcaggcaggatctttactgctgagcacctggggaagcccatagggttgtgtagagtcaggaatgactgaagcaacagaggacacatgcacacccctgccttctttcctttttggggaggcttacccacgcctaccctcaacacacacacatacatagatagccagtaaatggaccagaggccagctgtttaactcctgaaggtgtaaagaagtggaattattcagagttaagcagaaataaaagcaatttggcagctttcaaataaaggaaggtcaattataatttgggttcctggtaataaagcatggaaaaagagtaattacagaaaggtttatcactataaagagaagtattttcattaaaaaatatagaaaacgttcagatttggggggttgttagtttttcaaagcaaatgacaacttcctcctttctctccttcccctctgctgtctctctgcctggctctgctgagttttgcatgtaccggccacccacttccgggttagcgtcttgtccttgctccttcccctttttccttctcctctttgaagctggcagagatcctggaattcagagtaaatgcccacagaagcaacagtgttttcatctaaatattgtaacatgtacaggaacttgcagacttattgacaggcttttcagttcagcatcaggtgacctaaggtctgtgcattgcaatccagaacatggtaaatactttaaaaaataaattcgacttacagtaatacccatagctagatttttctatttttgaagcagttagatacttggttaggttaataaaggaaatcattaaaattaataaaaatcaataaaaataatccttgggaattttaaagtttctattctgaatataaaagcagtgcatgatcattatggaaaatttggaacatatagggataaaaatcacttatacataatcttatccttagattaaacactattatactactttattgcattttcttttgctttttttgagacaaaatgtacatatatatagacatgcacagacatgtatgtagttattctcctctgtccctggaattctccaggcaagaatattttccattcccttctccagaagggagaatatatatatattatgtatatacactatacataatgttacatatatacataatattatatatagtgtatatattatgtctgcacactatacatacatatatgtattatatattatgcatatacactattatatatattgtgtgtatatatatgtatataaagtatatatactaatgtgaatatatacactattgtttcaaaaatatgttatgataaatatatatagtctgctttaacactgatcactaatgtatcatttaagtctttcttcatccatcatcttttaattaaggctttaaagcacattatttgcattgaccttttttgcatttgagattatttccttaggctagattcttcaaactgtaattcatagattaaagattttatccatttttatatactctgatatatactgccaagtagttttcactatctgtgagaaaaagtaacaccagtttcataactctcaatcttaatacaaaagagcgcctttcaccacatccttcccagcactggatgttctcattttcttttatttttaatagctaatttggctaaataaagtgaagaggaactaaaaagcctgttgatgaaagtgaaacaggagagtgaaaaagttggcttaaagctcaacattcagaaaacgaagatcgtggcatccgatcccatcacttcatgggaaatagatgcggaaacagtggaaacagtgtcagacttttattttttgggctccaaaatcactgcagatggtgaccacagccatgaaattaaaagacactccttggaagaaaagttaagatcaacttagacagcatatgcaaaagcagagacattactttgccaactaaggtccgtctagtcaaggctatggtttttcctgtggtcatgcatggatgtgagttggactgtgaagaaggctgagtgccagagaattgatgcttttgaagtgtggtgttggagaagactcttgagagtcccttggactgcaaggagatccaaccagtccattctgaaggagatgagccctgggatttctttggaaggaatgatgctgaagctgaaactccagtactttggccacctaatgcgacgagttgactcattggaaaagactctgatgctgggagggattgggggcaggaggagaaggggacgacagaggatgagatggctggatggcatcacagactcgatggacgcgagtctgagtgaactccgggagttggtgatggacaggcaggcctggcatgctgcgattcatggggtcgcaaagaatctgacacgactgagcaactgaactgaactgaactgaagggttcataagagctggttagttgatcagttgtgtccaactctttgtgaccccatggactgtagcccgccaggctcctctgtccatgggattctccaggcaagaatactggggtgggttgccattcccttctccaggggatcttcccaacccagagctcgaacctgggtcccttgcattgcaggcagattctttaccctctgagccaccagggaagcccttatacaatttggctagacaacaagacaggatttattgtttcgttgagaattcttgaagggtagataattacttcctaattgatcctttcatgaattatctatccatggcttctgttctttagtatgaatgttctttctgtattcatcccttgctatactgtatcaatggagaaggaaatggcaacccactccagtatttcatgggaagacccatgaacagaggagcctggcgggctacagtccatggagttgcaaagagtcagacacagctgagtgactaaacaccatacttgtatcaaatgctttttccactatattacttgcctttttaatattattattttttctccatgactaagtttcaggtttttatttagttaaattatatatttttctgttgtcttggaggtctttcagagtagtatgacatttgcccaggtataggaatcagtttaatgagattatggtacaaaagcatttttagacagtggaagacacactaccaatgataggggcagtgacttccccccgactgtcacctggaaagaacctgcagttcttatggacccacataggaacattttctggtaaggtctggataaagaggtttccttttgcaagctgccactcttcagcatgtatttacatttacggcatctttccgtttggatgagcctcactgcaggtgctgactcgccaaggcatggtcagcagctgccatactgcacagcccagggctagaggctgagggtggggggctgacctttgagatgccgtctagactttgcatgtagacagtccatggttacatctagacttgtctacgtaatttgaaaatgctgccttccttgaaggtacacacttaaagtaattggctgtttctgtcttgccagaaattcaaggccccctttccactccatgcacaggaattgacttattatcctatgcctttagtgacaacggctgattgtctctttcttgccattgtctgagcagcagaaccaagaatgggttccagtgagttgattaggagttacagtgtcacaggaaaacaccgaggcccagttctttgcactggctgttggccagattgcctcctgagtggggtccttctaccattgctaaaactgtgtgtaggctggaaccctgcaaatttgacaggactgacttgaaatctctttgcttaacagccccatccgtggctttgctggcatccatccacagccggagctgcaagctatccctcggcttaatctggttaaaaccagataaagaattaggtcagtggccactggctgcaaggcagtctgtttccagaactccagcggaactgcggaatataaataagcagggagagctggcaaagcatgacttggtacttgcatttgacttgttctgggtcagacttctatccctggttctaggtcttaacacaagagctcgcagagggcagtggatcaatgttagcaaccaggggtggtggttgttcagtagctcagtcgtgtctgaccctttgtgaccacacagactgcagtacaccaggctcccttgtctttcaccatctcctggagtttgctcagactcatgtccattgagtcaatgatgccatccaaccacctcaggatgtacttttccgtggtgcctcaagcaggaactgcaggatgctgtttggggtttgaggctctgcctggtagatcgggtcaaacagccagaccttggacaagtttcactgtatttcttttaagtattgaacagaggtccccaacctttttggtaccaaggactgatttcatgggagacaatttttccaaagaccagggatgggggatggtttggggatgattcaagtgcattacatctattgtgcactttatttctaatctaatgccacctctgatctgacaggaggtactgctttgcagcctggaggttggggactcctgttaaatagagcatctggggtgggggtctcagagcctagcagtcagtgcagcaagcttacccaactaaggcccagccttctctgggattcagagaaaaggcaagtagatggctctggaaggtcagtaggaaggagttgttcagtcactcagtcatgtctgaccctttgtgaccccatggactgcagcgtgctaggctcccctgtcctccttcactatctcccagagtttgctcagagatgcaaacctgtaagtcagaggcttgttcctttttttttttttttttttaatatgagctttatttttttaaatattattttgatgcagaccattttaaaagtttaaattttattgaatttattacaatattgcttctgttcaattttctgtttgtttgttttggccacaaggcacgtgggggtcttagctcccagaccagggattgaacctgcacaccctgccttggaaagtgggttcttaacttctggaatgccagggaagtccccagaggcttgttcttatctccctggattggtgggtctgaggagactgggggagagagaacctcatcagagtttgaccttcccaactgaaaaggctcgtttccataggccttagttactgaccgataggtcttctgtgaagcgcatgttccagagtagcgagatgtctgggctgaagcagtaatgaaactatacacttcagattgggacctgaacccaggctcacctcagtggggacttgagcccaagtcttctaacttctctcctttggaagggactggaattcagccgcgcgtgagatggaacttgaacccacaatctctggcttagaaggggacttgaacccacagtctcccagttgaaacagtctgggacttccctggtggtccagggttgactccatactcccaatgcaggggatctgggtttgatccctgatcagggaactagatttggcaactaagagttgactaaagatcctgcaggctgcaaaataagacccgatgcagccaaataaatactaaaaaaagaaagaaagaaaggaaaccccacgtctgatcacaggccttaacgaaacaggttctttatgtctcagcacagaaggaattcagcaagaggccaagtgataggcaagaagtagatttattattaatggtatagaatgcttgtgaaagacacaaatgggcaggcaggagggctctgccctgagagctaagtgggaaagcaggttcattcaaggagagacaccctccacagacagagtgtgggccatctcagaagtcaagaggccatgaggtgtggggttggttagtttttatgggctgggtaatttcataggctaatgagtggggggagtatcccaactattttggggcaggggcagagatttccaggaatcgggccagtgcctactttaatggttggctgtggaactgtcatggtgctggtgggtgtgtcatttagcatatgctaatatattataatgagcatataatgaggctcaaggtctactggaagttgaatcttttgccatcttgggcctgttaggttctaaccagttcatgttgtatcctaaacaatgatgtcattcttttaaaaaaaataattttatttatttattttggctcttgtgggtcttcgtcactgcaagggctttgctctagttgcggtgaggggagagctagctactcttcattgaggtgtgcgggcttctcattgcagaggcttctcttgttgtggggcacgggctctagggcatgccagcgtcagtagttgtggcacacggactccatgctgcagttcccgggctctagagcacaggcttaatagctgcggcacacggcttagttgttttgaggaatgtgggatcttcccagaacaggaatcaaacctgtgtctcctgcattggcaggaggattctttaccactgagccaccagggaagcccccctatgtcattcatttcaagtttgtgccctgtccccttccctcctgcctccatcaggccaagccttgttggagctgttggagggccctccaaattctggagcctccaaggactgcagcgccagggccccaggcactggctcctccttggcctccactccctaccgccacctcctgcagtgttcatctggtctgtggtttctcctctaacactccgactctctcatctgatctgtgccactcgggccgaggtggaagcagaatgctgatgagtggagcagcagtctaggaacagtggaatacagtcctgtctttgctgctcacacaccatggggtggagggagggtggagagaatgggcttttatagtcccgacgttgggtgcctctcttgggtgggtggccttgactctgtccagaccaagctctgagcttcctctgcttaatctcctctttcctcctttccccgccggccccttgcactgggacccggttgctgggcagcgaggggtgtgtggagagcagggcagggcctgtctgtcctctggatctgagtggcctgccagagccgcttcgggaatgaacgtccctgcattatgctccctttctttctctgtgtcccagtttccaccttggtgacagggaagggccatggagtgagctaaatttgggcctaattggtgcagcttaggatactgggagaagcctgggttaaggagtcaaagagacttgggttgaaattttagtttcctacttaacagctgtgaggttgcagctgagttgtttaacttcctagggtctcacttaacacacgtctagaaaaggatccataaacccagctcatcaggttctctaaggaaaacaaggacacatgtggagtgatcaggacagggcctgcctcacagtctagcctcaatgtctattgttatagagatatatgtgaaaaatacttgtcaaatgtcagctgcttgatcagcatagagcaggagaggtgaatgggttattttgttttatttcatctttcttgaatttattctgcttccccaaaatatggagatcaaaatatcttgattatataaacctgccttgttcagaatccacatggaggagaactcacgtggctttttctgataaaatttagtgctgctttccagattcaaagcaggcactcagtcatcagcagaaggtggcctttctgtgagttgtcattttcgtttgagttcagccggcccactgggacgcctgctgtgtgcaaaggactgtgtatggcatggatgaatccagattcttgtaaccacaaagctcacaatctagtagcaaaagagatgttacaacatgtgtgctcagttgcattgaactctttgtaaccccatggactatagcccaccagactcctctgtgtgcagaggactgtgtgcagagaattccatggacagaggagttctctgtccatggaattctccgggcaaggatactagagcggattaccatttccttctcttggagatcttcctgattcagggctcgaacccatgtctcttgtgtctcctgcattggcaggcggattctttactgctgagccacctgggaaacccctatatgacaatattttgacagtaaataactctacagcagttcccataaaggggctgaagaatttcaaaagaagcagcagttcctttgagctggtaagaaaggcaaagacttctcaaggtggtggcatttggctgtgcctggaagttcagttcagttcagttgctcagtcatgtctgactctttgcgaccccatgaacttcagcacgccaggcttccctgtccatcaccaactcccggagtccacccaaacccatgtccattgagttggtgatgccatccaaccatcttatcctctgttgtcccctctcctcctgccctcaatctttcccagcgtcagggtcttttccaatgagtcagctcttcacatcaggtggccaaagtattggagtttcagcttcaacatcactctttccaatgaatacccaggactgatctcctttaggatgagctggttggatctccttgcagtccaagggactctaaagagtcttctccaacaccacagttcaaaagcatcaattctttggcactcagctttctttatagtccaactcccacatctacacatgaccaatggaaaaaccatagccttgactagacagacctttgttgaccaagtaatgtctctgcttttgaatatgctatctaggttgctcataactttccttccaaggagtaagcgtcttttaatttcatggctgcagtcaccatctgcagtgattttggagcccagaaaaataacgtcagccactgtttccccatctatttcccatgaagtgatgggactggatgccgtgatcttcattttctgaatgttgagctttaagccaactttttcactctcctctttcactttcatcaagaggcattttagttctcttcaatttctgccataagggtggtgtcatctgcttatctgaggttattgatatttctcccggcaatcttgcttccagcttgtgcttcttccagcccagcatttctcatgatgttctctgcatggaagttaaataagcaggccttgacgtactccttttcctatttggaaccagtctgttgttccatgtccagttctaactgttgcttcctgacctgcatacagatttctcaagaggcagtcaagtggtctggtgttcccatctctttcagaattttccacagtttattttgatccacacagtcaaaggctttggcataatcgataaagtggaaatagatgtttttctggaactctcttcctttttccatgatccagcagatgttggcaatttgatctctggttcctctgccttttctaaaaccagcttgaacatcaggaagttcatggttcatgtattgctgaagcctggcttggagaattttgagcattactttactagcgtgtgagatgagtgccattgtgcggtagtttgagcattctttggcattgcctttctttgggattggaatgaaaactgaccttttccattcctgtggccactgctgagtttttccaaatttgctggcatattgagtgcagcatttttacagcatcatcctgcaagagggggtaagatttagatgacagtggaatgagggcaggagtgaatgtggtcagaggctgacagggtcaagatggagagctgtgtctgggacggacactgctttttcagtaagtggtacccactggagtcctctgtgagagagatgactccatctgacctttaggaagatagctggttgggaggagactggagtagttagcttctggaagcagagggacctctactggagctgtttaggccaatgaaggctgaggcagtggggacagataatagaggaatcttgtgacagaggcagaaggaccaggactggatgactgatttggatgtgatgcgaaggtgggctggaaggggagtgagcggtagacggccacattgggagtgtcagagggcctgcgctggcttggtggaggctgctgggggggggcgggggtcagactgggctctatccagtggccgggtcagccacccatccatgtggaggcatctggcagaaaggggtcgatggaaacctggacctgaggcttgggctcagggcaccagaggaggcctgggagtcagcggccgggaagtggtgacagcagaggccgggcgttagaggagatcatccaggcaggtagaaaggacaagacccgacacagagccttgggagaggaccgcacaggaagaggccgaggaggaagagcacctgcgcagggagggaggagagtgaggaagtggagccggaggaggcactttagaggcaacgggtctgaacccccgacctcctgctggctggtccaggcaggaaccagacctttctactgccgtacagggggactcatgtccaccctaccccaccaggtgtcctgaagggcgcttagtagatgcttattgcttctttcccgtagagacctggggaggcatgggaagaagtagggaggggggcatatcagcatccgatgctttaggaaaggacactcctgttgggttactcctgagctgaggaggtgggggatggaccttggcacttgccgtggggagcaggtctgagaagctgatggccaggcgctgatgaataaggggatgaggaggaagagagaaggctctgaaaactccctttgaagccacgtggccgagaagggagggtgtggagaaccacgtggcattagaggaagcagggtaaagggaaggacgtcctggcagtgcatcattgaaaccctctgacctctcaggaagagggagctagttcctggcagaactccacttcttggcatctggggttgaagcttttggtgtttgttcagagatgccagctgatgcactctggaaggaagaagtctgtcatgtgagccagggaaactgtggttggtcttgtgagcccgttggggccccggccggctttctgaattagatgtcctgtgacccagtcatctcgaaagcctgggaggagagggccgccggctttctggggacttttccaagagaagggagacagtatgaccggtctccttctgaaatgagtgatggagcttcaaggggaagagcaaaggaagtacccagtaggtaggtgagtctaagaaacttggggcctttctcagttccaaagcctagtttcagcaaagtgtgggcagtttatcagctttctctgccttgcatacaagcacagcccgatcccagacattgaccttttctcctctgtcctcggaatctcagaccttggcttctgccacctctcatggcccaccccgtctgcatcttgaagggagtggttttacctttgtcttactcctcagagatgacagtagccaggtggacaggagggtgtgggaggggggtaggtgagggggttgaggtccctccacctgctctgaggaggggaggcggaacggaagtccccaaaggaaggactcccaggaagtcaacccttgagaaggatattgcatggctgcattcttgcctaaagcctggtaatactttgcttttagaaaagttttttttcctcccatgattttaattgtgttttcttagttcctccttcagtttgacctctgttctaatcatctgctcttttgtctttacctcccttcttcccttgcttatcagcaactcctccccaccgccaccccaccccccgccactttcttgtttcaagagacaggatggacagtggctatgcgtgttggccctgcagccagactgcctgagtcagaaatcccagctccttacctactggggtgtacacctgggcaagtacttcatctccctgagcctcagtttcctcatttttcaaatgttatgataatatccatctcattgagacttccctggtagcccagtagctaaagcttttcattcccaatgcagggggccagggttttgatctctggtccaggaactaaatcccagacgctgcaactaagagtttgcgtgccatagctaaagatcctgctgcaaataagagggaaataaataaataaaaatattttagaaaatccatctcttacatgtcatattatgggaattgactaaataaatacatatagagagcttagagtagtacctgggagtaagtactctgtcagtattatctatctatgtctgtctactctctgtctgactcttttttttgtaaatggcttcaaatccttttctaatttttccaggtgacacagaaggaatatattatgttgaaagagcctacggaagttatatttctagaaatgataaattatatagtgtattttcactgtgctgtgtgcttagtcgttcagtcgtgtctgactctttgcgaccccatggattgtagtccaccaggctcctttgtccatggggatcctcgaggcgagaatactggagtgggttgccgtgcttgcctccaaggatctcccaaacccagggatcgaacccaggtctgctgcattgtaggtggattctttactgtctgagctaccagggaagcccctaaagtacagcaactatcacatggagctccagtgatggagagcccattcccttagaaaagcttcatcctgggtggaaaggtccatctaatttcgctctttctctggcttccactaacgcaaacaagtcttactggaacaaggaataaataaagttattagttcttgttattaggagcaaataaaaatgcacccaactcttaggttgaaaaaagtcagcatagccaaaggaccagacgcagggacgtgtcttttgcatgaactgctgttaataaattttaacgtgtagattttatatcataggccttatttgttacaggtttcaagccttgattcttacattccctgtgttagtcatctctgctacttttgtgacctttgacccccacgcaatacctgatgagaatgatggctaagctcacaaaccaagccctttcctgtgtcactaaaaaccttcctccaggctgacgtcaacagctttgaatgctcttcagtagctggaagactaccctagtctgtgttatccacttcacatttctctgtgaaaagcaagcatgagagaatctgttagaggcttgttaaaatacagatattccctcacccccatatatcacatatctttttcttacttatctacttgcagaatgaaagaaaatgaaatgggagaagcagtcaatatatatatatttaaaatatcttttggaaactccatttcgaatagaaagtagcataagatgatacgaattggtgaaagttgaaaggaaagagatagcagttacagtgttcaaagaattcattttatcaaaaagctatcacttgcaagtaaaagtatttgactacgctgcaccttgtaagttccttgagttagacgtttaatatttgcaatataatgttattatagccacagttgtatggagtcttcttttaatgtggatgttgaagtgggaattcccgtaggaatgtacacagtgtatgatacatgtgggtacttggggcaatatagctcttccatctttctctctctctcattgcaagggaggaggacaagtggggacacagtctcactagcatttgcacagatcactatctgttccctggggctggcacattgcagccccgaataaaatttgggttccagtagcaacaaagaaagacaaaatacagaccctggggtaactgtcacaagcagatgcttgatgtttgcttctccaagacctgttttcccttctctcatcaatctatcaagtttgtcgcaaatttcctttggagaaaaaagttacattctcagttctaagagtggacactgattcaggtcagttcagtcattcagtcgtgtccgactctttgtgaccccatggactgcagcacgccaggcctccctgttcttcaccaattcccagagcttgctcaaactcatgtccactgagtcagtaatgccatccaaccatctcatcctctgttatccccttctcctcctgccttcagtctttcccagcaccaaggtcttttccaatgggttagttctttgcatcaggtggccaaagtataggagtttcaacttcagcatcagtccttccagtgaatattcaggactgattttgacgggtttgacctccttgctgtccaagggactctgaagagtcttctccagcaccacggctcaaacaggacactgattggcttaagctaataaacaaccctgtctagatattagaaccaataagggactatttttaaatatctgtgcatgggacccacctctcagagcaacaaagtcagaatcctttgaaggggtgcttggcttgaaatccagtaacataagccaatcagcatactccatcggctcaaggttgggtacgtaacccaactcaagccgagtcgatgcagcaagttttcattttatgccctctgttctctttgaatttttatttctttgtgattatattaattatatttgtatagttaaaaataaattaatctcttttgaagttgcttctaaaagtataagatgattttaaagtatatgtcatctattgttagagtacatttctttagatgtacaaatctccattttaggaagaagtaagaagtatattttaactgtgccatgtatccacaacctcacaataatacagaataggtgtgaataaaatgttttaattttatgtatgagaaaatgacccctggagcttaaatcggagctcaaggtcaggaccagctcatgggatggagaagctgcaggagagctggctccggactgtggaagccgattgttctttgttctgcttttcgtgtttgacctcagccttcttatctagcagctctaatctgatctggccaacaactagagaggagaaaatcctcaaggattcggctaagtatcttcagttgctctttttcaatcagatgtttttcagtttgacttggttcccagatatcttatgaaattaaatttgcatgatttctttgattatacctctgctaatgtactcattgtttaactttcaggccccggcgacacaatggccacattgcagtacttcagaaattatgaataaacaaagattgtttagaagataagggtgttaacttttgatgtctagtagatttgagtgtcaagtcatttgtgaagaatatttgacttgttattttcaagtcatttgtctgaagaaaattggggcaatttttaaaatgtagaagaacatcataagacttgtttttctcttaatactaagaaataaatgagttagtttctttagttgtgggtaagattttgttcatcatcgtttcttatttgctacatttagattctgttctttgggatcatatgctaaaaaaaaaattcaaatcctctcttaccatcatttattttttcaaaagccaattctttgttaaaactctgcccaggctacttctggttttagaatgttaagttttgcacaaagctttcaggatgctttcatatatggttatccatgactattctgtcaaaagaagaaatgtagatctatgaaatgctgagtttcattctgttaatcttaataggcacttatcacatgcatccatactcagcagattttaaaatgttgcatcgttgtttctcctttgacagtttattagaggaacagacagtaaaatggaatgagtttgtgtaacattgttagtgtttaagaatagcaaaataaccaatatatggacagcaagaaaagaaagattttaaaaatctgaagcctggattatccaatgatgagtgggtgtctgaaaaagagagatttggctacacttagttcaggacagaagttctgaccatcagcccaaggagcaaaagaaaaattagcagacttttcatcgcaaggtaatgaagccacctagtggtttgttagataatttaaggttatgtgaatgtataaagtgtcttgcgaattgattgagtgggtctctatcaagcatgaataggactctgatcacttatcatttagtctggcaaggagggtcagtttcattgagaagaagcacagtgctgctctgtgtaatcttttatatatttataatcttttttaaaatcagaaaggacttgagttgacttacatgaaactacaatgagagagcacaaactagaagagaaaaaaaaataaagatataaaaagtagttaaaaaacttctgttaattcaaaaatgttttcaagattctgtccattttccatgataggactctacgttttcaggaaagcatggaaactgatcagttataaaacttcagtgttcagaacagtgaaataatttttgggaaaagcaaaatcctacctgatgtcaagaacagagaaatgtttcttctaaaggtcctcactgatgaggtactgcctcatgccatgtataatgtcctcagtccttgtaatagaaatcaatcccgaggcttggaatattgtttcgcagctgtgcctgcactgctctggaggagaatgtgcaccaagctctattttcagggcttgcctgaaagcatttgatcctcataataagcctgagaggaaggcaatattattatcccatgctgcaggttaggccagtgacatgctgtcactttatgaacctgcccaaagttaagctcttaatgagtaatggaactggaattcaaaccctctgtgctcttttccaagatgctgtgtgtgctgcatggcacatccagtgaaaatggcaatgctgcactgaatacttagacagtctgtagggccttgggtaggagtgctttaacatggtgctgaggacacggtgaggactgcgcatttctgagctgacccagtttacgttgccctccagtgtcacaggcttcaccctgactccagccaccgcaaactcatgcgtatgcgtgtgcatacatacctttgagcaaaagcagaggaccaggcaagagcactcagagtcaccacttcccgactagtaaaaccagctggaattcatgaacttttaaaaagttttattttattggagtacagttgatgtacagtgttgtgttaatctctgctgtacagcaaagcagttcattcattatgtatatatattctttttcatacttgtttctattatggtttatcacaaaatattgaatatagttccctgtgctatacagtaagaccttgttcatccattctatatataccagtttgcatctgctaagcccaaactcctaatccatcccttcccactcccctccccttggcaaccaccagtctcttctctttgtccacagttccgtttctgtttcatagataggttcatttgtgccgtattttagattccacatacaagtgatacgggagagtatttctctttctgacttatttcacttagtgtggtcatctctgggtccctccatgttgctgcagatggcattatttcattctcttttatggctgagtagtagtctgttgtgtatatgtaccacatcgtctttatccattcctctgtcgatggccaattagtttgtttccatgttttggctattgtgagtagtgctgctgtgaatataggggtgcatgtatctttctgaactatagttttgtgaaattcatgaccttctgatggctttgtaccttcagatacaagatttaaaaagcaatcgtaaccaaatatgctctattttgctagtttttccttcttagagtgatatctataaatgtttgggaatggcagctaaattgatttctcttaaccagtcatgaaagttgattagggatgagcaaggcaagcctggcatcactgaaacgttttcagttacaggagtcaaaataccatataatctgagtctcagattgagcatttagaatgctgtattttaagctgtactttaggataattgtttgattaatttcttgggaagcagaaaaggtatactctataaaatgaatttttcataaggctcctttaaaacaaatttccatggtggttaaaagaaatccgtagctcagtaaagattctgctgctgctgcagctaagtcacttcagtcatgtccgactctgtgcaatcccatacggtagcccaccaggctgccgagtctctggaattctcaaggcaagaacactggagtgggttgccatttccttctccgcagtaaaattctaacatttctgaaagatttaagttctgtttgaggagctgaagctcaatactttggccacctgatgagcagagctggtttattagaaaagaccctgatgctgggaaagattgacagcagcagaagaaggggatgacagaagatgagatggttggatggcaccaccgactcaatggacatgagtttgagcaagctccaggaggtggtgaaggacagggctgcctggcatccatggggttgcaaagagtcggacacgacagagtgactgaacaacaacaaagatgacctacgacccgtaaggttgaagtattcaaaaagataagcttttcatagctctgctgagcacttgaaaatttgtcctgtcttgggaatacaagtgatagagagcaatgctgaaatacggtaaaggaaacattggctggaaatcaagaaacttggggttcccagctccacagtattctgataacaaaggaagatacaaattctttgggtgtcattttttctcagacacttctgagtcagacctggattcaaataccaattccagtacctattgctgctgctgctgctgctgctaagtcacttcagtcgtgtccaactctgtgcgaccccatagacggcagccacccaggctcccccgtccctgggattctccaggcaagaacactggagtgggttgccatttccttctccaatgcatgaaagtgaaaagtgaaagtgaagtcgctcagttgtgtcctactcttagcaaccccatggactgcagcccaccaggctcctccgtccatgggatttttcaggcaagagtactggagtggggtgccattgccttctctggtacctattagctggatgatattatattagctaggtaaactttctgggtgtcagtttatttatctataaaaagtctttagtaatactgtgtgcatgtattttatatataaaagcatgcaggtattttatatataaaaggttttataccttcaatctttataacatccttaaatggaatattcactgttgttatccctactttataggtgctatcactgtagctgggagattagataatgtgaagaggttaattaggatagtttctgagatgtgttccgtcacctggtacatagctgatatcccagacatggaggtgatgtattcctgctgacttcatctcacccagcttcttttctctttttgggatataccttgaagattagtgaagaggagaactgcatgcattaacaacttaactttgggaattagatagagatttaagccaaagtgtaaaaataaaactgaactttaatttttcctacaggagtggcaaaaactcaattatgatatctacaccctgcgacagattcgaagggaagtgagaagtagatggaaacgcattttagaagatttaggtgagtctaaaagtgattataaaatggcaaaaataaccagttgtggttattcctctttactttctcagcctgttttttataaaaggaatgtcagtaactgactgattaaggctactgtgtactgattgtttttccaatgccgtcctctctgtatccagcataaacatctcatgtttctcttatcatcagcctttgtcttgaggacatattttgccatgtgttaccccatctgtcttcagtatcaagtagcacagggcagtgaaatcatatgggatattcattcaatcaagatcattgaatttgggggcattgtacattgattgatttaaatggagtgattggccaattactcatagctttataagatagagcagattgggagaaatattatttgtaagagagacagaaaatacctgtggtattagagtagctattgggcattgatttttcttaattctgccagggttgtaattcagtaaatatgaccctcacattataaagcttgttttcatgttcagaaaaaatgaatttatcagttttgaggttctcagtcctcctttgaaagagaacattacaccttggcattataactttgcaaatgtgggtaccaagttgctatcccctgttgcttatattatgctcatattaaatctatgagtcttttagacctttgtacaagtaatttagccagccaacgatattgccctgggggagggaacctgggcttggaggagtctggacctgaagatgaccattttgcaggttgagggggcaagtaggaattctggggacaggggaggaggtgaagagtagggaatgggaggagggtttccaaactgacaaagtgggtggcaggccattagtgggtgagtagcagaggcttaacttggagggaaaagttaacaaagaaaatttgatatgaagaaaccgcaaaagcattttaactaagacctgaccaacctcactgaactgcagggcagcaaaaggagtggtgccttgggcttcagctttctcgtatttgctccaaagccatcgacgggtcccctcaccccttgcaggtctgttgtctccttgtgactgcttcacatgagggtttaatttctttacacaggttttcaaagagaagcagactctttgttgtcagtgacaaaactgagcaccatcagtgattctaaaaacacaaggaaggctcgggaaatactgttgagactggctgaagagaccagtattttcccaaccagttgggagctctcggagagatatctctttgttatggtaagtgtccgtctgcttattttttggtaatttttaaaaattaatttttattagagtagagttgcttttgtccttttggagggtgtctcagatggaaaagaatccgcctgcaatccagaagatttcagagaccagattctatccctgggtttgggaagatcccctggagaagggaatgacaacccactccagtattcttgcctggaaaatcccatgggcagaggagcttggcaggctatagtccatagggttgcacagagtcagacacgactgaagcaacttctctcacacatagctgctttaaaatgttgtgttggtagaacactgagtagagtttcctgagctatacagtaggttcttattggttaacctattttatgaataatatcaatagtgtatatatgtcagtctcagcttgccagttcttcccactcactcccctttccctctcgttggtgtccatacacttactttgtatatttttgtctctgttttgcaaataagaccatctgtaccattttttagattccacatctatgcatgcgtatgtaatatttgtttctctctttctgacttccttccctctgagtgacagtctctgggtccatccacatctctgcaaatgatccagttttgttcccttcatggctgagtaatcttccattgtatagatgtactgcaccttctttatccattcctctgttgatggacatttaggttcctgattttgctttgaatttttgcttctctattagtccataaacttactcatcattctaaccccatggacttcgccgtggcatgaggtgtgggagatggtgctggcctcttatgccctggtgttcagtagccagcccatcataatcacttggaaggctttaaaaattcaggtttctggaatatacttagaccagttgacacttgggttgtagttcaagaatctgtatttttcagccagttttgttgggcagtcagctttttgagccattttggggtcaaagagatgtgagaaatagtgggtatatagcctaagattgagaaatgatttgaaaggactctaagagcgggggaatggttcctggagaatgtaagtgattaaggagtgtctctaaatttgttgagaaaaatttaataagtgttctactcactcattgttatttttagatggatgtgatttttaggtgaatttttgccacagacatgactttgtttccattttgacagcacttttgtttttaattttttggcaggaccgtctcattgcacttgatgctgcggaagagttctttaaaattgccagtcgaacttatcccaagaaggctggggtcccatgtgtggcagatggccagaaagaactgtgctactttccttttccaagtccttaaaggagaagctacgaggcagaatgagaattcttccactggacctcaacagccaaccaaagttgggcaaatgggtgcaaacaagaatgagcaagaagagagctagctaagagaaaaaggattgtgaatcctactaaaacctaagagtttggatagctggtcatcatgaaactatataaatgttgaggttgcattgaaacatcctggtgatcttgcatcggagagttggtcagtgggctgttttatcatgggtgattagattctgttgcccccattttggttttggttgtataatgagctctgaccactgatcctattgggagaatgggatattccagttaataagattactggagccatcattgagcctaaatatggattaccaattattaaataactgttatataatataggctaacaccaaaacactaccaggcatgatgtgaccttccttgattttggagcacctacataaccttggaggtgtttagagcatcaattggagaatatccagaagtttaggtgtaccaaataatagaaatatctaggagtactgctcaggagggagtcctaagtagaatgatcccaagcagaactccatgtaaaaagctctgtcttcagttgtggtacaggcatctcaaattcttaacgttattgagatctggttacctcatttttgcatagtgtccagttctgggccacaagcccctgcctgatattttatcggggatatttgaccttcactgtcttctcttctctttagcctgtttccagcttattgactgagagttacacctgcccaaagtcctctcgtgcatgtttgcaactctgtagccatgctgtattgaagaaagtcatttttgggctttcttccattctgaagatgattttcagaatggagcatttctgtcaataagtttgccacaggttgagcagctcagcttcaaaagttaatagccccttaagcaaggagcttgtcatgaaatcagggttcattgtactgaaaagagcttttcaggtttatcagtagattgctgaaaataatggcaatattattacttttacagattttgcttttctgacttcaagtttaaaagtaacttgtatgtagtctgtgcaggggattgtgacttgaagatttccctaccccaactagctctcttggtagtgaatactttgtttaaaatatttgttagaggagatccatgttatccatttatgagtgcattgcagaccaattaactgacatgtttcaggaaaatttttcgtagttgaataagtaaataaaaagttttatttttaaaaataaataatacatttttattttgttttgtttagttcttaatacctctctcaagttgtttaaaattagcctgcagatattttctctcacttctgtaggctcttgcaagataaacatacagtgagacaaacaaataaaaccaaaaagaaacaataaattaacaaaatacatttgaagatcatactcttttcatctttgtccatggaatttgtgttttgtctttctgccttttttgatgtcaaaatagaggagattgtttgcatctatagagaataaattgtaatgatagtctttatttttggtaatgaataagtaaggttaaaactgtctctatgattataaaaactcatggagttatacaggaaaactttcattgcaaagaattaaaaggtttctatatttacttttcagttgaatgtgtgttatatttccgagaataaagaggaaacagatattctttccttaatccctttaaattaaaggtaaagaggctgagagagatgggctttaggacttctggtcgttctaaagccagtcaaggggccagtctgagctcaagtccattgagaagtacggggcttgagggtgacggaaggaccacttcagaagtcacaaggtgctcttcaggaacaggatccaggggttcatgtgtgtatgcagggcagtttcaggtgatggatggaaaattttatattaatagttatttattttaacatgcaccaaggaagcaagcgggtggggacttccctggtggcttagcgataaagaatctgccttcagtgcaggagacctgggttcg

(The sequence listing continues in the following parts.)
